United States Patent Application Publication US 2018/0305689 A1 - sequence listing, part 88

SEQ ID NO: 1244167 - DNA, 4001 bp, Homo sapiens
aaaaaatcaaatgagagtaaatgtgtcctgtaatatggtcatggtgtgcaataaataagaaagtttctaaggataggaaataaagatagcaaaagaaaacgtactgggctgagagagaggtctgctaatgagtgtttagagcagctattccccagctgacgccatatagaacagcctgagtgtgctctgggcacatgttgctatgtgagcacaactgctaggaaagcagcctcttagaagctcaataaacatgagggaggaggagggggaagtggggaggggagggggatacccatctatctacgtgtgagccccctgtctaacatttatactcaacgacacttggcttgtagcactgctcagcatttgcatacgctgaaaaacagacatgtttggtaaataaaaatatacacttaaaaaaatctgaaacacttaatctgtgcaggtagctgttttcaatctttcaggctacgcaaaagtcatacaaggacgctacagctaaccagagattctacaactcaggaatccaaaggatgtagaaagactgtgttcttttattttttttaaaagcaaaattcacatgagtttagatcaaatatttcttatggagaccaagaacattaaaaaataaagtgtcattaaaatatgagagaggaggaagctaagtaaaatggccttgaccttatcctcaccctttccaccatgcttcaattaacatctcttaccccttctgagcaccaggatttttccagataatggcaaatagaaatgaaacatttggaagtgagcaggaaaacgctaacaagtgtacagataatgtacagcagacacacaacattggttggcgagaggaaatctggcagcctattgattattaatgtgaaaagaaaacaaatgataaaacgcaatatggtttctttgcatatccgaggttttcaaataacaccttatttcctaacaggtaaaatctgaatttatgaaaatcgtcggaattcacagccttttatcctagtgatcatcctatgatatccttacccagacacagacattaaactgcccattccctatccctattttttttccaattgtcatgatgaatccacgctatgatgcaatctttttgcagaatcaagtcgttttgactattttgctttcctaaaaccacactgtcttcaagccaggtattaataccattattactgaaaataacaaattggttaggggagagtgatatgtaatgtgaaagttttgcgatcctcaggctcaaatccaactcgggctcccgctcttctttcaggaaggcaactttgagacactcactctgtttgaaactcacagctatacttgaagcaatgacgaaaaaaaaaaaaagccaaggatcaagaatagtgctgagtcccaagctttgccaaggtttaagaccagggctcaagacgcacccccaaacccgcaaccacgttttctttctttttttccccacttagagtgagaaccgaacacagacgctctcgcccttgcctccaaacccagtatctcgctacagctggtgcattggaagttatgagcacaaacagatgctgcagagaaatctgtttctattgctcaactgttccaagcatgtctcagtatttttagctctggggatgttctggtgcgcacacaaactatataggcatgatctgggactccggagtgtgggtgagcgctacagcagtgtgacagctgggcacctctggagcagcggggcagggtagggtaggggacggcggccagagtccattccccaggacacaccggcagcgagcgaaaaggaagaaaacacagcagcccttacctgttgctggcgcaggagcatggggacatggagtggaagtggggggtacagaggcatgtaagatccagtggtttgtaaaaagcgagtgagccaaagcaaaccagaattcccaagacccagcccgccggcgccgggaaggctgcgcgctggccagggctccagtgcgctctgcaatatcctgggctcttttgaggcggtccgtgcgacaccggctctcctggccccgcccccggccgctgccggccaatcgcagcgcgcctggccgcgcggccggccccgggaaccgcggcggggaggggaggatgctgcgaggcgttgccagcggagggaacctgccgccgcctcgtccccctccaccctcggagcccggccggggagtcgggcccgggccggggaggaggaagttgcggcccagctgggacagcagcaggtgggaagctccgcgcccggctgttgcggctgcctgattgcagcctggccttgggcaaagcttcctactccgtctggagccccacacacttcccggttcccccgctcttgggccgcttgccctgcgtgctcctcgaggggcctgcgaggtgccagcgccgggtagagacctttgccgcaggggcaggattgttcgtcggtcccggcgcgtctccctctccactccctctctgccggagcccctcggcccttcgaagccccccgcggaggctgcagcgcccggagaagccactgagtcaatggggcgagggactggggcgggcgcgcagagcccccaggattgagacgcgcgcaagtgcggccactgcagcgccgcttggctgtttgttctcccgactgttcgcgaattacttacaaggcgcctaggcttctccgaagggtggacggctcgttccctctcgccttgtccgccctcagtctctccaccaccgcccggcacgctttgctgatctaaaatcagaacaattagagagtaatgattttttttggaatagcaactcctacagacactcagatctgccctcgcttcagcgcctcccagccctccttcccagcagccaggcgagagcgcgcagacccctaaaaagcaacttcagtgttaaccgggtctggatcctggaactttataaactaatccgtgtgtgtgtgtgtgtgtgtgtgtgtaaaccgaagagtaagtgcctattatttctgagtacttcggtgtcctaacgaagctttgctcctaaaggacaggatatattttaggagtctttctttccactgagttttttaaatgtttattttctcgagcgatcaaatgtgtcttttgtgcagtttatttaaacctcgtaaggcctccttgagtcgctgaactaattcagcaaactagctggtattgtggacggcgcagtcggggtggatttttgtgtgtaggagaggtgaaactgacaattcaaggaaaggttctgtgcgagtccccacctcccatcctcatatccacacgtggcccctaggaggtgctggtgaaatatgcttgcttaggtttcgcagatccgcacttactcctgccttaacaagtgtgccttttttcttagcactgagcaaggtacttaaattaaaagggtgtgcaagagatgatgcactcggtgtggctgctctgatagccaaatggcgatgtggtcccagttaatgtgttgagattatactgttcaccaagccctgttacgaactctgttgccatgcacgtgggaataatgcctgccccaagggaggtcttctttaacatctatttagtcatgtgttatttataaacagcttgaattaatactgtaaaatagacggatgtctaagaatctaggctgtagcctaaagctaaatgaacctgagggtagacaagttcactctgtattaaccaaaggataatgaatgagttcaccgctcagttcaataagcttcttctgaaatatgcttcctcctggacttctaagaaacaggccaaaagtttaattatcccttaaaacatgttaagcctaaatagaaaaaggaaattaatcatttatagattttctcttctttattatgattcagttggtgcatctgtagatggctaagaattttccaaaccacgtgaattcagagaggcaacacttttgttgttgttgtttttccaggtaatgagctcgctttgaaaaccagt

SEQ ID NO: 1244168 - DNA, 4001 bp, Homo sapiens
ccttaggcaagaacaagctgagagaaccttccctacccctcccagggtcagcacaggttgagaccttctggaccacttgtgagtccttggtgggctcaggtttgggaattcctgcccacatctgagctccagtcaggtgcaggagagtcccgactctcatagctcctgaagcagagctggaaagaggcttcaggggtgctagtaccccattctctctcctccccacagtcaaactgagaacagcatcctcagtgccggacaaagcgcagagacctggagttgagcaggtcttcggggtcggggaagacagagtctagtcggaagccgtgctcgagagccacccgcagcacctcctccaggaagcttggggtgcccaccacctcccgccgctctcctggccccccagtccacagcggctgcagccccagtctcccatactccacctcggggagttccacggggcggggggcccactccagatgaaaatgtgggctcccctctgccctatccccactggccacaccaaatcgggcccgcaaagcacctagacactcagagtcggtgcagaaaaggttggctcggaaggtgtccacctggacggagctcagctcatagtgatggggtccccggcgagcagagaagtgcaccaggcgggggctgacatctacatctgcgtggagcagggcagctgtgggtgcaggggtcccctgagaggcctccagttcccgcagcgcgtccaggaggggccggatctggtagaagtcagcctctgccctgagcagcgctgtctctccgtacccacggggcaggtccaggcggcccagcctcaggaaattgaggatgtgccggaaggccttgccatcccggtcgatgaagtagtggccgcctccttgggaattgaggttggggggcatgggggtgccggccctaaacatggcccccagcatagagtctgggaagcgggtcagggtctccaaagtggtggaatatagtgtgccccccacattcagggtcacggggcccccaaaggaggggggcgaagagggcacaggaggaggagaaattttgggaagtacaggagacaccgaaagaaaagaaaaggcagaacttcctgggtgtgtgcagaattgggtcgaagctgtcagattcgctgggttggaggcacaggtggagcacacccagtaaggtttggggctcaccccggctactttggtggtggatggggaggtggtgtcaggacacagaaatccccaaaaggttgagagaagagatgaaaagagcagagggcagccagagaggggaagggagcttgaggtctggacgtatccgatttggggtggtcagcgacacccctctgtggtcttcagacagtgggtttccggaatccaaccagcaggtgacggtggcgagcacagggccgactctgaagggatggcctccgagaccccgggcagatcgctgccgccgtggacgagtccagccagggctctggggccactcagaggcctggcctggctgccggcgcgggtcccaggagatggaggccgaactgacgggagcggatggcggagcccccttgtatccgccggggagcgacgatgcgtgctcagcccgggctgggagtgtccgagggctctgatggaaacagccaggagtttcgggacccggccgcgccgccttccctgggtgtcgccgcagccgctgaggtcctctccgcccccaggaagtggcctaagggcagcggcccggggccctttaagagacagccccgccccttggcgccccgcccccgcccccgcgaggctcgcgcggcccgggcggaggtgggaggctggaggcgagtctcggacgcgagagactgggcggactggctggactggcagacgctggcgggacggggtgactcaggcacgtcgccccggatgtggccacgaccgccccgccgccgctcaggtgtgcccgatctcacgtctgcaagtcggcggggctggagcctctaatcccaccgctcagagcccgaggcccggccggcccagcccgggagccgagtccctcccagcggctcccccggggaattcccgagggggcgggtgctgagccgccgcattccggggatgccttccagccggggtggcccgggcgcgctctctccgcggcggcgcggggccagcgagccccagggccagccccacccctcggcaggactgggctggccacgtcgccccagcccgagagcccccgccccgcagcgccctgcgctcaggccgcggccgaagctgccgcctcgctccccggagtcgcaccttgctggactggagctcgcaaacccccagctgctccccgcacctcgggagccgcagcgcccaacaccctacgggcccgaaggtggcgcccaagaagtgaaccagaagggaagagcgaagcacggaggctttaatggcagagggcccggtggcggggaagggaggcaggcgcgggccccgtgggcctcgggtcacagcgtgtggaggtcatgactgcgacggctcagcttctccgggtcgtctgacgccatgagggagaagtcgcggaagatgtcaagatacgtctcatctcctgggggagggaggaaaggccgggaggcggctgggccccagtgcagaagggcaggatccggcggttggggcccacctggggacctcgcgctccgagcctgggtgggaacgtgcgcgccgcgggcactgcgccagcacctatgccttgccagggcctggcacgtcgcatgcgcccaatacgcatttgttaaataacggaatgaatgcagctgggcactagggagagaggtcaccgtggaccagaagcccagagttcaggtgttgggcctggggggtggggtgggtgtattctttacctgcctgcccctgggccgcttcagcctccctcatctttgccagtcgtagcctgaagaggagggaattaagaaatgaacgacactatctttggccgggcgcggtggctcacgcctgtaatcccaacactttgggaggccgaggcaggcggatcacgaggtcaggagatcgagaccgtcctggccaacatggtgaaaccccgtctctactaaaaatacaaaaaattagccgggggtggtggcgcacgcctgtagtcccagctactcaggggaggctgagacaggagaatcgcttgaacccgggaggcgggggttgcagtgagccgagatcgcgcccctgcactctagcctgggcgacagagtgagactccgtctcaaaaaaaaaaaaaaagactatcctcacctcccccacaacttcccatcctttgagctgggttgcgttccgttcatctgcccccacccccggggtcacgtctagtgctaaaaagatgcctgacagcaatgttgatgggcgaattacgcctctcagggtgggccaagcatccttgcaccctgcccgccctcccgcctgccttctactccacgtcccagtgcacacttcgcgcagcctttctcgagcctggccccggcgctggcccagcccctttccgaggccccacagcacaggcttctgtttcggcgtcagccccgcccgcccgcccgaacgtgggtgggcgggggtggggggagtcccagcgccagccccgccccttcaggcattcttacagggtgacgatgtcagcgttggctgtttccatggcgatggtcagagggtccctgccttcagagtctcgagcccccagatcagctccccgtttcaggaacaggcaggcgagcctggagagaagagccagggtcagccggccgcccaacttctcccagccttcctccccatgccatcatccctaccccgtgtggccaagaatggttgcgtggtgcagcgggccccggcccgcactgtccgcttggttcacgttcgccccgttctggaggagaaactcacaggccagaagagaattctgcatggagaagtcgagaaggggggttgagggtggcatccctagtggtggatttc

SEQ ID NO: 1244169 - DNA, 4001 bp, Homo sapiens
ttgaggagtattttaaacaaaggcagggcaggatttcaccatctttgtcagcgccccaagacaacaattcattccatcagctaaaaaagactttagtgatggcaaattttgttacacatttgtcacaaactattggtaagaaagctatagctttatgtatcttgtacattaagatcatcttaggtagggtgttacagacagtcatactcatttaggcgtttacttactggctggaatttgcaatctttgcctggacaataattacagtgacaaacattcttctgtagcgtgtttgttattaagaaagggagaaaatgccgtagctgtgtaactgaaatctttgcttgagatggacattctgacttttccactgcctctgaactgcattcctaattccaagaaaacctctgtgtagttggcaatgctcctgagctcaaggccaacatcagtgggagtttgcactgccagctgtaatctcacacaccccagctctgtgcccagaggaagctcggtactgccaggacttggctctgagcagctttaatcctactcatctttacagtaaaaggaacaagaagaaactggcttctattaccacaaggaggatatagagtagataaaaataattcctttataagcaagggttttgaaatctctttaaagttagggcaggataggtttccatcaatctgagatttcttagagaagaggaataaacgaaaacaacaaatgtttacgcaactccagctctgttttgaggtcaccagctgagtgctatatgggatataagatggtgtgagttatggtcagtgcctttaagttgagaacttaaaggtgaatacgtaaagttaaaaagaaattgacacagttcaaactggaaatggtttaagtgtcttgtcacctctcaaccctttggttagcagccatgcatcctgcccaaaattttcccgggaaaattttcattttccttctgtcttagcctagatttgcagcggcaaacagtaacctctttccaaaaaacgcatttgatctaaatatggacctaaaccagtgactgttaacagataaaagttctgcgaccaggactatagaaaagcagtgtgatatcacaaggagcgcttcctgcagctgtggaagcccaacttggcagaggggtccgagagggagtctgagaaagctacaaggatgcctgagctaaccctgacccagttctggatgcatctggcaccggcagtggggggactgaagaggagccagggaaaactcatgcagatctcagtgggatgtcaggggcagagaatatggagaaggggtgtggagtgcgttctcgtgggtgcaggtgggcgcagtgtgggaaggagtctcagagaacgaagggcggggtcggggagaaagccagagtatgcctcagcatggaagaaggggagtgggaggtccctctgaggcccctgcgagtagtgtgggagggagggggaggatggggtcccggcctgagggggctgcctgtgaggagcgtgtctcaggactctggggaccgatctacgagaaaccagggggttcgaaggcccgggggcgcgcccgagggcggggcacaccttgtctgagtccagctccgggtcctcctggcagcagaggcggcagagaaatgacttgggctcccggcctaaggtctgtctggtggtcacgaagtaggtgcctcccacgttcagcctgacccagcgggccgcgccgccgccccctgcccgctcgggtggtccgggacccggctccagcggctgcgcgacggcggcagccgggcggccgtgcccgcggggcgtggggccagccgggcgtgggctggggggcccgcggactgggccacccccgtcgcccaccccactcccgccgccccctcccagccccgccatcgccgggtccagctgcagttccgccatcttggaccgccgccgccaccgctgctgcccgcgcgcagccgggccggcccatttctcggcagggagagccgggccggcccatcggcgggggtggggcagaggggagagggacgggagcgcccccaaccagcgcccggggacccgcgcgggggaggcgctgtgcccgcccccgggaagatacttccggaaccagccctcatctctattggctgatctgcgaagcaaggcccacccccttggctttggggttggctgaggaaagatcttcccgtgacccacttccgttacttgctgcggaggaccgtgggcagccagggtcggtgaaggtgagtggggcttggggcattggatccgatccctggagggctcctctgctctgccctctccaaacctcacgccgacccttgtcacgcccccgtcaaggacgctgggccctcggcttgccccgctggcagagtgtcccttgtgtagctgccgctcctcgccccgcgatcccttcctcagccctccttggcgcgcggggtcaggggggcccggctgtgtcccaggcgccgctgatgtaggcgctgccacaagccgtgtctcgtgcagtccgctcccagcgcggcagacttcaatagtttggtggggggactggggaaacattacgcagacagtgttaacctgccgagggacgctcagctggctgcggggctgcgcccttccccttcggcagcttccaggattcgaacgtatagagcgttcagggctcctcgggtgcagagttcggttactcattcaagaaagattcattgagcacctcctatgcgcatgatctgttctaggcgctggggattaagcaatagatttttaagaattaaaaaaaatttcgccgggcgcggtggctcacgcctgtaatcccagaattttaggaggccaaggcgggcgaatcgcgaggtcaggagttcgagaccagcctggccaacgtagtgaaaccccgcctctactaaaaatacaaaaaattagctgggcgtggtggaaggcccctataatcccagctgctcgggaggctgaggcaggagaatcgcttgaacccgggaggcggaggttgcagtgagccgagaccacgccactacactccagcccaggcgacagtgcgagactccgtctcactcacacacacacacaaagttatttgtgacttccattttccactgatgttgcgggaaatcagggaccccaaacagagagaccggctgaaaccatggcagaagaacgtggattgtgaagattttatggacatttattagttccccaaattaatacttttgtaatttcttatgcctgtctttactgcaatctctaaacataaattgtagagatttcatggacacttatcacttccccagtcaatactcttctgatttcctatgcctgtcttgtctttaatctcttaatcctgtcagttgaggatgtatatcgttccaggaccctgtaataattgtgttaactacaaaaattgtacagcatgtgtgtttgagcaatatgaaatgtgggcaccctgaaaaaagaacaggataacagcaattgttcagggaacaagagagaaccttaaactctgaccgccggtgagccgggcagaacagagccatatttctcttccttcaaaagcaaatgggagaaatatcgctgaattctttttctcagcatgggatatccctgagaaagagaatgcgcacctaggggtaggtctctgaactggcccccctggggcgtacctgtctcttatggttgagactgcaggggtgaaataaactccagtctcccatagcgatcccaggcttattaggaaaaggaaattcccacctaataaattttggtcagaccggttgatctgaaaaccctgtctcctgataagatgttatcaatgacaatggtgcccaaaacttcattagcaattttaatttcgctctggtcctgtggtcttgtgatctcaccctgcctccacttgccttgtgatattctattaccctgttaagtacttgatgtctgtcacccacacctattcgtatactccctccccttttg

SEQ ID NO: 1244170 - DNA, 4001 bp, Homo sapiens
ttcttacctgggggagggggaggcggaggggagggccgccggctgaggctccgctgtgactcagccacccgggcaggccgcccgcccgggattcccttccccagccttcccccggctgccggcccctccccgccccccaccgaggagtgacggtgccggccccggcccgctatgtgtcactgcaggccttgtgtctgcctctgactgggcgctgtgttcaccagtctgtctgacacggtcggctgtgcgtgggtcccggtgtctgtctccgcgtgcacctgcatatctgctcatcttgtctccctctgtgcctgtgtctgacgcgttcctgtcattatccctgtctacatgactccgcggggctgtctctgtctgtgtgtctgcctagctcctgtctcggtcttttgtctgggtctgcctctgcatcactagcgtgatcacgtgtgtctccgcacatgcccttctgtgtttgccttcatgttactgaacagagtcggggcgacactggcgcaggcccaccctcctgactccttgctacactcctctcgatcctgacgtctcgctggatcagtgatcattctgtctgagtcaagaatttggaggtctgtctgccttcaatcaagttctgtcccatccctcgacatccctgcttatcctcagagctccctgtggctcccactgtggtgataactgctagcattttgtgaatatttgttacatgccaggcactgtattaagtattttacaagcatttcttttactcctccccaaaacctgacataggaggtactctgattacccccattttacagatgaggaaattgaggcccagagaggctaggtgacttggccaaagtcattctgcaagtgaagaatgaaagagctaggcttctttccagagccacattcttaccactcttatgtactgcctctgtcctactctccctcccttggttttatcctcacaggccatctcctgggtcaaccttcctttcagctctacccatgttaccatccccaatgtctcacgtcctctagaggataaagtaggaggctgtgcagcaaatctcagaagtcataggttcttcataatgaagctcattcagttaacattattcaacacaaatccaccatgcaccccaatgtgcaaaacatcaagcaaaatagtgagagacacatagaagaaaacagtcccactcgagaaaccccatatgtaatgaggaagaacaacacagagagaacttaagcccctggcttagggattatcttcccttttctcctacaaaggaatgggaaataaagcagggcctcaggcagagaactgacagaaggagagagggaagcagaagagtaagacttaggtatgggggcaaatgctatagtgcagtggggagagaatgggactgaaagagatctggaaggaaaggtgaaatgccaagactgctgtggctggcagtgatctccactatctccccaaataaattctgaacaccctccaaaagccagggtgttcaacaactcctatagggacaaagctgtttccctaccaagaaaaaattcctccagggtagctcatatccacttttcagcttgcaaactccctcttcatttcaataagcaactgagttgtagcactagggagatagtggggaaaagattttttggtagtagtggagaggctggtgaagtacagggctgaaccatttataggagatagaagggaggtccataaaccaggagggctgaaccactcaagcaccacatggtggggtgcttagaattggactggaccattctgaagagtgggcatgatccagatcataccgagcatctccaaccatgtggtgcagagttagactgctgaggagagagggtcactcagacaggacttaccagatggagtttggtgtgccctgtctcattggaaccaccaccccagcagtggggtacaacagaccacagtgggtggggtgggcagtgctacggggctggcatgttgccctggggggaacctaaaagaaaaaagtcagttagaggtgggggtcttccaggatggagaattttcctgggctccctgcccccctcattaaggagaaacctggctctggtggtcagatatgatgggagaatcttgtttccatggcaaccagaaaaagccatccccaaagtggtcatccaaccttcccctttgggaagcaggctcgatcagttggtaaggggccatgatatggcatctgagtaagtctacagtagaccccaaacccgtgatccctcttctgacaggacgctcctgctgagactccctggcctgagtcgccccagctgccctgacatctgtacacaagccagcctgagtcctagcaccagggcatgcagaccctcttccttcagctctgtgtcctctccaaccttatcaagacaccagacagtcaaccccaccctctggactctgccccctcttcttcccccaggcgggtgcaggcaggtcttggctagcagcacaggtagccagactagatgaacgggcccaacagggaggggccatcctcccctgcaagaactctgactctgggcctaagcctggaagtagcctccactgcaagcctcccctccctgccaaccccaaggcaatatcctgtttccccatcacctccttcctcttatgtggcctaagaaggtgatacaggcccactcccttcccaaccctcatagacaagaagctaggtcttttagcataagtccaaggccaagaatcaggtgtccatcaggggtcagagctaagttggccctcacctcagactcgctcctcagggacctatgttttctgctcccttaatcatagttctctgcccttatggacccaaacacttggggtcccaatctaatctctatattccctagccttccggcccccatccttccccttgcctcagagactcaggcctctagcccccagtctccatgatgcaatgttccgcaagcttctgtggctgctgatgacactgcccccagggaggtgctatttgtgacccaccaaggcctccttcctaagccagggtagtggtcagctgtaggtggtagaggtcaggcaggcaaggcccttctgctcgggaagggagcttcaggctagaactctccaggacagggaggctcataacctgggagcagagagtgtgtatctatagtctgtggcatctgtgttctgcggttgtgctggggggagggactaggaaagggctagtcgagagcagagtgggcagactttaggacagaccaagaggaggagtgagggggaagcctagggggtcagagggtgtgtgaggggtgtctggacaacagagtgggggaggggctaacagccatttaaagggccagccccagagctttaatccctcaccagccctggccccaagccggaggctgtaattcatctgtccaacagctggggtgtgtgtgtttgtgtgtgtgtgggggggggggcttcctcccccttctattccctccctcctcctccccgtccctgagtcccggagtcaaacaaagaactgtagcaggctctccccaaccccctccctcctcctcctcctcctcctccacctcctcctcccctccctccctccccaccagcaggctccctcctcctcccttccggtctcttcctttaactacccgcccccccagcccccagcactagtctctctccacccacccaccccaaccttttacacacccctcagcctagccctgtccccactagagaaactgtggagtccctctgcaaaacgaaaggctccagagatcaacacgggagggggctggggtcttgcttcaaaatcaagaaccataatacaattattttattttcaaggcccacggaatagtcttagctatttcttgtccaagagaaaaaaaaataatcctaaagaaagcaatacaaatctgcctaaagccttcatcaaataaaatgcacaaagcagttgaagctaatccccagcccccta

SEQ ID NO: 1244171 - DNA, 4001 bp, Homo sapiens
tcacttggcagaagatcttcaataaggatgggctgaaggacagttccttttgatccaccccagcgctctgggagaatggggcagacaggtcagaaactttctgtaggtccgttctgatacgcacttctccaaagcacaatgccacatagtgtctgcccagaagagaaatctcactgccaccaggtccatccctcccatagcagtctattccccaccctcacattcactttctcatccttcctagaaatatagctcaaatcacagagattagtttcatagcagttatcaatatcttcctcacaacacaatggcacccaggctaacaggaagacttcagcaacaacctcccttcctccttggattgtgatgcctctgcagaagagtgtcactctgcaaacaccaactccaaagtactcttctaggggagaagtgagaatatagggtactcacggaagatcatggctaaggagtttgctggaaatccacaggttatcaatttcctaaaacagtgagggagaaagctctgtgtgctagctgctaaataagccacgagcagcttgacaagccaggaaatgttctggattattagaatttctctttcatagccatgttgccttgaatcccatcttaaattagaacagtaaaatcttcgatttcctgttatctttcttctgtatctttgttatgtgccctggacactctgtgtcctacaaacatttttaactgaacaacttgcagcgttctccaactagctctaagatcatcttggcaaagaaatggcaaggctgggattaactagaaaagccaccaggatttctatttttaaaaaaaggaaattaagagtttaaattcaattggatcaaccctacacacatatccagagtttcccagaactcaccactgtttgctggtgttgctgaaacttaagactgacattctggatccaaaaaaagcggaaggagccaatctttagctccgcctgcagcttccgctgacaccacttggtggccaaccggaccacaagccacctgcagaaaaattcctgttaattcataggacctttttccaatgatggtttccctcaccccttgctggtctttcaaagccttgcaaaaggtcgttcctgaaactggatctgagcaactctcctttcttccaaagcaccactctgtcatatacattcagccacgctgatcaagatcctagctcccgactgacccctccacccagatgaaaccagaaactgcaccctctaagttgaagacaaaaacaaaatccctcaaattgttatgaatcccagaggcagagagagaagaccccagcaagagtcaaagcggaggcggctctgtcacatgtgccatcacactccccagagggtctgtctgtctcctgctcccaccctccagacaggtatccacgagaaggcactttgaggtcagacccggcagctcgaatgctgttctccccagaccgatgctgcaggtgcccatcgcgcttggcgaaagggacatgcaggggtgggtggagggggaaagggaagccactgaaccaggccccttcctcacactcctattcagttcctggcctcagcatttcctcagaccccgcccgcttcctcagtctccccaactcgcagcccatccctgggagctcgggccacgcgcctcctcacgatccctcccctcgccgcgcgccccctccctccaccctacccactctgcctcacgcgcctcagtaaggcgcgcgccccctcctcagtctttcttcctcctctccgccccctccctcccgccgccgccgccgccgccggcgcggccgggaaccctcaccggcctagaaagagggcgctaagcgcaactagcagcaagaccaacagcgcggagaagaacagaggcatttaggtccgggtccggcccggcttggccccggcccccgccatgccgggccccgacgccggatccgcgcagcaccgccgcgggccgaccagctgcgcgcgcaggagcaacgctgagcgaggacgcgctggtgcgcacacgagccccgccttccgcagcccgccagccaaccaacggcctcccaccccagtcccgccctgtcctacgacgctgcagggccgacgggctgcgtgcgcgaggagcgggcgtggttccgggaggagggcgagggggagcggaccaagagctgaaacacgccccgggcgcacaccacggtgcccggaaccgcggggctcggggacccgcgggggtcggagtccgggcccactacctgggctggcggtggacctggctgactcatttcggtccggggagctcactttgaggggagttggagtccgcctagccacttaggcctggactcagggttctgcggaagttacacccctggtcagacgtggtagcactcccatcttattcaagatcctgtttgaaaattactgaggcagaaactaggaggtaattaaaaggcctcaaaaatctcgcctcattccatccacagaggaaactaatgaggttttgttttttttttctttgagacaaggactcgctacgttgcccagtctggtctcgaactcctgcaggctcaagggatcctcctgcctcagcctcctgagtagcttggactaaagacgcgtgtcacggttcctggccaatgagtttttacttcatttactgtttgaacactgttctggtccatctacttatggcacgaactgggccctgatggaggagaggaggagatactgcagaagtagtgaatattgttcttgccctttagcaaaaaatagtttatctgggaagcaaacataattacataaagtagacaatacatagtcagttttgcctgcttccttctgtgtagtttatctgggaagcaaacataattacataaaatagacaatacatagttttgcctgcttccttctctgtaaaatgagagaacaggacaaaggtccctcagcgttactgtgctaaggatcagtatctgaatgatgatctactgatacagcacaagctaaggaaatcctgacggtttcaaaataagtattatggaggaggtcatgtctcttttcataccccttcgctcccacgtcctaatctccatatatatccttcaagattttactcagagcctctctttttggctccctcagataaaacaccatttcatctttcacctgtgtgttgcccgaagttgctttcactcctctgattgtttcctcccttatctattcctctcttcagtgatttcacatctccccaagagctccagcgctgctgtttcaaggtcatacttacctctcaagcactgtatttgcgtcatcttcctcgtcatctgcagccttcccccagggtatgtcctccgaatgctctgggaaggcccaattcactgaaaacctctgtccaagtcaaggaggggtgccgtgcaacacgtatccctactctggttcatcttatccaatctgtttattgaaccaagattcctgtcacttccttccttctcccttgactattaccggccctactcccagccatctcatagcctaaaatgttgattttatgatttgtctatttctttctggagagatcttaagggatcaacacaagtgaagtggaataaaggcagggagtcgggggtggggggtggttgaggcaacagtggggctcaactaattcatggcctccatttattgagaccacaagcccttgtaaaagagaccaagtcttttaacgtcacgggccatgtttggcacagaaatggtgtctctaaatgttcaacattaacaaaacaaatagaaaaaaaaagaacaaaacccggaagtttctaaaaataaaaaaagcctgctagtcactgaaattccagcagatggcagccatctccgttcaccaataccatgattggaagctacaggagcaaattttctgcaattgacacaggaaaggaggaaatcaggtaggcagaggacaaaagtagttttctatccacctttttagagagatata

SEQ ID NO: 1244172 - DNA, 4001 bp, Homo sapiens
aagtagctgggaacacaggcacatgccaccatgcccagctaatttttttggttttcttgtcagtgtgttgcccaggttgatctcaaactcctgggctcaagcagtcctcccacagcagcctcccaaagtgctgggattacaggcattactttgactcttttgaaccttactagtgccattgctttaaatttttttatttatttgtattcttttagttatgcctcaggatctaactttttttttaaactacctcttcagaataccaagatcagctcttcttttgccaaaagtactataaagagataccacagtgccatttcttctctcttcaatggctctcaatctttttctgcctccacgctgttcctgtatgcaacgcgttcctgttaataacatctctaatgacactgtaatggttcccaaaaaccaaggaagaggcataccttcctcttactctgcctctcgctgccctgagaatcactaaaataatttacgcccccaatacagacagagactacaatgaatattaatacaagaagtctgccagagaactacctgctggcttcttaaaattactgaatgcaaaccaggtatgaagaccctagtcattgccaggaagcataggaggatcctacttttaatgcccatcgcttttaatgcccagagccaccctgcaagagctcaggggagtcagggaacttgatctcctcaggtcacacctaggaaacaactaggtctagcggataaagaactcaagcccctggactttcggattctagtttggctctaggtgaccctggccttgcctctccgaacaatctccacatctgcaaaatgaaaatgttaaaactgccccctccctgcttccatcttccaagattacctgcggaataacaactatgtcactaaagctgagcgtcttggataaatcatgagaaaaagatccttctctccaatgcatacacccacatagcagaaggaaaacagattccataacgagctccctccttttttccctcaagagccaccgaaaaactcaggagagagggtgggatgtagcagcacgtgaccaaggcaacgccaaagtttagcccgcggtgacacaccaatgaaagagcggggctttgcttgcatctggcgctgggcagcgggcaggggccgcatcgtggcatgctaggaaccaggagacctgggctccaggggtgtgcggtacaggaacgagggcattccacaggagtcactttatccgatggcatggatggtgagcttccgaggagcctgaaaacgcttctggaaaggcggaaagaaaaaaaagcccgctccaaactgcaagatcagggatggctgccaggagcccctcggccggctccatccagctggggacggccgcgcgaggaccccgggcggctgcggagagcgcgcgcaggcgggacaacggtctttatttaggtcggggatgaggactcccaggggcctcgaaataaatactcagggcgtcggcgttgggagccctctgggccagggcctaggcacgacagacctggggcagggattctttgttggcgagaggctttatttctggcgagagaccccacaatggaccaatccagggctgagagcaagagtctgaagactcgggggaaggcaatggtcaagagctggagactagagccagtccctggactccccctcaggaggcatccccttaagccgttctctgggtgcagaccccagactcccctttccttggccaagaatccaaaggacgcgcaaggccgagccccacgcccccttgctccccactttcgggccacgggccttctcgtacttaccggggccccggggctggtcttcctcgcccgcgtcctctcccctcccaaccccctcctcacttcacgtcccctcctccgggggccgcagccatgtccgttactggcaactctaagggggcttgcctcccttccgggcaacagaggcgccggccagagagctaaagttcaggccaccgattggtcaggatttgagaatagggggaattctggcttcttattggctacgcggcgtgctaggctgtagctgcaaccgcccctctgggagcctggcggaattaggtgccgagtgatgcggccgggagagtgaagagccactgtcctttcctgtgcgtaaagctcaggcagtttctagtccagaaaccctgaccagagggcatggctttacctccgattcgttttcctacagaattattctaaaaagatagacggcgcgccccaccttttttccctttctttttaaaataagccctttgcagagctccccgcctctcttaagttcttctaagctccctccttgttgccttgaacaaatgcctagaggctgcccgctccgagaggccttggagggactccctcaggacgaatattgcgtccaaaccaaatctagaaaatctaaggcaatactgcaattcccccctcccgcttccagctcggctgaaatctaaagggaaaaacaagttaaattttttttctaggtaattagataaatcgcctgggagacctctcttgggaaaacaaagcaagcctgtgtcagtatttacttctcttttcccagagatctaagtctggaaggcttgtttaaaaaaaacaaaaacaaaaaaacaaacaaaaacttgtttatataattgggaaagagctgaggttggccttgtgaagtaagagccccttcccacattcatgagtttaattacgtaattaaaatccctttctcagctggacaagaagatggcattttagtacctaatcttgtatgacccagtttagctgttgcctaaaacgccataagaatcatgtcactaacctgcacacaaaaactgatagttcacctttgcaaataggtccaaatctttctgcctgatgttcaaagtccttcataaattgactcagacatacgtttccaggtctaagtccccacaggctaaactattcctgcagccacatagattaaccaccattctttaaacgtgacagagacctttccacctctgctccttcgtcacatggttggttccctacgctttgctttaaaggttctttttttctttttttttttgagacggagtttcgctcttgtcgcctaggctggagggcaatggcttgatctcggctcactgcaaccttcacctcccgggttcaagtgattctcttgccacggcctccggagtagctgggattacaggtgcctgccaccatacccagctaatttttgtatttttagtagagacagggtttgaacatgttggccaggctggtctcaaactcctgagctcaggtgatccacctgcctcggcctgccaaagtgctgtgattacaggcgtgagccaccgcacccagcctgacggttctttcttatcagtaaagccagcatgcaaataaatacttaatcaacctaaaggcccacctcaaatgctacctttcttgacttttattttttcttgtatgtatgtacatatttatttatttttagagcagggtatcactctgtcacccagtctggcaagtgcagtggtgccatcatagctcactgcagcctcgaacacctgggctcaagcaatcctcccacctcagcctcctgagtagctaggactacaggtgcgaaccaccacacccagctaatttttttattttttatagagatggggtcttgctatgttgcccaggttagtctcaaactcctggcctcaagcaatcctcctgcctcagcctcccaaaatgctgggatcgcaagtgtgagccaccactcccagcctctccctgggttttagtcattgactctctctatatataatgctgggcctccttctctgtgtctgcattgccacctttgcaaaagtctgctttatacagcattgctctttttgtaagacctcaaactccctgcgggcagctggcttatcttagcagtttccacagcaccttacttgctgccttgtatccattaacatttgt

SEQ ID NO: 1244173 - DNA, 4001 bp, Homo sapiens
acatgatgactctgcagtctgcgcagctccccgtgaccctggatcacccccagagcctgtctccacccacacaggctgtcccctttccctgaaccctgggtcacctccacatctagtttcctcttcagcagcacagggcaccccaacagagtatcctgtgccccacgggccgggcatacccacagagtctgtctcctccacagcctgtctcctgtaacacacacctgcggcacccacagaagtaggctcctcctccacagcatcggacacccccacagcctgtcccctcccccatacgccaggggtggccccacagactgcttcatgtgtcagagccccaggaatctgcggggactgtcctctcccccacagacctgcagcaccgccacagccgagctctccctccatggctctgggcgctcccacagccccagtccaccccacggtcccaggctcgcccatagtctgttctttttcacaagggcctgagacaaacccatagcctatctcctccccagtctcaggaacccccacagcttctcccctccacaggtgcggggccatttcagaacttgacgccaaagccccaggcacactcgcaggaggcaccctcccagcctgtccctgtccacagaagcctaaggctctctcgtaagctgcccctaagcccagagctgtgggccctgagggggcccgagggatcccccttgcctgttccttcacccagggccctgtaagaccgccgcggcttgtctctacccaggaagctcggccaggaacacccctttcgacaggtccctctcctgcaggcacgggatggagctcgactctacttccttccccacatcccgaggcggccctcatagcctgcaccttcagccacaggtgcagaatgctctcatggcccagagatcccgggcgaccttttctctcgcagccccggggacttctatcttcggtctcctcctccccagacccggtcacccacacagccccggcaagccccaccacctcgggctcccccacagccccgttcacccacacagccccagggtcccttgcagcctcgatggagcctggggtcccaggagctcccaaagcctcattcgccccggcggcgtcggctgtctccgccgcttgtctcgtcccccatggccgctgacggccctgtggcctttctgcactcacacagcgcgtctcccactccgagggcttcgcccggcgccttgctccacggcctcgggacgtccctgcgccccgtctcttcccccacggccgccgaaccccccgccccgacctgctgggccccacgcagcgacccggcatcttagccgcctgctctccccggcgcagcctgggcaaggccccacggcgagtctcccggctcatagctccagggcagttcccttcctccctaccgcggccctgggggatgtcttagcacctcgctccctaagctgctccacacacgcactcacacactccgctccggccttgcagcctttctccctccgagcccctcacccatcccacccccgcccagtctcgggaacccgcccccagtcccaggcccccgtaaagcctagacggcagaaaaggtaactggggggacaaagcaacaaaggctttccgagtcagatctcctctcccccaagtccatgactctatgcggcttcccagaatcccccccagccccggcccgagcccacctggcctagggtgaggcgcggctactgggaggcgggcaacgggggcccccaacaaggccgcgcttccggccgcctgcccagtcgccatagcaacaggcgcagggcggcttgggagcctttgaggccctgaactatttaaggatccaggtgttgcaaggcggtaagttttgcagccagtgtccatgaggtcggggctgggactagattagggtagatctaagcctgggcttgggagtgcagctagcgcagaaagatctgaggaactagagcaaaaagccatgcggatggattgtggtcgtcagaggctcccgtagtctttagcggcgctggcttccgcaggctccgccctctcttgcccacccggaaacagcctcgccccgcctacgcgggacccaaccgcggcgaccggacgtgcactcctccagtagcggctgcacgtcgtgccaatggcccgctatgaggaggtgagcgtgtccggcttcgaggagttccaccgggccgtggaacagcacaatggcaagaccattttcgcctactttacgggttctaaggacgccggggggaaaagctggtgccccgactgcgtgcagggtgaggccgggattcgggggctgctgtccaatggaaatggcaggaaggtcgagcctacggccagaaggggggcttagcggaggcagagtcttggttccagacatccgcggagcaatctgagctgtccccaagtctccttctattaaatcctaccccgccctgccaagagcgctcttccttttaccaccttacccggatgatcttggaatctagttccttaaaacttctcactcccccagtaccattagtgtcttacaggatacgtgagttggtcagcaaatacatgtgctttccattgttacgggcgcggtggtgcaggggcaaatcgggactgggatttggtccttacccttaacgtggctctaagaccagaagggaacacctgacttgtgttgacctcttcagttagctgcaggttaaagtctgagtgcttaccaagactgggggaagggggaaagaacacagtttatacgtgcctgattgtagagttgacgtgcgattattttatctcaactttttttaaagctgaaccagtcgtacgagaggggctgaagcacattagtgaaggatgtgtgttcatctactgccaagtaggagaaaagccttagtaagtggcaatgtataatctacctcgcagacgtgcacaaattgcatacttaggcgggaagggcctcagggacttacttacccagtttgtcttacaaggtaatgtctgacaagttaaacaattagaagctattaaatacaaatttaaaatgcccacctgaattaagtaagggtaattcaacgaatttggtctggtgtaagcccagaacttagctggctttacttttatatcttagtcacactttgaaactttgcacagggtaattagtagattaagccatagtccgcaaggttttttaagtgtttgcaagaacagtgattactaaaaaattaaatgtaggactatgtcaaatattaagcaaactgtaataaaccaagtaaatttttttcatgatcactttttcttttcgaatagttggaaagatccaaataatgacttcagaaaaaacttgaaagtaacagcagtgcctacactacttaagtatggaacagtaagtatctttaaatatgctgggcctgtaattcactgtcagaactcttttaacttgctgtggatccagatttgaaaagatcttgacatttcatctcaattccattgttgttcagagtgctgctgaaagtccattcctatggccaatcccaataaactgataatgtaaatatctagctattaggtctttttcatgttaagtcactcttaaaaaaccagaaagtaggttgactcataattccttaaaacatttgcatcaacagttgttttctgtttaattcataattctggttaaaaagtaagggcatctcttctagttcagtcatgcccctgggatcctaaattaaagagttgaggggaagaagagggcactgggcttgctgtctcctgttttagtctgtggagcttcctggtatttggggtttaagtctcttgagccaagtatgttagtgattcatcttacagcaaatatattgattctttcataaaacttgttataactagatgatagtttctgaattgcgtaatttctgtgttcaaagatgagtgtcattcaaggcagaactcattccactcctaataacgttttatagaagtagtgaaga

SEQ ID NO: 1244174 - DNA, 4001 bp, Homo sapiens
ggagctaaatgatggtcaacagctacgaagtgcctgtgctctagaaatggccaatttgatcatgtcacgggataaagtttcaaaatcaataaaaccgtgatgaaatgatcaggaataaacctgtccagaactgttcaagacctaaaggagatgcacgggctgaagaacaaggagcaaatctgaacgagggagaggtgtgtcttcctggacagttctcgggagaggaggagggcggtaaggacggggagaagaggccgcaggcttggagtccaggaggagaatgaactcctttggtcaggaggggcccactgaccaaaggtcctaggaagaaaagccaaaggaggtgaggtggggcaagggtgtttgcaaaggatagaaaagtctagaatggcagagtatggtgcttaagagtactatgtgacctaggccaagcgacttcactctgggtgcctcagtttgctctttaggatggggatgataacaacagcagcacccatctacagagatgccagtgcttgtcaccacgagaagcacctgaaatgcttggggaagaggggtggtacttactgtgtgtgtctccagatgactgagctagaccacccagaacacattacagggaggcagaagctgacaggagggcaggaagcactgtctccagggctgtcttgaaatcactgggctgactttgtaggtagtgagacgcccatcactggaggcatccgaaccaagcccagataaaacaaacatcagaaacatttttaactccgtttctctgagttctagcctctaaaaataccctccatgacacgctgtgtgctgccagaggcttggttttcgccctcttctccccaactcttagccacgtcccagtggtggcggggggacgggggtcccaagccactgcactgggttttggtttcactatgttgcccaggctggagtgcagtggtgcgatctcagcttactgcaacctccaccttccgggttcaagcaattctcctgtctcagccttcccaagtagctgggactacaggcgcacgccaccacacccagctaatttttgtatttttagtagagacggggattcaccatattggtcagactggttacaaactcctgacctcaggtgatccactcgcctcggcctcccaaagtgctgggattccaggcatgagccaccatgcccagcctgcactgggttttggactggctgtgttagcatcacctggggcaggggtgggtcacgttagaatgagtcctggctaggcccacagcaggcttttccacccgaatactggggccacagctcatgaatctgtgtgtatccatatcctgggctgggtcagctctccagggtggagatggttgggcaggcagcctctgggggcaagctcgggctcaggcctccccttgaccagcttcacagagacagacactgaggcagactgacctccaaactcccagctgagacgccagctccccacgtggggggcttacagctgatgcaaccggtggctcactaaacatacctcgacagcgtccattaccgcttccctgcaaacctcaagatcctaagcacccagcctaggtcaggggtccccaatcccagcaggtgttcctgcttcctgaagaccccccagcccaactcctccaacaaccatattcatctccaacccagtcccaccagcttccctcactctccttcccatcacactgcctgtggggagccccgtggtgcagggactttgccgctggccttgcgaacccacggcttggagcccctccttggcccactctccggggccctcttgggagcctcgctaaacagctgggcatggaaagaaccccaccctcaccacagatgggaacagacacagagagcctcagccccgcagtggtctcaggggcccactgaccaaaggtggccggaatcgcttccccgcctccacctgcagcccggcctctgccctggctggctactcatagcaggctgttgccatgggaacagcagagctgttgagctgtgacatcatggcaggggtgaggtcagggacagctgtgagccagccagggggcaagcgtgtaggttaggggatcaatcataaagatttggctcaagcagccgggagccatgggggcacctgaaggcactgtttaaggaggtgtgggtgaacaaggacagtgcaatgtacaaatgctcgtggccataccaggcagaggacatctttttgtccccagctggctgcatggagacctcccagggtgtcattctctctgagctgtcaggccattaaggaggtacacttcaaggtcagggttcctgacaacgcctgccatcccttctcctgtagggacagcatctgttcacgcttctaaacagctccagaaagccatcgttaaactgaaacccactggaggcgggggaagaaagaatcccgtcaaccacctgcccacacaggaggagaagccacacgtacttggcctcgtttgagggctagttccccacagacagtttgatcagaaggatgggcgagggaagctggcagggcgaggctggggatgaacatgggacactgggggagtctggccggtgcagggggtttccaggaagcaggagtagctgctggaaatgggggcccctgacctagtctgggtggttggcatcttaaggtctgtggtaaagtgatgactggcattgtcaagatatgttttttgtttgttttttagacagtcttgctctgttgcccaggctggagtacggtggcgcaatctcggctcactgcaacctctgcctcccgggttcagggattctagtgcctcagctttctgagtagctgggactacaggtgcatgccaccatgcccagctaatttatgtgtgtgtgtgtgtgttttagcagagacggggttttaccatgttggctaggcgggtcttgaactcctgacctcaagcgattcccctgcctcgacctcccaaagtgctaggattataggcacgagccaccgcccccagcccaagatatgttttagtaagccgccagttggatcatctgtaagcaactcactagaagcttccagcatcctccacaaatttgacaactgagaaatgtggctgggaaatcatgatttgggtccgaagaagtgaaagcaacaatcctcaggttgttgtttcttgagagaagaaggtaaacagcaggaattcggctgaggtgtccaaatctcggggaggatgaattctcaggagagctgaacctgagacaaagccctttgtcctgggctggaaggaccctggaaaggttatctggtccctgactcagggaagggaggcattctccctgcaggaatgttctcgatcacagtccaccaccacccccctacccccgcccacttttggagtccatcttcgcagcccttgatgattcattttatgtcagcttgacgggctaagggatgctcagatagctgggaaaacgtgatttctgggtggctctgggaagagactggcatctgaaccgggggactgagtaagaagatccctcctcgccaggtggggcaccatcactcaatctgttgaaagcccggacagaacaaagagacagaggcagaggcaggcaaaccctccctctgcaagagctgggacatccaggctgggcgcggtggctcacgcctgtaatcccagcactttgggaggccgaggcaggtggatcacctgagctcaagagtttgagaccaggccaacatggtgaaaccccatctctactaaaaatacaaaaatgacccgggcgtggtggcgcacacctacagtcccagctactcaggaggctaaggcaggagaatcgcttgaaccagggaagtgaaggttgcagtgagccgaaatcgcaccactgaactccaacctgagcaacaaagtgagactccatctcaaaaaaaaaaagagagagagctgggacatccaccttctttctgccttggacctcagagctcctgggcctcaggcctttg

SEQ ID NO: 1244175 - DNA, 4001 bp, Homo sapiens
ctggccaacacggtgaaaccccatcccgactaaaaatacaaaaaattagccgggtgtggtggcgggtgcctgtaatgccagctactccggaggctgaggcaggagaatcgcttgaatcttggaggcggaggttgcagggagctgaggtggtaccattgcactccagcctgggcaacgagggaaattctgtctcagaaaaaaaaaaaaaaaaaaaaatccaaacatgggctgggcacagtggctcatgcctgtaattctagggctttgggaagctgaggtaggagaatagcttgaggtcaggagttcaagaccagcctgggcaacatagggagaacttgtctctacttccaaaaaaaaaaaaaaattgtaaatgtggtatttataacgtaattgcttatgtaaaaagattatgttttatacaatactctgataattgtttagatttgttttgtggccaggtagaaaaacaatttataaatttataaaatatgctacatggatactttttttaacttctattttatttttttgcaacagtatacatgtatacttttttaaaaaggtataaatggaattcggttagataatataaagaccaacatcttaaaataactctctagaggtagggaaattcaataatgaaatgggcagagaatgactggatacctttgtacttgaagcatgggatgcagtgactggggaagaaatagaatagggagaagattggagaaagcaatataacattgagatgttctcctctaaactaggcttaacttctctgagcctcagttttccaacctgtacattgtaaataatattagtatctaccccatatatttgtgaagattaaatgagttcattcaaacccggtaagtgctcaatagatattagtatcactgttagaattatatgacatatggcattttcccatgacgatggaggaaccagtgtcttcagtaaaatcccttaagttctgtggcacagaccaggcttaatcttttccatgtcacttcagttccctaaaaggtcaaagctaaggggagatgcatcctaggagcagtaacaaaggcctggtcttctgtcatataaatgttctttcacttgttccttcattcaatcaaacatttggccaggcgcagtggctcacatctgtaatcccagcactttgggaggccgaagcggcggatcgcctgagtcagaagttcgagaccagcccggccaaccctgtctctactaaaaatacaaaaattagctgaatgtggtggtgggcgcctttaatcccagctactcggaaggctgaggtaggagaatcgcttgaacccgggaggcggaggttgcagtgagccaagatcgcgccattgcactccagcctgggagacagagagagagagactccatctccaaaaaaaaaaaaaaaaaaaaaaaaaaaaattttactgcgtgccagagccaccggcacgtgcagctctgcaatcagttcagtagatgggtggaggggggcttacatactcctcactgacatgcagggagtcccaggcctttagttgtagcgtgcagaagagcccaattcttcctcactcgcgagcaggaggacctttcacggggccgacgtacagagggccaggccccggtggcagatgtgcaggcccagtctaggtccagcatagatgagcggaggggtcctgaccacccgtacgggtgtgtaaggaagcgctccgcttcccgcccagtttaaaggggtccatgcagacagagcctgccggggcggcagcaaagctcgttctccgcgccgcaccttgacgtccagcacaaaagaggcctggcacaggcctcccgcccggagcagctgggtctgcgcgtccgagacctgagagcaggcgttcgcgcggtcggttccgccgtgggccaggacttacctttcgtcggttctccgccgctggcgtcgctgcttgctcacgggtcccacagccacaccacagacagcagtacccacaccgggagagagcgccccacaccctcccctacccgcgccaacctccacccggcgccttgcgttcaaattagccgggcgggccggaccgtgcttcctattggtcagcgtccgtatcgctgattggctgtttcctaagtaacaaagtgttgcgagagccgttcacagtgggcttgctcacttcctcttcctgtcggctgcagtttcccaggcggtgtctccggggttgggcacacgagagtagcgggcagaagccaacgcagggttgggatacgtggggccacagccagtctctgtggtccccgggtctaggcttagcaccagttacagcaaccagacatccaacaggtgtttaaacctgttttttctgtaggctaaattcacatccgtttgtcaagaggggattgtcaacctctgtccagcgtctctttccgctgcaggaccatcccaagatgaacttaaaggacagccttgatgtggcaaagccggcggacgccaagaatggcaattccatccgcttggctttgacagtgtcagaagcatgatgcctgacgattgcgcatgagggtcggccccttgcggcagcggtggggtgcactgcctccatagtacaccgctgcccgctgcttggattctggtgggcccacctcatgctgatttccaacacctgaggttgtgggagttgaagagtttccagttgtggctcagtcactaactagtgctgagactgcgaggcacttcagctctctgagtgtcagtttcctcatctataaaatggggccgatatcctgcccttcctactcacctaggagagcgtaggtatgaaagccttccaacgtccccagcatatgtaagggataacctttatacatttaattagaaccaaataggtgaaggctgcaaagagccaggtgctcattacttttaggaaatcttcagtacatctgttcccacactgggactatgagcaggtttgcggcatgtaagagaagggtgaggcaaaactccctcatcagacttgccatcaggataagggttactatttaatacctagttgacttggcccaaactcattcacctccctggaccccaactgacccctatacaatagaatagcattgctggtttggtgaggttaaaaccagaaaattatgtggaggtgctggtcattgtaaaactacaagaaatttggagtactcttgccatctccacaactcatgataaataaaaacaaaaaatgaaggatggcttacagcataagggtctcttcctcccttactgggatgtgtattttaacagaggttttggctccccaagagccatcaggggagcctcttgtgtcctataagccaggtcttgccctggtcctcttctggtccacacaattaactggaggttaggtgagccaggacaaggcaaggggcagagtccagccctgctgcaggcaggggacaggggacacttacttgctggataatcttgggtaagtcaccaagtctctcagagcctcagtttttggagttataaaacagggaatgaaagaatacttagcttgttacaaagattagaaaaaaagtaggtaaagccccttgctgacattcaataaaatggtaatgggtgttctcatattcatttatttaacaactacttactaatatgagacaggtgggctcagagaataggctgctcagtaatcaacaccctcctcctagcctcgtggagcttgcagcctatgggagaaattagacaattaagtaggaacaatgatgtgagacatagactataatgagaacatgcagggggaagcagggctggggagtggcatgctagctgagggctgtagggagattgggagcttgcctggcaggtgaggctgttccttggatctcagaagacaagggaagacaatctcacaggtgagagggtcaaccttggcgaatagtgctgagaggtcttggtagggcctgaccaggcccaccttagtgaacacaaatggaaattttccgggccc

SEQ ID NO: 1244176 - DNA, 4001 bp, Homo sapiens
ggagagccccaggggagagagctgtctgctcctccagcctgcctcagcctcacgcccaaataaaacactcgcagctcccctgggcttgaacttggggccctggcactggagcagcctctctgtgtttccgcgaatgacgtgctgcagaggaaggtgcaggcacggctctgggatgaggcctggtaggtgggatggagcagggaatgtcccccatcatcccaacagcctgtgaccacattcctacaccgaggagagtgtcacctagagcgcccacccccatctgcctgtcctccagccagtgtgaaatgggtctcatcctgtgcgtggatctccctaaagaacagggtggagtggggagcacgtcttgtgctgatcaaagggcaacagctgctgggtgtggggatagaatgaacggccctctggccgagtgaagactccttcaggcctggcgtggtggctcacgcctgtaatcccagcactttaggaggccgaggtgggcggatcctgaggtcaggagttcgagaccagcctggccaacacggcgaaacaccgtctctactaaaaatacaaaaattagctgggcgtggtggtgcatgcctgttatcccagctactcgggaggctgaagcaggagaatcgcttgaacttgaggggcagtgagctgagatcgcaccacttcactccagcctgggtgagaaagtgaaactccgtctcaaaaaagaaaaacaaaacaaaacaaaacaaaaggcactttcagagggaactacactacctgacgggtcacctttagtggcatcttcagccaaattccactggcgggaggggaggacccttcatccctgctccccggggcacacaatacatgccaaggccagtgattttcaaagagacacattctaaaaagccagagaggatgtcctagagcccagggcttgcttgggggctggagctgaggctcctttcagagaagcaagcccacccttgagaggtaggggactctgggagcaacattatcctccagttaccttactgcccaccttctggtgatgagggcccttccccagacctcaaaaattaggggatgaggaaggggcttgctgagagagacacccacccacccacagcctagtggtggcctcgaggtcactgagtcatctcccttgttgctctggcccaggcaccactgatgatcaggaattccaccttcccctccacagcccccactctcacctccccatctgtcccaggccccagggctctgtggggccatggtagctgcatctagcacttctctgaactacttcgaatccggacttgggcagcatccgtgttgcagcccaagaaccaggcactccgggccccatcctgacaccaggggcccttgtcttcctactggtgacccccacatccctttaaactcctgacctcaccagggctggagcagcctctgattaactgggaaaccgccaccctccttctgggggcagttaggtcaagccctccctgcccctggcgtttctggatgagagagccgagattcatctgcgcacgctttgggggcgggatctcccaatgggagggtggaaaggtgggggtggggttgaagttggggtaattttcaggctcaggaaagtctaaaaaggccatggtcccttcttgacacccatcctgcaggacttggggaaagttgctctgaagagtcccggccctggtcgttgcctgtcctctcagtggggtggcggcgaggggacaggactctgtcgctggaggccgactgaagtagaccacggagcggggtggggaggagggtctaaaagggtctcaccatgagttgctggtccttggagtccccgctgtccttcatgattgcagcaggtggaggggctcaggccgcgccaccgggcatggctcagccgcacccccaccgcctccgggtcgcgtccgccagctgctagctgcccgccgcctcgcgcgctgcctgacaacccgaaaccaacaacgcgccagcggctaaggacgccgacccgaggcggggcagggggagggcccggacggcgccgccccgcccccggcgcccgcccctccccgcgctgagggtgagagttggccgcctccgccgaggaggcccccgagcctgaaccgctgcgcgacgatgtgtgcccggctgtgcggccctgcggccctcggtgcgtccgtgcgtccgcctggcgcctccgtgtcagttcgctaactcctgcgcgcccacccgcgcccctctgctcgcggcgcgaccccgtgccactgccctttagggagcgccccagcagccacgctgccccttgaagcacacgcatctgccgctgtctctggggtctccagggcggcggctggcagcctcgggtttccgtgggcgccgcgtgcatcgcagcaggtgcctgtgctgtgagtgtctgcacccactgcccactggcatgggtggcaaaaagttgtccctttgctcaggccgcccagcacctctgttacctggggtgtgctacagaagagcctgactcagtgcgacccactagcaaacaagtctctacccctgaacccagaatctaggtcacgatggctgggtccgtgtgccctgctggctccccgcctgctgctggaagagccacaatactgtgcaagaaagtctaggtctgacgctaccgcctccattcttggcgacaataacaacggttgcactcccagggaacacaggggaaaggttcctgtcctcaggaggccctgggaaaacttggattctggtcccagttccgcctccaactcggccagccacctggagctggtttttcctgcctccctggggcctcagtttcctgggggatgttggagcctctcccaattctgatgtccatcctctgtgtcctctgcccccaccgaagctgagcccggcagccccaagactgggagaggaagccacgatgggtttcactttccagggaaggggctgggaaaggaagcactcatgtccccagggctgcctcagactgcctggggtccctcagaggcagagtgtgatgccagcctgtgccctgggactggcttccccggctgcccctgaggagcctgtgttgggaatcgttattaataaacagcagcaagaagcagccgtcagccttgggtttaataaatagataaaccaagtaaaacttggtggaaaccaaactctcctgcccgggatcccaggttttgtcctgttccttggcctaggctgtaggctggacagtttgcaaatgggcatactgtgacaagaatcgggtcgggttttttgtttttgtttctgtttttttatgacagagtttcactctgtcacccaggccggagtgcagaagcacaatggcacgatcatggatggctcactgcagcctcaatccctcaggctcaagtgatcctcctgcctcagcctcacaagtagttgagactacaggtgcgcaccaccacgcctggctaacattttgtattttgtagagacagggatctcactgtgctgtccaggctggttttgaactcctggactcaagcaatcctcccacctcagcctctcgaaagagaatcgggtaagttttaggggtgtgttgtgcttgcattttaggctcctgaaaagaacctatttggatcaatcaaacaggcccctggtcaactgggctgtcactatttttctttttcttttctgttcctccacatgcatcagtcccacccagaatgccccatagttatttttgtttttgtggggtgttttttgtttttgtttttgtatttttgagacaaggtctttctctctttctctttttttttcttctgcctccccacccctcaagacagggtctcactctgtggcccaggctagagtgcagtggtgccatcacagctcactgtagcctcaacctcctgggctcaagcgattctcctaactcagccttgggagtagctgggacaacaggcgcatgccatcacgcctggctcattttttttttt

SEQ ID NO: 1244177 - DNA, 4001 bp, Homo sapiens
ggggggctgtatcagttctggctgccaccggccctcgtagggggagccccatcctactcctggggcctggccacaccagctggggctctgggagataccctgattgcgggggaagagttgttagaaggcacctgtggttccagagacccgtctggggttcccaggttggagggccaaggttacggggggaatagcaggaaaagtacggacagctgcccctctagagtggctgaatgcaatgtgaatccaagggcagggacggtgatatttttattccttgtcactcgcaaatgtactgaacgttcagatagaggacagagagagaaagaggctggacagagggcaattcagagagaggggcacatgggcagagacgtgaggggggtgggaagagagagaggaggggcagagagtcacagacaccaagaaaattagagaaataagacaaaaggcaagcctgaggtcatgctatgaaggaaagaatgggagaggaaaggaggaagagacacagcacagcaaacacacggtgttaaagagacagggtggggaactccggcgccaaagcacaaactgggagcccagaagagagaccagagaggaaactgcaaatgcaaaacctgtcctcaaattcccccacagtgtcggcaagggagaatctagtttccacctgaggcccacaacctccatgcaccaggccagtagtgcagatgggcaaagtccaaggactgtaggtagggcccaggactgggatccacagggccagctgtgtgggctctaagccccttgcccagcccccagcacttcctcctcaggatccgggacaatgagcaggggagggtggggtcatcctgtagccatcagaccaaccctcagggctccacccttggggcgcccagaaatacctgtgtttgagggtagagggtccctggggcctccctaaaagggagaaagaaaaggaagccggctggctggtgccagccccaacctggggctagtgctatggcgtccactgccctggggaaggtgccaggctggagcccaggaatgtgggtgatcgggtgcccacaccctgggaggagaggctgagcagcccacgcccacggacaacagggaggaggaccacgaaggataagggatgcggagccccctcctgtggccccagtggaccccaaactcctgtcacgctgggcctcccctcaccagtcttcctgggcagagcatgggagggtgaggggctggtctgtcccaggacaggaagggagtagctggaatcacagaagctggctcaggaagaacagccctgaccccctagaccctgaccaggggagggaaggacactggtggggacaagcgatggtgacgccgttgctgcagctaatgggacagggatggggtggcacggctgggggccagcggggtaagggaatagaggtagggacaggggtcggccggtgcagctgtgaaggagccgtggggtacaaggaggatactgggcggctggggtggggccgaccggcccgaaagggggtcttgggccacctgcaccttgcccacccggcggttctcacacaggtccccgcccggcctctcagggcggccatgcggacccgtcctcctgtccagccagccggcggccgcccgggcctggcacctctctgcgcctccgcggaacaaacagcacatgatcccgactcttgagcctagatcgcgccgccggaccccggctccccgccccccaacccggcacattcctccgcgggcgtcccttccctcccccttccccagccctcacctcggcgcggcggggctcccggagcagctcggcggagagggacaagctttccgggaagcgtgaggcggaagcgggaaggatctggggccggttcggagctgcccccgcccctcgccgggtgcccgggcggcgggcggcggactcgcgccccgggggcggcagcagtagcggcgccagcggccggcgcccgcccgggcagcgcgagctggggcgggagcgaggggcgggggacgcgcgagcgcgcgcggaggggcgggtacgcgcggtcccgggaaggagccgggagcgacccgggctactcttgttaaaggggcaacgctcctggcctgtggggcccagcgagcgggaacgtggggaccgagctgcggacgcagaagggcgagcagacgccgcaacccaggagggttgcagacgcctgaagaacagggaaacgtcgggggctgacccgcgggggcacccaggccccggcccagttcccgtcgccgccgttggaggcgcgtccagggggcggagcctcctgccgaggcccgcccagaaggtggctccgctcaggccccgccctcagacgagcaccgcccgccggctcctcccgcggctcgaatcgccgtctctctcctccccgccccgccgagttctagaattcgccgcgcagctgcttcaggtgctggggccaaatgcggccggccgtggcgcggctactcgggcgctctgtccccgcctggccctcaagttcggccgccctggacgccgcctgaggcccaaacaaccccttcaggcccgggtgccgcctaaggccggagctgccctctcagacccggggcgtccctcaggccccagcctgcccttcagcctgggcccaccacctcagggcccctctcgagggaagcagcccccagtcgtgccctcgggcggggctgcccggaaggtccggccacgcccggtccacctgtcgagggtccccgtcgccctttcaggcgcaggccgcgccctccggcccggcgcttccctccagcggggctccaggcagcccctcagccccagccggaccctcgggtcctcatccaccctcgcaggcgcaggccgtggctaccccgaagtcaactgtggaggatccttcctggcttccttcagctccatcctgcccttggatctaggtcacccgcttggacccaactatctgaggcccgaatgccccgcagctcccgctgctccctcgcgttctgctgacccccctccgagtcaggacatcccctttagaccccactttaggccctttcagcccaactccaactagccccatctgccgcttccgcacggtatacttctctccgcttttgacctcacctgctttcccagcccatccctagttcccttggataaatactagttcacctctacagttccagctggctgcttctgtccttcgggagcctatgtgcactctctcctaacttatctagtattctttttttttttttttttttttttttgagacggagtcttgctctgttgcccaggctgacctcggctcacggcaacctccgcctcctgggttcaagcgattctcctgcctcagcctcccgaatagctgggattacagatgcctgccaccacacccggctaatttttgtatttttagtagagactgggtttcgctgtgttggccaggctggtctcgaactcctgacctcaagtgatccgcccacctcagcctcccaaagtgctgggattacagtcttgagccaccgcgcctggcttttttttttttcttcttagaaacagggtctcactctgacgcctaggctggagtgcagtgcagtggtgcgatcttacctcactgcagccttgacctcccgggctcagatgacactcccacctcagccttccgggtacaagcgcacaccaccacacctggctaaactttttcgtattttggtaaagagggggtttcgccatgttgcccaggctggtctcaaactcctgggctcgagcaatccacccacttccgcctcccaaattgctgggattacaggcgtgagccagtgtgcccagccttaactgccctttctccccaccccaactggccttcaggtcatctttggctgtccctatatgcaactgacctccctatccacaggcattcccaactgccccctccttccctgtcaccagttgaccattatgtccacacttaactttttttaatttc

SEQ ID NO: 1244178 - DNA, 4001 bp, Homo sapiens
tcccttccctgaaattgtggtatccttccctaacagagtgggtaatgtttcaacctcttcaatctctttctgctcctcactctgtacataaggtattttaataaattcatccctctgaagggacatttctgaatttccgatgtgactttttaacatccttggtgcctcatgtccaatcggatagtggccacgatggtagggccttacatctacatttaatttttttactctgtttgcatatcttaaagtgttgagagtgttttcacaagaggtcatccccggagagatggtagcaatcatgcaagtggaggagttctggcctataaaggagtcccggagcaccagtgtgagtttgctggctctgaatggggtgtgaggcttgttctgacccaaagccagaatacattctttgagggctagaagactcttgttaatctctgccccttccagctgccttttccggctggccttggttgtatctgctcctctttcattcccagctaaatcaacgagggaaaacttgccatgcattatccgtcctgacttcaggatgatctggaacactgcatggctcctggatgagtgagcgttgacaggtgtttgcctggaagtccgacagctattccctatttccaccaggttcagcacttcctccacacaacacacctctttctcctgcagcccgaccacttggatttgctgattgccatcctcaaggacttgcagcttcttcttccagttcaacaaatcatacaccttgcccccataaatctcaaaaaatgtcccatagactttgaggtccagcttctcatatgtggagtttctgagcaggagaaagacatcctgtgccaccagagcataaatgcccttagaacaatcttgggccgttcctgaaaagtctccacccatggtgtacgtcttcccacttcccgtctgcccataggcaaagcaggtggccatgcccttgcggaagatggactccaccagtggctgggcggtgaactggtacaccaactcgttggaggctttgtcatcgaaggcatggtcgaagcagaaggtctggttctgcaggtagcgagtgaggtccaccttttgcttggactcatgcaccataaccacattgtccgaggggacggtgatgatatccaggtcctttaaggttgtctctcgctggttgagaggccgcttcctcacgcagacgcagatgcgatgttcttgcgggggctccaggactgagatcttgctgctgtccaggtgcctgcgatactcttcgatcatgtgcatgatttcgtagttggggtttctggtattgacatcgagggcgcgtctagctcggatctcctgctgcagccgcctgcgcttttcccgctgctcctgcagtttctggatttcccagaggcagggagactttttctgcttcatcagacaaggtttgctggggaccctcacatccaggctgtcccctgaggctgtttggtttttctgggggatcatcgcaacccatttcgtggcggtacgctggtccctgatggccgaagagggcgccagagccaagggggataagggcgggggcggcatggggtgttcagcagagtccagagctggattcagcaggagtatggtctccaggtcaatcttcttgccttttttgactgctttctccacccactctaccgtgacccaatagttttctctgttgatctccgtgaccacagcgaggtggatccgcttgtcactgcgctggatcgccacgtagatgccctcttggatgtctccgaaatgtggcttcaagggtttcaggggcgagagacatggggattcagggaggcagaactggctggccatggtgagtgatggaggtatcagggagcgctccagggcccttggggttggagcagcaggacccaagccagcctgaagcgcccggagcactgagcagggttgcagtctgtgcctgcctttgtgagcctagcgcgccggggcccggactggggccactacgtcacaaagggatgagatgaggcggcagaacctagggcttaggagtgaatggtacgggagcacaaagggatggagagattgttctctgccagtgagggtgaaggggttggaggaggatgtggcgtgctctccggatcatggcgagaaagaacaggtaacagagaagcaacgggaaccatggcgttgaaatttaatttatatgtcccgtgtacatttatgcctaagcataaaaggaggccttggctggcagtctcaaagctcagtgctttaatttgagaattgctatgaagtttccttaaactttaactctccagtgatcagtgggaatagatgaaggtagagctatttgcaaatctcaggactcgatattcaacaggatcccagaaaggctcctcaaacccgccatctttgttttttcacctccttcaaaacgtgtaacttgtttaagagtcacaacttaaagttattacagtttaatcggctttctcattacaaaatcaaaatgagtagaatgtagcaggtcgttgtggtaatttgctaatatgaaactacctttcgtacagcacctgggtttgcaaacacaacatgtgtatcacattccaagtggctctgacagctataaagtgagttttgttgtgctgtggtcaccaccatttttgagattagttcagtaattacctttccaaactccttcagtaattacacttctggcctcattatccataattgggagagaaagaaaaggcattgtgtggaaagagataattaatcttatactccccccacccctgcagtacttgtgtgtgtcctttagaagttgttaagcaaggctggaaggcagctaagaccatcggatgcaaaaatatattttgccaagattgcaatattttcatgcataagaattagcttataaaataaatgacattgacttttagacaggccaagctcagagtaagggtgatgccttacgttcagctcactagcaacacccgtgcatgttgtcttttggactgttgaattttatcataattatagctccaaagtaacatgaagtagcaagttacaaccttccctaggaataagggcctctatagaaataaattctactataaactaacttttctgttcagtcagtctagtaaagcttagattttgaaaagaaggtggaaggaggatactggataaattagataagtaagcagtgctcatttcaagaggaggttgtatgcaggtggagggagaggagaaagggctttaggcaattgtcttctaaaaaatatcatgttttatttccccaaattatcaatacttaaagttgtgctttaaatcagttgttctttcttggtttcaaggccatgatgtagatattcttaatacactgtatttgtcattagcactctgtcattcaagttggagtacagtggcctgatcatagctcactgccacctcatactcctaggttaaagccatcctaccatctcagcttcctgagtagctggaattacaggcatgtgtcaggatgctttgctattttctttctttgtttctttcttttttttttttttcttttttttttttttgctagggatgaggtctcgctgtgttgcacagagactggtctcaaactcctgacctcaagggagtctcccttctcaccctcccaaagtgatagaaatataggcttgagccactgagcccacataatagtttgttttgctttgtttttttaaccgttacctttgaaaaagctgggtctctctcaaaattatgaaaactctagaccctccaggctagccatagggttttcatcttagctagtaatgttttagacagacaatggatgagcagatccatgataatagtgccaaaatcagagagaaaagtttccttttactccctctttctctccaacatgttcatacaggttttcatagcaatttcaggactttttttcagttcttttctcttttatatagtttccctagtatattgcatttgtt

SEQ ID NO: 1244179 - DNA, 4001 bp, Homo sapiens
gcagtgagctgagattgtgccactgcactccagcctgggtgacagagcaagactccatctcaaaaaaataaaaataaaaaataaattgtggactctgctctgtggtctacctgaatgagaagttttagcaacaggtaggacacattgatcatatcttcattggaattgattactcaaacattttcagctcatgaacaaaatagcccttctacctcctgggttacaatggttttagcccaaactccctttttcttctgatatttcctgggtatttccccctcatctcccttcccatccccttaatccttgttaatttatcaccctgtttgaaatggtctctattgggataggggtacaggggggtccctgaagtggcattgtcatctgaaatccagtagggatgtccaaccttcccaaaggttggtttgggtgagaatcaaagattaaagcacctggcccaccaatagttggttgaaatccagttgaaaaatcagaccttaaaggctgggtgcagtggctcatgcctgtaatcccagcactttgggagaccaaggtgggtggatcacgaagtcaggtgttcgagaccagactgaccaacatggtgaaaccccgtctctactaaaaacacaaaaattagctgggcatggtggcgggagcctgtaattccagctactcgggaggctgagacagaagaatcgcttgagcctgggaggcagcggttgcagtgagccgagatcacgccactgcattccagcctgggggacaaagcgagactccatcttaaaaaaagaaaaattgtatcttgccaggcgcggtggctaatgcctgtaatcctagcactttgggaggtcaagacgggcagatcacctgaggtcaggagtttgagaccagcctgagcgacatggcaaaaccctgtctctactaaaaatacaaaaattagccgggcgtggtgtcaggcgcctgtaatcccagctacttgagaggctgaggtgggagaatggattgaactggggaggcggagtttgcagtgagccgagatggcgccattgcactccagcctgggtaacagaatgagactcatctcaaaaaaaaaagacaaaaatcagatctctcaagagcaaaaggaaaaaaaaaaacaaaacaaacaaaaaaaaaaaagagagaaaaaaggccctgaccctagtcatgcctcttcagaaggcaaaggagccaggcaggagctcctgcctggaccagagttggccaggcacagtggtaatcccagcactttgggagactgaggcaggaggatcgctttgggccaggagttcaagaccagcctgggcaacatagcgagactccctctctacagaacatttcaaaagtagccggacgtagcagcatgtgcctgtagacctagctacttgggaggctggagtaggtggattgtttgagcccagcagttgaaggctgcagtgagctatgattgcatcactacactccagcctgggtgaaagaatgagagcttatctctaaaaaaaaaatttttttttaatttttaaggagcccagagctttgacagtgtccctaaagttaaggtgatggggtgggaaacagaaaatggatcaaagtgtctcaaaatgagcccaattacccctttggctgaatttggcaaccctgttatacctaaagtaggaactgcagctacagaggatgttcttatgggcactgaactcaaagccattgaccttgatgaccacgtcgcagagcttgccctctagtctaagctcgttgaagatctcacaggccatcgcactcatcttcctctccatgtgaggctggtggaaacgtgtggaggccgccgcgctctccatctccatggcaccctgggacagcggagagaggctgctttcctagggtgtcggggagggttgtggggggcccctttagccagctgtcgctccttttccctactacatcttttgtatagggtctatcaggcaacccaagttccagaatcctggccctgcagtgagatcacacaggattgtgctctcaggttctggaactgcctcctggacttgtcctcttccttctcccctccttaccaccccacttaggctgaaaaccacctcacacctccttctgtgtccttgaacccaaaacagaaccatgaccactagcaccatctgagtgtttattgattccagctcctgttactcacctgatacaggtctctatccctggagcattcatctaccttccacagcccaacacttggctccctagacaccgaactcaaggaaatccaagtcaattgaggctgaagggagaagtaaaactgattaaatttctttcttaggccgggcgcagtggctcacacctgtaatcccagcacgaggtggatggatcacaaggtcaagagatcaaggccatcctggccaacatggtgaaacctcgtctctactaaaaatacaaaaattagctgggcgtggtggcacatgcctgtagtcccagctacttgggaggctgaggcaggagaatcgcttcaacccaggagatggaggttgtagtgagccgagatcgctccactgcactccagcctggcgacagagtgagactccatctcaaaaaaaaaatctttctttttctagggacgggtctcgctctctcacccaggctggagtgcagtggtgtgatcataactcactacagcctcgacctcctgggcttaagtgatcctcccacctcagcctcctgaatagctgggattacaagtgctccgcaccgtgcccagccaacgctgattacatttcagaaagctgtcccgggtctcccagcccgctggatgggttagtcactcagtttcttctggaatgaggaatggcctagttaacagagccctttctgggtgattaacagaattcagtttatggctccttcatctctcctcccatccagccgtgtggtttttctgtttttgtttctgagacagggtgtcatctgtcacccagggtggagtgcagtggtatgatctcggcctactggagcctggatctcccgggctcaagtgatcctcgtgcctcagcctcccgagtagctgggactacaacaggtgcgtgtcaccatgcccggctaatttttgtattttttgtagagacagggtttcgtcatattgcccaggctggtctcgaactcttcggctcaagcgatcatcctgcctcggcctcccaaagtcctgggattacaggtatgggccaccgcgcccagccccagtcatgtttttgtcacaaactttcagcctggaaatgaccacgtttggcaaggcttttcctccacaaagagtggcagaaccctacctacccacgtaaccccaacaccttgggaccttcaccctgctcttcataataaatagaaccctcctccagtttgcctagcgcaaccggcaagcccacccggatcgcggccatctccgggaccgctcgattctcggccccacccccgccccgcccccggccccaccaacccccgcccgggctccaggcgggaggcgacgcctgcgcagtgcggtcgcggggctgtcgttgtcccgcgagccgccgaccaggcctcgaacgggatggcagaggaggtgaggagggaggaagcgtccggagtggggcgggcccggactccgacccccggggcgcttcgagccccccagctggtcaccgaggcaccgccgcttcacccaggccagtagccgccccctcgcgcaccccggccccgcctcacacgcgcgcccgagcgagccccgggctcccctcgggcccagcgtggcgcaggggtcagtggttctctcgggtctcgggacaggtgagcaccctgatgaaggccacggtcctgatgcggcagcctgggcgggtgcaggagatcgtgggcgccctccgcaagggcggcggagaccggttacaggtacctctggggcgtgcgggggccggccgggctgggggcggctggagaggcttcctgcccattgggcc

SEQ ID NO: 1244180 - DNA, 4001 bp, Homo sapiens
gtagagacaggggtttcacaatgttggccaggctggtctcgaactcctgacctcaagcatccacccacctcggcctctcaaagtgctgagattacaggcgtgggccaccgcgcctggccgccacatccttttttcagcacagcactattcatcaaatcagactgcatcattcctctgccccaaaccttcccatttcaatcagagtaaaagctcatgtccttccacaggccatcaaggccctacgggatctggatccctgcccattaccatcctggggcttctcctgttcctctcatcctgcatccctttgatacagccacactggctccccactgttctctaacatacaagctccacctcagagcctctgtacctgtgtcccctacctgacacagtctaccttacctccttcggttcttagcaaaacgtcttcttcatagggcattctctatccacccaatttggaaaacacttcctctcccccagcagtttctatgtactccccccatgctttatttttcatcagtgatgacaatcatccaacaggctatacatttaacaatcatccaacaggctatacattttacttatttaccgtccatctaccaacctaagtgcgataaggaaaaggacttttgtctgttttgatcactgctgaaaccctagcaccttagaatcccgcatctgagctgatgcgtaataggcgctcaataggcatttttgttaatgtatctgtaagatgataattgccaaaacaaacgcctctccatctctataaacggtattacctgccttctaaccagtctctggagcattcctgctccctacaatccgtttaacacagtggcagaataatattaaaatatttaaatgagctatttctttacccagcttcctatcacacttagtgaaatccaaactccttattccaacgcatctcacgcatccttctccccttcatccactagatccagcctcactggactatattttaattctcttctctaagccaaactggatcctgcctgagggcgtttgcgctgtctggaatattcattccccatctttgcacggtcagttattttttgacattcagaggtcgatctaaacttcacctcttcagaaagatctttattcaatccctagcctttcattccttttgaacgtcagcacaacagttaccacatactgactttccttttcatcacttttgtcccatcacctagtatctgagctccttgggcgcggggcgccctcgccggacctgatggtgcatcctcctcgcccaccgcggtggctgcccccaagcaggcgctcagcgagtgtgaaaccaatgcattcactcaggactcgcgagctgccgtggcaggcactgccctcccctccgccagcgagcatctccccctctccgcgcccgccgccctccgcgctcccgcctccctcgcctacctgtcggccaactccagcacctcgtgcacgctgcccgtgctgacgcggatgcgcccggtgtacatgtactcgattacggcttccactgtgtcgggttcgggccccggctcggagctccacttgcgcatctccacccgtcccgagcgggactcggaaaactggcccgagagcaggggcgtgaagtactcggtggcggcagccagtaccgagcggtgggcccggaactcgcggcctccagccccgccgaagcacagggtaatgtcgcagaagaggccctggcgccgctgctcgttctgccgccaggacagctctgagcagtgagagctgcactcgaaatcctcggcttctgggcccggatcgcccccgctcgcctccattgcagagatccccggcccaggcccgaagtccaccgtgccgctgcctcggacctcggcggccagtcctgccgagccggcggcggccgtctccatgctctccatctccagtacctgaagagatgcagccgcggccgccgccgccgccgccgccactgccgcagccgccatcttgacgccgctgcgcccggcctccacagcctcggaacgatgcggctgttggtacgacacagagggattctgggattaaatagtgcgcgcggggcggggccaggtcgcccgccggccgcacatgcgccgcctcgcctccagcagcgccgcctcgcctccagcagcgccgcctcgcctccagcagcgccgcctcgcctccagcagctctgcctgccttggtgaggtccgtcagtaacagtcgcccagtccagaagacttcgccccaggcctacccccagggcgtcggtgcgagtatggctcgcttcctttccttagtgggtagcatgctctctgcagtcattttgtcgagtaaagccaccttagaccatcacctgttgttaaagccttgagtggcaatacaggatttttataagatctagccccagctaagtggatgagggatgaatgagttactcgttatccgtttttttttttgtttctttttgtttttgttttgttttgggttttttgttttttttttttttgagacggagtctcgctctgtcgcccaggctggagtgcagtggcgcgctcttcgcttattgcaacctccgctgcccgggttcaagcgattcttgtgcctcagcctcccgagtagctgggactacaggcgcccgccaccactccaggctaattttttttttttttttttttttgagacggagtctcgctctgtcgcccaggctggagtgcagtggcgcgctcttcgcttattgcaacctccgccgcccgggttcaagcgattcttgtgcctcagcctcccgagtagctgggactacaggcgcccgccaccactccaggctaattttttttttttttttttttttgagacggagtctcgctctgtcgcccaggctggagtgcagtggcgcgggtctcggctcactgcaacctccgcctcccgggttcacgccattctcctgcctcagcctccggagtagctgggactacaggcgcccgccaccatgcctggctaagtttttgtatttttaatagagacggggtttcaccgtgttagccaggatggtctcgatctgctgacctcgtgatccacccgcctcagcctcccaaagtgctgggattacaggcatgagccaccacgcctgaccgtagatgagcatttttaaaaccatatatactgaaactattagtacagttcaggccaggccaggcacagtggctcacgcctgtaacagcactttgggaggccaaggaggatggattgcttgagtccatgagttccagaagagcctgggaaatacagcagaaccttatctccacaaaaaatacaaaagttagcctggagtggtggcatgctcctgtagtcccagctacttgggaggctggagtgggaggactgcttgagcccaggagatggaggctgcagtgagctgtgatggtgccactgtactccagccctggggcgacagagtgataccctgtctggaaaaaagtacagttacaaaggaatacagatcaaaggatatggatgccaggagccagcagtatgccttcattgttactatatagtttatttaaaccagactatgataatacagagaagagactgaggtggcagctgcccagaatctttgtggattacagatgcaaagtagttaggagtccttggacccacacttcagttacagacagacaaatcagctgcataaatacagagaacataagacacaagacatttcacagctttctgcatttccattttaaatgtatgtatgttacaactttacatattaagttactactccacatattttgtgacaatggctaaggatgcaatggccccatccccctgacataaacagactctggtctgcaacacagaacatttcagtgggataccaaacaagcccttaacacgtaacatacaaaaagatctttaaaaatcagattaatacaatgttcttcatgttatataaggaagaagaaagggaagtaaaaaaaaaaaaa

SEQ ID NO: 1244181 - DNA, 4001 bp, Homo sapiens
tagaaatgcagggaagtctgaaggaaggtcagagctaaaggaagatcctaaatcagcttcagtggattacagaaggcaggaaagaagacaattactaattgcaaacagagaaaaagatgttcacagatagttaaaaccgttaagactagaaatgttaagtttacttgaatttctaagaaaagtccctactgattttctggatttcacgtaactcataaactaaaatacattttttacctggttgttgcggttttcctgcagcggagaagtagcatcatcaggaaatgagcttacatttctcctcttcagcatctggtcatccttcttagctttcctcagctccacattgacctctattctgcgacgcctcatttccttgagaaaagataacatgccgtttcacctatcacaccagtttttgttgctaagtgagggcattttttttttaaatacctcagttttcacccctttccaaatgtcttcccatttaaataccaccacaggaaagcaacagaaggtactcactgtactgtcttttcccttgttcttgaatctgtgaagacgggcagctggtgtattagcattctcgttggtggacatggttatgagacaaagggagaaagctaaaagatgggggaagagaaaaatatttcctttatcattttcctttgtcaataatagtaccaaataagaactgaattatcaagcatctactgaatccacacctgtatactagaggggggatcatcatgttttcggcactatgaaatagctttacccaaaggggaagtgtcccccttccctctaaagggctgagacttcctggagagggctctccatcagaaatagaatgcaagctatataaattgaaacttcctagtagccatatttttaaaaaggagaaaagaaacaagtgaaactaattttaataatgtattttacttaacccaacatatccaaatagtatttcaacgtgttatcaatatataaaataactgacatcttctacattctttttccatactccatctttgaaatcttttgtgtactttaagcttacagcgtatttcaatttggactagccacatgtatccaccgtttctgacagcctagttcgatactccagagtccctaatagttaattcaagacaaagtaggggaaccaagtcaacttacagctaaaaattatgtgccagggcaataaattcagatcctcaggaggctctccctattttactgtctttacttggccaaaataggtgcagactcgaaaattaaataaaaatttgcttcatcattacattatggtcaacattaaaaatgcagtgccgcatctcgcatatttgatttgcatttccagagactaggagtgaatgcgcttaattaggatgacatcagctgtgcgtcattcagaagatgacaaaagtcaaagccctccttacaatttgctatctttgctttcattacgctcgcctacgacttggtggcagagccacccccggggcctaggtgtcagagacggtgctcccaactgccacccccagcccctgcccccacgccggggaagatgcaacgagaaaggaggaggcgaaaccagggccgccacaagtcctcccgggacattcgccctcaagcctggctcgctccgattctcccggccgcgacgcgttaaggcctccgctgccgtttgcagagcgtcggcgccctaaacccgcagaccccgcgaaactcagccgcctggtcaatgaacgtcgcccccgaggcctagtcaacgcgggaggcagagccaggctcggcgtggacccggggcctccctcccccaacccaaaaggcgaacgccgcccacgggcaagccgttagcgctcgggccgggccgccgcctgagtctgtacctgcgaagcgggcctgggcttccacgggaggcgatgcggggggaatcagcggctgtagggcgactgcgttcaaagggtccacctcgactcagctcaaagaccgtgtggctcgtgcagccggccggcgcgatttaaatttcccggtgactccgcattccgattggctggttcgagcctaagctgtgtgcccattggtggatttgaaaaacacgttgggaggggagggagtcatagggcttgggggcgagtgggaggggggaaagaaaaaaaaaaaaagaggatggcatcgcgagatgagggagcggccgggcggtgagggagcggccgggcggtgagggagcggccgggcggtgagggagcggccgggcggtgagggagcggccgggcggtccctgagcgcctggcggggcggagcgggaggactccagatcccgtcaagcagcgcgaaggggcggttccctgggccgttcgtgtttccatagggttgaagcgtgcatggtccttgggcgttttcctgggcgacagccttaaacaaataccacaaaatgattctctaagtcattattttaaaaactttgttgttgatcttcatgaaaataaaaaaattctaattagtaaataagtaatctttatagaaaaacatattgctttgcatttttttcctattatgacacccaaagtactcggcgggggtttctggctactatgggagggaagatttgtgttatattttttagtttagtttttttttaattgcatcataaaagactgtatagaagccgcaaatatggaaacaaaaggtttcttatgcctgtttctccaaaaactcaagttttttatttttaaataatttcaaatgcagcagaattgcaaatctttatccagatttgccaaatcttaacattttgccacatttgctattgctttctctatacatatatatgtatacatatgcacgcgtgtacatatgtgtgattttaatatgttactttaagagaaagtttcagaatcatgtcctttttcctctgtttcacggtgtctctcctaagaaaagacattctcttatataaccacactgcagtcatcaaattcagaaaaactgaaatttcatgctgttgtttagtatgtagtgtgtgttcaagttttttcaattgttatagtaacattctatgctcattacacatttctgaattttgcattttttgccatatgctcaaacgaacaaacaaaacaaagatggtcaacagagcatcaggattctgggccatttttgtttctgcaatttttttgtgttctaaaagattacattttagaaaagttttcatggtttatttcttactataaataaattcaaacagcaagtttgtccatttttgcaggcattaatgccagcctcattcatcgtaaagccagagttcataaagggttggacctactcttaatcagcataatcccatccccctaaatgcaagaatgtggaaggaattcacccctaaaccaatcactgtgtggcattctctcagctactgagaatggttcaggggcaggcacatgacctaaattcatccagttggacagcctctgccttttgtttactggttggaggtaggaaagcagcctctgttcttctgaactaagggatgtgagtcctagaaatctgaataagaaaactgtagggaaaccttgagaggtctgacctgctctatctctgaaggtttgcaggtaggagatccgatacacatttcttttgtattgtcaagttgagtttcttctctttttttttttcttttttttcttttctttgagacagggtctagctctgtcgcccaggctggagtggagtggcacgatctcagctcactgcgacctctgcctcctgggctgaagccatcctcccacctcagcctcccaaatagctgggactataggtacacaccaccacgtccagctaatttttgcattttttgtaaagacagggtttcactattttgcccaagctggtctcgaagtcctgagctcaagcaatccacccacctcagcctcccaaagtgctggaattataggcctgaccaccataccaagccaagttgagtttcttttgcttgaaaa

SEQ ID NO: 1244182 - DNA, 4001 bp, Homo sapiens
aatttttatacaaatgtagcaccaatttgtacactactcccatttgccaaacagattttaccaattatggcacgtaattaaagtttcccaaactgctgcagcctacctcagtcatctaaaaagaattccaatccatcaatgggaatggacaagctgtgttgagaaagatttaagacaaagacaatttttatctttaggtaaagttgaggtcccagaaacctatcacactgttagctctatcccatgcaaatagcaaaagatctgagaaagcgatttcttgttctctgggcaatataaccaaacagataagcgttactcacatagttcttgacttctcgtcgagcattagcatcaatagcaagccacctctgctgatattgtgccttgatatctggatctttagatgtcaaagagttcttgatttgtagaccagctgcaactctggcaacctgactgtttcctggatttgccagcactctggacagttccacaaggaaagtgggctgttaagggaagataaatttgtaaataaaaatatcttaggaatttccacaactgaggataatttatagagcactgaaccaccagaggggcggcgagggggggaactaatgtctaatttttttttgatataagcatttcaggaaaccacaaaatatttacttcactgacttctataaaaatgttacttagtgtaacaggaagtcttccacttttctcgtggagcctagcacttaatgaggaattacagatttccctatcaagatcattcttagtgcccaaattgtcatgttagacccccgaattgcaaggtttcagagtatggtagtagtagtcagtcttctatgtatactgaggtgtcccaagaacttttaataatgtctggtactcaatgtttgttaaatgaatggctgttatgatggggggtagaaaataaaactgtttatctaaatttcaaaaaccttggtcccaaaagaatgatccaactttccatctcatggcagcagcagggtagcttttcaatccatggaaggaggtgatcttttatgagagggggaaatacagataagcctaaaacaaacttaggagcctcatcctccgttttatttgtgggcactcagcaaaaagggaacaatgaaaaaagcagatttataaggaaaagtgataagatatttagaaatagggaaaaagtgaaagaaaaaatcttcaggcaagctgttcaagcaaaataactttgtatctaatgatcaacaattacttgctcctttacatttggactttagttgaggaatacagtggatccctgaaaagcatgttcttttgtaaccttttgtaatccacaggcctcaaaaactactccctttgtttaaaaatttagcacacacacacctctccaccaaaaaccgtgcccaaacagcaaagttagcaggaaaagtcaaaagcagacacatttttcttactgctaacaagctctgcaatcacagcagaagataattcttaaaagttttattaattatgtaccactaaagaatgttaagaatgttaggaataagataaaaagctttttgcaaaatttgcaaaagcagaaacaggaataataccctaaatggaattatcagcctatactagtggaaaaatctcttctaggaaaggataaacaggttagttgtaaaaattggcacatatgaaaaacaacaaaaaaatcattcaaaggcagtctgtataaaataagccttgtcactttgttgatgttgacattttgcctatataacacaaaggaacacatatggttagtgttactcagacttaattcctattacctttctcaaagatgtcaagcatcatccaatccttccctctgaccccatcccccaacaggagatggacaccaaagagaaacttaactggcatctaggctgtttcaaccaatccatcccacatttttatacaaaggaccagtctctagcggacttagcttcattttctccggaccccttaaattttaaaatatgaaaaacgaggaactttcccctgtgatttcatcagcaaacaggccccatctcaaagatgagcctcagtctgttttctgggtgcagatccctagtgattaggtctctattcatccaggtcagaagaaaaaaaaaaaagaaagaaagaaaaagaaaaaaccccaagagaggaataaccgagcaaagagggaaaaatatcagtggaaatgggttaagaggcagtcgggtgccaggcctggccatgagtacagaccaaggtagctaggaaagggcagagctctaggaaataggtggggagagccacaggggccacgggataggaaggagaagccggccggggtcagacagggcgggcggccgggcccggagcttccacatggcccctaggcccgactcccccgcccccacccctgctgaacacgcagcgccgcgcaacctaacttcccttccctccctctttctccctcccgctgcaccgccgccctcaggccgcgcaacgattgggcggcaggcagctcggcgcgccaagccattggccagtcgcgaggcccggggcgggacacacccaccggcttcccgatggcggggttaggttggaccgggttggggggggagggggaggggggagggggacgggatggggcggggtaggttcccgaggcctgggcctccgggagggcgggaaggccccgcacgcaggggatggggacgcggcgggatgggcgcggcggggtagcacgcaccaggttctccacggccgcacgctccaggaacttctgcgccgcttccagctccagccgatctagggggaggaaagtgggagacggagcggggtcagaggggccgggcctcccctcccccaccccaatcacctcagccctacccccggctcctgcgtcctaccgggagacacggtcttctcgagaatggtgatcagctccatggcggaggtggcggcggcggcgactcctcctaagacgacggcccggcctttcgggcggcggctcgaactggggatgggggttgggggtcgggtgggaagggagggtggggtggggggcgggggtcaccacaaacccattcaccggctctgtctgggtagtcggtccggctccccttcctctcctcttcccttacttcctccctccaaatgggctgctggcggcgggggagggaccctgggggcagctcagagcgcgctggtgctcgggaggcggagggagaaagaaggaagggaggctgtgagtgagaggcggcgcgcagggagggagcgagggagggaggaaggcggagggatattcggaccggacctctccgcggaggcgccgcgctccacgacgattggccgttgtcctggccacgcggaatccctaactggccaggcgctcagcgtcgaagggccgtctcgcgcccattcgcctgctggtttcaaggcccgggttggctgggcgggcagcggaatggagcgcgcggattggccgaggggagggagattgggatggggtaggagagagcccgccgttgattgggtgggcttggtaaaggccttgagctcagaccggctgagcgctgggaggagggtggaccggaggcacgactcggatcctgcgcgattggctgggatagtaggcgttgataggatagggtgcccgggagaactaaggagaggagttcggggtcggggcgcgggaaggcgggaggtgcccggcaaccctaggagcccggcgcggggcacgatgggacgcccccgggaagaggcggagctgggttcgagcgctggggctgcggttgggtaagcgccgtcgctccgaggggcgtgttgcgcgaggttttcgcgggcctgagcgggggaggggggactgttgaagtcctgcgccgcgcccacaggaagctgctttaatggctaggtcggcttggtaccctgctttcggctgggagggatccgtaaggccatgtggctccactgccaatgtgtagatgtggaaactgaag

SEQ ID NO: 1244183 - DNA, 4001 bp, Homo sapiens
ccctttgtttaaaaatttagcacacacacacctctccaccaaaaaccgtgcccaaacagcaaagttagcaggaaaagtcaaaagcagacacatttttcttactgctaacaagctctgcaatcacagcagaagataattcttaaaagttttattaattatgtaccactaaagaatgttaagaatgttaggaataagataaaaagctttttgcaaaatttgcaaaagcagaaacaggaataataccctaaatggaattatcagcctatactagtggaaaaatctcttctaggaaaggataaacaggttagttgtaaaaattggcacatatgaaaaacaacaaaaaaatcattcaaaggcagtctgtataaaataagccttgtcactttgttgatgttgacattttgcctatataacacaaaggaacacatatggttagtgttactcagacttaattcctattacctttctcaaagatgtcaagcatcatccaatccttccctctgaccccatcccccaacaggagatggacaccaaagagaaacttaactggcatctaggctgtttcaaccaatccatcccacatttttatacaaaggaccagtctctagcggacttagcttcattttctccggaccccttaaattttaaaatatgaaaaacgaggaactttcccctgtgatttcatcagcaaacaggccccatctcaaagatgagcctcagtctgttttctgggtgcagatccctagtgattaggtctctattcatccaggtcagaagaaaaaaaaaaaagaaagaaagaaaaagaaaaaaccccaagagaggaataaccgagcaaagagggaaaaatatcagtggaaatgggttaagaggcagtcgggtgccaggcctggccatgagtacagaccaaggtagctaggaaagggcagagctctaggaaataggtggggagagccacaggggccacgggataggaaggagaagccggccggggtcagacagggcgggcggccgggcccggagcttccacatggcccctaggcccgactcccccgcccccacccctgctgaacacgcagcgccgcgcaacctaacttcccttccctccctctttctccctcccgctgcaccgccgccctcaggccgcgcaacgattgggcggcaggcagctcggcgcgccaagccattggccagtcgcgaggcccggggcgggacacacccaccggcttcccgatggcggggttaggttggaccgggttggggggggagggggaggggggagggggacgggatggggcggggtaggttcccgaggcctgggcctccgggagggcgggaaggccccgcacgcaggggatggggacgcggcgggatgggcgcggcggggtagcacgcaccaggttctccacggccgcacgctccaggaacttctgcgccgcttccagctccagccgatctagggggaggaaagtgggagacggagcggggtcagaggggccgggcctcccctcccccaccccaatcacctcagccctacccccggctcctgcgtcctaccgggagacacggtcttctcgagaatggtgatcagctccatggcggaggtggcggcggcggcgactcctcctaagacgacggcccggcctttcgggcggcggctcgaactggggatgggggttgggggtcgggtgggaagggagggtggggtggggggcgggggtcaccacaaacccattcaccggctctgtctgggtagtcggtccggctccccttcctctcctcttcccttacttcctccctccaaatgggctgctggcggcgggggagggaccctgggggcagctcagagcgcgctggtgctcgggaggcggagggagaaagaaggaagggaggctgtgagtgagaggcggcgcgcagggagggagcgagggagggaggaaggcggagggatattcggaccggacctctccgcggaggcgccgcgctccacgacgattggccgttgtcctggccacgcggaatccctaactggccaggcgctcagcgtcgaagggccgtctcgcgcccattcgcctgctggtttcaaggcccgggttggctgggcgggcagcggaatggagcgcgcggattggccgaggggagggagattgggatggggtaggagagagcccgccgttgattgggtgggcttggtaaaggccttgagctcagaccggctgagcgctgggaggagggtggaccggaggcacgactcggatcctgcgcgattggctgggatagtaggcgttgataggatagggtgcccgggagaactaaggagaggagttcggggtcggggcgcgggaaggcgggaggtgcccggcaaccctaggagcccggcgcggggcacgatgggacgcccccgggaagaggcggagctgggttcgagcgctggggctgcggttgggtaagcgccgtcgctccgaggggcgtgttgcgcgaggttttcgcgggcctgagcgggggaggggggactgttgaagtcctgcgccgcgcccacaggaagctgctttaatggctaggtcggcttggtaccctgctttcggctgggagggatccgtaaggccatgtggctccactgccaatgtgtagatgtggaaactgaagcccagagagggtatggaacttgtccaaggtcacacagctggttaatggcttggtaaggaatgggttcaggagcccagagagggtctggaacttgtccaaggtcacacagctggttagtggcttgataagctcaagctctcctgacggcccttgtccctacaagcagcttcctctccaaggagtcccctaagcctgcttatatggggcttgagacctgtgctgtgataaatctgacttgcttaggggtgagctaagggattcctcctcttagaccccccatccatagctaccaggtacttgacaggatggaaatgtttcaccctccaaaagtaccctgtaaaggcccaacctcgaaccagaaagaatgtgtgtacaggaataaaggattgtggttcttaacctgtttcagttctcaaccccggaagaaactcatgaatgccttttcttagcaaaatgcatataaagaaaacgtgggccgggcgctgtggctcgcgcctgtaatcccagcactttgggaggccgaggggggcggatgacgagtcaagagatcgagaccatcctggccaacatggtgaaaccccgtctctactaaaatataaaaaattagcccggtgtggtggcgcgtacctgaagtccaagctattcctgaggctgaggcaggagaatcgcttgaaccctggacgcagaggttgcagtgagccgatatcgcgccactgcagtccagcctggcgacagagcgagactccatctcaaagaaaagaaaaaaaatgtgcatacagtatgtggctcaggcctgcaatcccaggactttgggaggatcgcttgagcccaggggttcaagactaacctggacaacttagcgagatcctgtctcttttaaaaaaaatgaagatttttaaaatgataaaggaaaagtgtaataatagggccgggcgcggtggctcatgcctgtaatcccagcactttgggaggccgaggcgggcggatcacttgaggtcaggagttcaagaccagtctggccaacatggtgaaaccctgtctctactaaaaatacaaaaaaaaaaaaaaaacctagccgagcgtggtggcgcacgcctataatctcagctcctcaggaggctgagacagaatctcttgaacccgggaggcagaggttgcagtgagccaagacttcaccactgcacttcagcctgggcgacagttaagactctcaaaaaaagaaaaaataaatggtaacaaagaatttcttgaattgtttcattttcacagtaatgatgtaggggtaattggatgtagctggttcatagagctttttaccatatgacttgagcttgtgaggtaattgccctgcagtagcc

SEQ ID NO: 1244184 - DNA, 4001 bp, Homo sapiens
ggctttggccagggtggtacttaccagatacaatctttaggtctggccacaactcattgagctcatgaacaacctggtttgtgaactcaacgccactgtcagagtctaacacactgggtgtaccaagaattgtgaaaatatctaacaagacactgaccacctcatgggcctgtttggttcttaatggccgtaaaataataaacttggttgagtgatcctggtagtataaaatgaacttgaactcaccatcggcactggactgcatgtcaagtatttcaacttggcatgtggagtctatgtccttaaaagtcatgggctttggtgcaaggcctctcttgggtactgggttcttctggtggcactgtttacacagagtcagatataagacaataacttctttggtgacattcccatattttccttgcagctccttgagcatgcgtgtccgcccaccatgtccaatactgagatgtgtatcatgaagaatatcaaacaactcttccttatgtacataataccgtattcgatcacgttctccatgagtagcctctatcagtttctctgtgccctgtacagagatcacatcatattttgctgcacggcgataatcacgtgatgacttcttccctttttctttagcttctttaacttcctttattgtttgaaagtacttttctttggaaaataccttgctgttgtaacttttgctttctactaactttgttacactcataagaaacttttctctcatgttacttatctccatttccatttcacttgcatttgaaaccccaggtggatcatttccagctctctgaggcatcatggagagctgtaagaaggatcctaagaaaggaagaaaagagaacaaagttaaattcactgacactcccacctggaagactttccctctaaagttcctcatcaattctttcatctaatttttgaagatgattatatggaagaatgataatagaataatagttaaaaagcaactagaaagccaactagcaccatccaaaaccacagcatagcaacagaatttgacatcagtaaagatcacaaatatgtagaggttttagactttaggcaaacagcaaaaacaatgaagtcattagcttatagcaagaaacctaatcaactggtttttattaactgaataggagagaggataaacagaaactcctaaggcagtaggctaaaatcttaccctcagtaccctttaaaataatataaatgggagaacgttgctaaaaggtaccacataataacagcaaactcttaaactgaaatttgtaccagggattgcttctgagccttcccatgatcaacagaaacaatttcttggccaagcacagtggctcacgcctgtaatcccagcactttgggagggcgaggtgggcggatcacttgaggtcaggagttcaagaacagcctggccaacagggtgaaaccccatctctactaaaaatacaaaatttagccaggtgtagtggcaggagcctgtaatcccagctactcgggagactgaggcagggagaactgcctgaacctggaaggtggaggttgcagtgagccgagattataccactgcactccagcctgggcgacaaagcgagactgtttcaaaaaaaaaaaatttcttatggctgaggagtctgtccttatcttggggaatcgagaagaaagctgtggggatatttttaaatgacggtttccccttgacaattgtccacaagattaataaaggaagattctgagcccttaccctgtgggaccgtgttctcataactgtccagcattgtgtctctgtagcaatccttttgagagccttctaaataattccaatctttggtcatattttcaaatgctgttgcttcctgaaacaacattggctgctgccacagggaccatatagtcttggggcctgggctaaagagcagcttcagcaggactggggaagagacaagagagggcaccaggaatgaaggcatgcagcataaaggactctgaaagcgagtcaggtgaataaatggaagaaataagaaataggtctcacatctaacaagatgagtacagcttcatggatgagggaaaggagttttgctttcctgggaggtctgttggtctggccagttttgacgctgccagagctgtagcccatttattaatctttccagaataaagcagagtccaagtgaacttgggcgcaggcttgatgactcctaacaggggtggcaggatctgtttccaatggaaatattatatctgtgtacataaagatatgtcaggagattatcctgcagaaaagagataccccaaatggagtctacctgccactgtgatcagataattccttagggagagaacttgatactcagttgtctaaactgggattccttagtcagaacagccgtaagacaggatggtgatgaggccaggggagttcacatgaggactgcaggaattccagcaagcttaggaaaacaggatcccgagatcccagctgtcagatgcagagcggaggggcagggcagaatcctgagaagcagagaaagatggaaacttttaaaggctctgagcaagagtctcagttaagtggggcctgcttccaggtccggaaggtccttcactaaaagggcttcaaactcccttcctcagcattgctagttaatcatgaatattcctgattctaagacattactgattgtaaatcactaacttaataacaactttcttttgagaggaaaaacagtgtgtattaaatgaatgtattgataagacacatccaaaatttaaaatgtgaaaaatatgcattttcattctttttctttttttgtatttttttatagagatggggttttgccatgttgcaaaaaacccaggccggtctcgaactcctgggctctagtgatccacctgcctcagcctcccaaagtgaggttttgccatgctggccaggctggtcctcgaacttctagcctcaagtgatctgctcgttttggcctcccaaagtgttggaattacaggtgtgagccagcacacccagccggtcctactagttctaacagacttgaaaccacaaggtattcaatggaatccagaaaaagcaccttccagattcctttctgaaaccagcgtctctcagaacctgagtgctgtgttggttgttatttgagtcccttcaggggaccgcaaaggaaggaaaagcctcatcttcattctataaaataatgaaggcaactgggcatggtggctcatgcctgtaatcctaacactttggtaggccaaggtgagaggattgcttgaggccaggagttcaagaccaacctagtcaacatagtgagaccctgtctctaaaaataaaaaaaagaaaaaaaagaatgaaggcaacaggctagaaacaatttataatcaaaagatgtagaatctcagtctttagtagaggtacagtccttactataccatgaaattctacagtagagtccagggtctacaattatctaatagacctattttggttggtccatctagtgattttaaaaaaatttgtctccctcttcctctctccatctccgtctccacggtctccctctccctctctccctctctccgtctccgtctccgtctccgtctccacggtctccctctccctctctctccacggtctccctctgatgccaagccgaggctggactgtactgccgccatctcggctcactgcaacctccctgcctgattctcctgcctcagcctgccgagtgcctgggattgcccacaggcgccgccatgcctgactggtttttgtattttttggtggagatggggtttcgccgtgttggccgggctggtctccagctcctgaccgcgagtggtctgcctgcctcggcctcccgaggtgccgggattgcagatggagtctcgctcactcagtgctcaatgttgcccaggctggagtgcagtggcgtgatctcggctccctacaacctccacctcccagc

SEQ ID NO: 1244185 - DNA, 4001 bp, Homo sapiens
gcaggccgttgatgtcagcctccacgctctggcgcagagctacctcattctcatacctgaaacaagcatgatatcaatactggttataacttatataggggagatgtatctgggcagagactatttaaaaagcagctacatagttgatctcatgtaatggcaatatttgtcatgtacagttctcttagaagtaatagtggtttaatggaaaaaaccttagcagttactttaaaatgcattttcttcctttaatattgccaaaaaggtaacactgacatggaaaatttctcagataactccaatactatttaactttgggtgaattcagaaaaatgtaaatgttattgagggcatcccaagtcattgttaaaaaccactgatgtattcgttgtgatagtattatacaacgatcacttaacttacttcagcctgaagtcatcagctgccagcctggcattgtcgatctgaagcaggatgttggcattatcagttgttaggttgagaatctggagggagaggcacagttatttgagaagaggtcagatgcagatatggcttttgtagtgacatagatgcactctgcacttttatgttgttctcttacaaaatcttgggaaaattttttattttaaatatgaaatattgcaggcttacccatatacttaactttgaattatttgttctcttggaatttctccagtcttgtatttctgtacacgaattattcctttctgaaaactaactggaattatatagatgtattcctgtaagtgtgccctcctcttttagactatgtgatttccatgtatttcagccatgctttggctgactcacacctgcatttgtttaactcatgataaatactaataaataaatacactctgaactggtacacaataggtacaattcagaaattccttagaggcaagcagtgtcccattttcatactggaaaatttatttttcttgccatgttggtactgaatatggcttgttatcagtctgaataacattttgttctgattcatatcatgattttttttttcagtttctacatttgtaaatagcctagcatattttaactgtggactcattgtatgctcattaaaacctcaaaagtgcttagtaaatctcccatcctcttaagacaagtagcacacttgctggatgaagattgccatgaccatagtttcacagatgtttatctttgatgagactgggttatttttgaaggaagaaagtaacatgggtaagcatagtgaacagccacattgtgcttaatttaagattcatctgtctggattacatggacaagatacttaaagctggatttaaaaatacctcttacctgatttttaaggtcatcgatggttttgtagtatttgctgtagtcacgaggctccccctgatgtgagttgccatgcttttcataccactccttgattttgccttccagctcatagtttgattcttccagagcccgaactttgtccaagtaggaagccaggcggtcattcagattctgcatggttactttttcatttccagagagaaggccaccatctcctccaaatccaccaccaaagcctcctccaaagccgcctccaccaaagccgcctccaccaaagctgcccccaccaaagctgccacctccgaaactgccccctccaaagatgcctccataactcccaccaaagctgctacttccatagcttccacgaaagctacctccaccaaaacctcctaatcctccatagccacctgatgagcccccaaagcagcccccaccagagctcccacggctaaaagagccaccactgaacccccctgagctaaatcctccaccaagggagcctttgctgctagaaattcttagggatgacactcctcctcctcctccacatcctcctcctcctcctcctcctccactgcgggaggaagagtagtgcttgcttgagctgtatcgaacagacatggtgatgctgtttagcccagggagtgcctgctaccaaggacagtgacaagcctttatatactgagagggtgtgtccacatgtgttagagtttgcttacttacattgttttctttttgccaacttagcatctttggcttatgattgcataaattatcttcagtaataaccaatcctaatatgtacaattttgaatttgccctaagaataaacaggaggtttgctatgttgaaattgaaaatgggtggagttcagatgagcatgttttattatgcttttcacctgttgaagaacattgagcaaccgttaagatccatttttctcagcactaattcaggttgcatagaatgtttgcaaagtttagaaaaaaaagtttcagctacaaaattatagttaaaataagatttttcaaattcatgttttaaacagttttaattggagcaacaaatagcataaagtctggcaggatcatgctacaataaggttcttgtagacaactgtagggaatcaaaaagaaaaagtttctaaaaatttaactagcatcaatagttgccacacataaaacattaaagccataaaaccacaatttaggagattgtgtttgtaggagatcttttaatttatttggcaaatgagagtatattgatattttgcctaagaaagtggaagtaatgattttagaattttctaattaatgatggcattatttttaacattaaaaaatctgaaatcataaagttatcctggattattttgcacttttaaattcatcatagttaaggtttctgtgaagaccataataatgcagaaaatctgcattattttcttagcatgaaatccgaagaactaacttgtagtactttacactaagttctgattgagtaaaaagggaaaatttggatatgttatgattgcaagtaaaaatttgcttgcaaaaatgtaaatctatattagagaatgatacttgcaccaaatattatgaactagactgtgcacatgtgttcccaagctaggttcagtttctcaataaaaacaacacattttcttggatatactgtgtacagaatttggtataacagtttgtctagtgaagtaaattgggattttggtacattgtataagattatatctacccataggctatgacattgctgttgtttggatgtatatattcatacatgttttacaattatgtagtgctgtttgtgatactgtgctttaaaaatttctagaacaagctgttgagataggaatggtggttattattatttcttttctttctttctttctttctttctttttttttttttagacggaggcttgctctgtcgcccaggctggagtgcagtggcgccatctcggctcactgcaagctccacctcccgggttcacgccattctcctgcctcagcctcccgagtagctggggctacaggtgtgtgccaccatacctggctaattttttgtctttttggtagagacagggtttcatcatgttagccaggatggtctcaatctcctgacctcttgatctgcctgccttggcctcccaaagtgctggggttacaggtgtggttattgttatttctaatttatagaagaggaagttgaagttgagaggttgtgattttttcctgaagatatgtaacaggtggttgaactgcaattagaagcttggtcttttaactccttggttcttttccactttaccaatgtgtatatatattatctgctccagtggatttggtctaatggagatgaatgactctaattctcaccgtaaacttctccaaatggggaaaaagagcaaaacaaaaagaacttagaatcatgaaaatattcaaagggtaatgatttggcacacactctacctttagtaattgttttttcaaattaagtttattgctgcacattttggtttatgaaaactacagaaatagtttctgtagggaagggagtgtggttgggagcattaatcaaatgttgattgttaaagtggaggttactacccagcagattgcaactcttcc

SEQ ID NO: 1244186 - DNA, 4001 bp, Homo sapiens
caataccacagcatcccagggaataattttccctttggctggctgccgtggctgtaaatagcagcagcccctctctaagtggaatttctaaaagccgttgaaaataagttactctttttgcttaacgttcttcatgatttaacttaaaacactgatacttctttagtggctttgactaagattttacaggttcagaaccatggccattgcaacttcctgtgtagaaattttgtgaagcaaaaaggaaattagtatttcttacctatatctgggagagttgagcatggaaaaggaggaaggaatataaaaattagtacatggttaatctttccattgtatgtgtcatcaggaaaacaatggttgatacattgaaaattgaggtttagaggcgggtggatcatgaggtcaggagtttgagaccagcctggccaagatagtgaaaccccgtctctactaaaaatacaataattagctgggcacggtggcagccgcctgtaatcccagctactcgggaggctgaggcaggagaatcacttgaacctgggaggcaggggttgcagtgagccgagatcgcgtcactgcactccagcctgggtgacagagcgagactccatctcaaaaacaaaaaacaaaaaacaaaaaaagaaaattgaggtttaggacactggtaggattatggtgtcagtcacatcatgagttgagtcaatagcacactacaaatatcgtgatccatagccctgggtttaagtaacttataatttaaggacatttaatctgaattgcattagattctaattactttctagaacaccctatgtgaatttaccaaaacagtaaatatatggagtatgtgaacttcagaagattttatatcaatgaaggcaggacagtaggacagaagacatggtgggacacgcccatgatcttcagtttattcgactcacttcatcctgaagtcctcagcagctagtctcgcattgtcaatctgcaagaggagctgggcatttccaatgctggctgaaatgatctggcaaaagagagggacacacacaagattgaagccctaaaagactagtattatacaaatatatttttgacacaaaggtgaaaatggtgatattaaatgctgttttatttagagtttaagacagtttcatttttctaagacaatatctgtataaaataatattgagaagtaaagaaatgcagatttcctacagaaagataatggaaatacaatcatttcttagtaaatgataaagtggagtgaaacaacctgggatgagaaaattgctgcaagtacagctaaattggaaaatatcaaagttgtaggtgattatcactgtaaaacattgtaatggtaaaaaggaaaaaaaaaattcccaaagcgcctccaaaagagatcttaccttattcctgaggtcttcaatcagtggataatatttgctgtaatcgctctgtgaagcatctgcagtcccagttcctcgtgtttcataccattctcgaattttattttctagctcagtattagcctcttctagagctcgcaccttatccaggtaggaagctaatctatcattaagattttgcatagtttctttttctgatccagaaagaaggcctccatcattgcccgagagaatacctagagagccacctcctgggctgcccccaaatcccatccccagccctccaaagctacctccacccagggctctcccataaccagcacccagtcctcctgccatggaacttccggagccacccccaaagccggaactagaaccaaacatggaagcagcagaaaagcctcccccacagctggctccaaagccaaaggcacttcccccataaccacttccaacactggaagcagacatgcccctgggtctgcctatcacactctgcgaggagagccgccgggacagtccgggggtgcgcactgagagtgacatggtgttgttggagagatccatggcctggggaaggtggccacaactggagaggaagttgtgccagcaagccagaaagctaaacttatataggctgcaagatgggtgtcgcagttgaaaagttcactttctccactcaaaattggatcctccccccaggtttttggccagctcaacaagtgaatgatttatgtataatgaaaattcattgatacagaaataatcgaataatcatttccattaaatatttgttatatgaaaaagaaagctgggtggagtagagtctgcttgtcataaggaatttttcttctccaaattagtctgttgcctgtattcccagcactgcctagcgtcttgttcacagtaggaagataatgagcgattgctgaatggatacgttaaatacttcttcctaaaccttatgcttttttaagttcttccctgatcttttctgtttgtttcctttggaaaatccagtgtaaaccatttgtttcctttggaaaaaccaatccaatgtaaaatccagtcatgatcaagtataccttttagtggaatacagcttcagaagcagctgtgaaatgcactggtgaaaggtggagaataaatatattttccagatggatactagaatttgcattttcaaggattttaaaaccttggctttaggatgttgcatgtttcttttccctcttattcttcaacttggaaaagtactatttttgagtacagttgtttatagtagagtttattatagttgttttagcagttttaccttgtctgattgctcactgctctacactcagcatttactatgtttattccttcaacagatattgcctgtaatggttgctcaataaatgtgttgactagttgaatggattgtgtaaacacttcagattttgttgccattatcaataaggagaaagtggaaacacagttcaaattaagaaatgattaaaaccccaagtttaagaggctagtgaaccatttcagttgactgctatgatgaaaaaggataaattttacaatatagaataaattaaatgttatattttaaactttgttgtgaaaactttgcaaagcgtgcttcaaggaattatatccagtatctttaatttttaagacataaagttcttatactttcttgtttggtatattatttatctttgaaattgatatggcttatatattgaacatgagaactaacgttcttacaggaaatgcattaacttgaaagaagcctgctttcagagagagttgtagatacctggaaaccgagtagtacaattccagggtggtggaattcccttaggaatttaaattgtgagcattttgattggataagaaggaataaggatttttcttttacatgttttctttgagatgatggcccaattctctacatgtctcattgcaaaatagttctatagtttttttttaaatatagctctctatgtatttatagtaggaaatttagaagatgcagaaaacataaagaagatgtatgtatatatgagtattttatatacatttttgaacataattgattcaatataagattttataatctgcttttctcttaagattatatacttatctatcacttgaactttaataattgggtacagaacatggattgtggattcttcgaaatcctttgttggattcagatttctaaattcagtttgctctgtatttgatgataggaaataaaatttctgggtgtaaataacagtttttttgcaaagatgtttatactgaattttattaataaggtatacactgactgtgtgtgctatagacatatatgtattttgactagaatggatttattgaaataaaatacattaaaatcattgtaatgatacatttcctacctcgtgggaaacagggccttcatttctccatcagggacctctgtttgcttatagatggccactaaaactccttttcaatttggtatatttggattctgcgttttattttattctaaggaaaagttttaaaaatatcacaagtattctagatttctaaaataaaattgaattc

SEQ ID NO: 1244187 - DNA, 4001 bp, Homo sapiens
ggagagggagggggaaaaaaaaaactcacttgagcctgaagtcgtccgcagccagcctggcattgtcaatctccaggatgacccggttgttttcaatggtggcggtcaggatctacaaaatgcagaagaaggtaacctctagggcatgggtgtccagtctgttggcttccctgggccacattggaagaagaattgtcttgggcaacacatcaaatacgctaacactaacgatagctgatgggctaaaaagaaattggcaaaaataaaaaataaaaaaaaactcaatgttttaagaaagcttacaaatttgtgttaggcctcaatcaaagctgtcctgggccacatgcagcccaccggccacaggttagacaagcttgctctggggggtccacgtgcttgaggaggtggcctgggaaaacatgggcaggacctggttcccatggggctctacctctaaactgtcctgtgagctgggacaaggcatttccctctgggcctccattgctcttctgtaaagtgaggagtggggctgcatcccctccaatcgtttctaacactttaatattccatgtctgagcaccctgggggagatgcagggagtgcatttctgaggaacgacctgctgagaacatctttggttcgtcatgtcttggcagcctcagactagcaccctccctaggccactgtcttgagatccatcccctgaaagtcaggagggactcggcttggtgccacatatctcacaatcactttgctagagctgacttcccagctgagtggaggggaaatccaacaaatattcccatccctttgaatttcttgtctaaacgtttatattccaaagcagtgaaagcctgctccacatggctgagactcagcccaggctggtagatttctgctccaacaggctggtatcacagcacaacagacagggctcaacaaagggcacccaggctcggcactgcctaagcctctgcctctctctcccccaacttggccatcgccagttgagaataccagtttgaatgggtcccctacaaagtaaacaattattcccagggcaatgaatgaacacgtctctctttctctgttgatttcatgcattcttaatggcttttaaacctgtcatgtttccagataactcagtaggttaggattatagagatcgagtcatgaataacataactgtctggaaagcagtaaaaaaactgacctgagtaataacaatcataaaaatgaataatgagagaaaatgcatttggggagttgtggcatgagaaagcccatcagaggtagagactcttggtagtcaaacagtaggcttttcccctgcaagaagtttgtgaattccgtccacacctagtcccccacaacactgtgtttcttggccttggaggctctgcccttcatggaggacccctcctcagcttccaagggctcaccttgtcccggagctcttcaatggtcttgtagtaggggctgtagtcccgctcagggctagctgggctctgcttcaggtgccagtcacggatcttcacctccaggtcagcgttggcctcctccagggcgcgcaccttctccaggtaggaagccaggcggtcgttgaggttctgcatggtgatcttctcattgccagtgaggaggccgccatcacaagcaccaaagtcaacaaagccaccagcaaaacccccaccaaagccacctccaaggccacctccatagccacctccaaggccacctccatagccacctccaaagccactaccagcccctccaccaaaaccacagctcacgccgcctccatagcccccagctgatcccccggacacaaaccgagttgaacaggtagagacaccacggcctcctcccagctggcaagagccacccccgaaaccacctccatagctggcagaggagctctgcaggcggaggctcatggtgagagcaggattgagagcaggtgcagatagaagcttgcttggcctgggccgaggactgtggctcttccccagagtggacaccttttatacacctccataggggctggttatcttctctcctcccttccccaccctctgacttggtgccaactacacttctgtttcccacaagcttagttatctctgatctctccagggtgggttgtgccttttgggggtggctttttttttaatccttaacaaaaagaatgattcagaggggacagcattctgcctgagactgcccttttgacaagtgaattctgtttcacctccacttaaggagttcactgtgcaggctctgagccccacccagtattagaacgggacctgagatgcggaggcctgccaggagcttctgcgaggaaagtggtgggtgcagagtggctctgtgctttgcaaggtcaccgtagccctcgaccttccttttttctatacctaaaacttctgactgggatgtcctggatccttcttagcacttcatctactccaggggccccagcaactctgatgacaaactttgcttggttcgatagaatcacctgccttgaaagtatttagactgagaaagaaatagctccgaggccatcagaaaaagtcacagtgacagagaccttaagggatcttagggaccatcagacacagctgtggaaactcaggcatggaaagaggaagtggccctgtccattatcatagcgaatattctccgagccctcaccataggcaggaactgggtgaagttactttacactcatcatctcatttaaccttcacagcagccacaggaggagggtcctactattgcccccatttacacatgaggaaaatgaaccttaagggcagaatcaggactgaaatccaagtctggttctgtctgacgctaaggtgcattttttaggtacatttttcatacagtaaaatgtatagatcacgtgtccagcttgatgtcacgcatgggtatgcacgacctgtgtaaacaccacccaggacattcccagcattccataaaggtccttgtaccttttcccagtcaattacctgactccacacccctggtgtaaccactcttccaacttctgtccccatagacaagttcagaggtcctcagctagaggctgctttgctctccaggggacgtttgacaatgtctaggaacattttggttgtcacaacttgggggcactactgatagctaaacaccaggtatgctgctaaacatcctataaggtgcaggactgtccccacagcaaagaattatcagacccaaaatatcaatagtgttgaggttgagatgcctgggtcagtctggccctcgggttgaatcactccattacgctgactgctttagggcacagtcacatccaggaagacggccctgtaataatgtgagcagggtcctttctagtacgccagtcatatgaggtctgtcccagccaagaggccacataagaggatgtgacacaggacccagggccagggtctcagcttaggatcctgagatgtggctgagaaactcagggactatgtaagaaccctgccagagggagcttccccattcaggctgggagaaaaggacctcagatggcatctgtgaggccaggatagaaggtcctccattccagggctgacaatggaggaccctgaatgcagactcccaggccccactcaccaaggggccagggttgctgtggatggcatcttgggagcagctttctggcccacagcagccacaaaggtctggatgataccaggccaggggctgggtggggtggcacaggcatgaggttctcctggaacccccttcactgattcagcaagatcagaaaggagaaatctgagtcagggctttctgggcctttgttttctggggtagagaagcgggcctgtgcttcccgcaggggtatcagcagggacagagccagggcacgttgccagtgttctaacagccttgcgaggccagggattcaggctaacccctgaccctgcccggccctcctgcccaagctgatggctcagctctct

SEQ ID NO: 1244188 - DNA, 4001 bp, Homo sapiens
gttctatttgggaaacactgctccaaaaatgccctactctggggacactggatgttctggcccaccatttcaaactcacttggtgcggaagtcatccgcggccagacgggcattgtcaatctgcagaaggacattggcattgtccactgtggctgtgagaatctgcaggatggaaaaggcacaggtaatttgtcaaatggacttcacaagctggacttcactgtagcctacattaagctcttgcttcatgttcttgcctgaatcccccttttcccccacaaaacttgaccatagcagcccaaaggaaaacagatgccccaggcctgtcctaagactttgctaactcatggtcaacagagggggtagatgcagccccgggcttagaatcgaaagcccaggagttctggtcccaattctgccagtgtcttgctgcaaaacctaatgggtcttggggcttcaagttccccacctccaggtgaggagaataatctgaggctccctagccctccttcctgagctgacctctcttctgtctgcatcagccagccctgccagtcctctgcagatatgcacattccttttcaagctcacaggccatgggacttcaagtggaactttctcaagagataaaacccaactaacacaggggattagaaaagaggactcaggggaagaataagaagatatattggcccctgagtctggttggatttccccacctcatcattgaatttccctaatccatgcaagtcattagagcccaacagactccagcagggagggctcccaagtaatgtgggagcagggaggagggggctagagtcagggcacaagcctgccaggctctctctgtgcagggcacatcaagggaccacactaattgtctctgcaggctctccatgcccgcctggctgtggggagggaccagcctgtaccaaggcttatgggcggcggcagccacagcccagactagtgagctaatgagtggtttggatgtcttgcctggtcccgttagagcctcactcctcccctgtgctggagaacaagtagctgcctcctgtgctggaaggtagggcacaagggccccagccttggctctgccattaatttgctatgtgacctgcagctggtcacagcacctctcgaagcttcaactgcttcctctaaaaaatgtaaggataggaatcactgatctcacatggtctgaggatttgagatcagaaggggatgaggaggctggggaagggaaagcatcttctcactgatcagtcttagggcatccaagacctcgaaagaagggatctggggtggactctgtcctatagagaaatcttaaggtctcaggggcctggggcatgaattgttcccagaaggagctagctggaatggtgccttctgctgcccattcacccaccttgttcctcaggtcctcaatggtcttgaagtagggactgtagtctttgatctcagcaggccgctgcctctggtaccagtcacggatcttcacttccaggtcggcgttggcctcctccagagcacgcaccttgtccaggtaggaggccaggcggtcattgaggttctgcatggtcaccttctcactgcccaccagaagcccatcaccaccagcaaagccaccaccaaagccaccacccaagccagcaccaaggccaccaccatatcctcccccaaagccactaccaaagctgctgctgctgctgctgaagccaccgccatagccgccccccagcccgcaggctcccccagaggagaagcgggaggatgagacagacaggccgcccccgtaggtgctgggggcgcggcaggaccctccggccaggacggaggagatgcggctggagccgcccccgatgccgcccccgatgccgcaggagcccttcatggagctggaggaggtgaactggcggctgcaggtggtcatggtgcagaggagggaggtgagcgagcgagcagttggctgagtgaagagaaggtgctcgggtaaattggaaagggatgcgagtgctttatactcgtgggtagggggcgggtctggcactttccattccccttggctttcatcacccacaggctagcgccaactcccagccaggtccctcctctcatccgcctcatcatgtctgtcatattttactggaaactcattgtttggagtgttttgggctttcttgtcccgccaggcgtgattcacagggggaggtgtgggcctgcaggctacactttcccatcggaccctgggagtcccagccctcaggaacccgcgcactgggcttagccagggtgacagagagcagggcctctgcaccttaaacctagttacctgctagctctccatgaactgaatgggcctttaacatccacgtagaggaagcctgctgctgcaggggatggatacccggctggaaagcaccggcatggcaaggtcaccttgggcacagacaggcctccctcaccatgaccctctattagagacaaggaggtctggggggccctcccaggcctgacctcccatgctgtgctgagaagtctgtcccatccctgaaatacacccagctagtcaggtgtatcgtggttcccaccccaacatccccatcaaagagaaatccaggcagctctccccagccctgagcacagaccctaatctcctccctatggtgaggatctcacatccaccacaccatagggcaggtggcctcatggaggccaggaaacagcctggagtcaggtgggtcctggctctgccatttacgcctctgtgacccagggcttggcacttctctgagcctcagtgttctcatctgcaaagtgggagtcataccatctattctgcttagtgcagtcagctctgagaatccaatgcgacaatgtatgtgaaagggttttgtaaaccgagtatggcaagaagcctcgttggcattgttatagcccaggcttagccccaaagtggctggagctgcatccaggaacaggcctaggggggccttttattcttccagccccagatatcttctcagacccccagaacatccctagtgtgggcagctcaggcgccctcgtttgagccccttgtggaactggcccaggagatgttctggggaggagtagaggctggagtggagctgggctgtgccaagggcaaggctgaggtggacacgagggtccctgactcctgaagccccaagggtcaggggacatttctaggagtccacttggtcctgctttggaggtgtgtatatcaaaacttcagcaatctcccagacaacctcccaaagcaaacccttccggcccccaccccaccctcccatcagcccctaggctccacagaccccggcaggcatgttgagaggaatgtgatcgtgtctggggctgcctgacgcatcctatctcctcagacaggccccaacagcccctgctggaggctccaatgctcttcctgggatcaactgctcctagaagagaagcaggaccctctgtcacccccaaccccaccttgactgtcaccaaagaagaagccagagaagggagccccccactactgtggcctaggagcttggaagacaatgctgagacagacatctgagctgtgggctccccaaatctgccagcaaaggactctcaaggatgtgagtaagccagggccccaccccgctccacccgcccctgacagacactcctaatctccctgcagagaatggtccccccaccctggcccagccctacaatttccccagagagaggcaacaggggttttggctgagggacagatgcttttgttgggaggcatgttgctgttggctgtggggcaaggggaggctgtgctcactggagaaaaatgctgtgtccagagggatctgggagcgggaatggggtgcagagcccagtaccggcttcctctgtgccccaccacccccacccaccaccaccaccaccatgtctccttcttatgcagggatcaggaatagaagctccggagcccgggacat

SEQ ID NO: 1244189 - DNA, 4001 bp, Homo sapiens
agagccaggagaaggccaagtaaagtgggcaatgcaggaagaggagagagacgggggagcgcacttgagcctgaagtcgtccgcagccagcctggcattgtcgatctccaggatgacccgggagttgtcgatggtggtggccatgatctgcaggagacagagtcggtgtctagaggactcctctctctcccctgctgctctctgctctgcacccaaggccagcccctcattgaaaatcacccctcactgacaatcacccctctgacaccaccaacaaaaatctgtacggcttctggggtgggcaaagtccagcctcactttcagtgtccatttcttgttttgtcccatccagcctccttgagacacctgaggagctgccttccttatctccagggcacgaaagaccaaggaggcagtattgcctgtgggaattggttgcccaggagagtggggcagtggggtgcagccagctctgacaatagctctctcagagacactccaccagccccactgtggacaactcatggtcactgcctcctgcacaccttggacacagccatggatctacagaacattccagccagtagcaacctggagggcagttaagaaggcattttacgaatgaggaacccagtcttagggagtaaaatggtgagtgagtgggtggcagaatgtgtaatgagttcccaggtctcctaagacccaacagtacttttggcacaaaagacctctttataggaaaagacaagaggttctagcatctggaactcatgaggccacactccaatcccattcttgcaaaagaggtaaaggaatactttatgcagaagcctgcagggtgcatgaggtagggagggcgagttgctctttttttttaattatttttatttaattagatacaggttccactctgtcacctaggccggagtgcagtggcacagtcatagctcactgcagcctctaaatcctggacacgagcaatcctatcaccttggccccccaaagcactgggattacaggtgtgagctactgcctctggctctttataattgcccccacctgtgcccctgttggtcctaaccagattcccaagacccctctctccctcccccagcaccaccaagttgagaagatgtgcactggcctctgcacctggacagcaggtgcattccaaatttgctgagattacataccagacagtcattgcctgggcaggaaaggatttccttgagtcagcagtaacactgacattagagctgtgtacagggtaccagccacctgctcccctctctttgacatccgaggactcaccttgtcccggagctcttcaatggtcttgaagtattggctgtagtcgcattctgggctggttggggtctgcttctggtaccagtcatggatcttcacctccaggtcagcattggcctcctccagggcacgtaccttgtccaggtaggaggccaggcggtcattgaggttctgcatggtaattttctcattgccagagaggagaccaccatcgccaccaccaaagccaccaccaaaacccccaccaacgccccctccaaagcctccaccgaaaacactaccagcccctccaccaaagccacagaccctcatgccacccccatatcctcctcctgaccctgaagagacaaacctagcagaagaagctgagatacttcggcttccacctcccccagagagactccccccaccaaagccacctcccccagccaggagggaaccccctcgggttgagccacccccaaaggtggaggaagaagtttgcagaaatgtggtggtcatggccaggtagctggagcccgtgagttctcagcaaacccaagagatgctggcaggaggtaccaggccaggctgcacgctggggctccttatatacccttcagagggtgttgtgggacctcgtctcctcccctaaagcaaagccaactccttctgccttcctgacaaacacagctgcctgcacaccttgagtgggtcatgtgaagtttttctcttctatttttttttaatgcaacaaaagagatgattcagaattaatagtgtttttccccagggcacggttttaacacttggattacaggttcatctctccatgccagaagagagcagcagggagcgaactctcatcacagcacagctaccaaggcctctgcctgtactgagagcagctcaggccaactgtgccctcagctggacttcacttccccgagccctgagcctctccccaagaggacagctccgtgttcttagtttgggagtccactggccgatcattatgctgtgttatccaactcaaaaccctgtgagtgagtgagtgagtgaatgagtgagtgagtgagtgagtgagagactgcagggctcagggagagtggaggccctggggatgggaatgcagggcccctgggggcaggtggaggacaggagccagggaccttgagtagtgttccagctgaggtgaccagaggagccagcatccatccccttacctggtgctgcagatggactcccctcctcccacctctactcccctcctgccatcctccagcctgtgttcctggcaccctcacaaaagcccagcaggcttgggactgacaaggggatgactgatgatcccgacacctgccaactgcacggcgctgaacctttgctcgtttctgggatgtgttggggcaaacctccgctgataaggctggggcaagttccaggaagcccctgccttctccaggagaggcatgtcgctgcttagcagggccagattagcccccatctgtcctgtcaagtgctggctggggacgggccgctgcagaaggctctatgtgcctgaatgctgtggaagggaagagaagggagactggcaggcaggctggaagacaccggagatcttgaagaccaaggcattgcttcacacagacggggagttgaacactcaggagagcccttttctctgccaccagctcagggacacctttccagggacacctgatacctgtgggcagtgccacttggaggtgtggctcagccctctggacctggccccagggcttacagaaactcaggaggaggattcctagcccaggttgcagcatggtgaagtggacagggctctggagtccctcaggcccgggtttgaatcctggctttatcaattatcatggtaagactgtgaggcctgggttcaaatcctgaccctaccaattaccatggtaagactgtggacatttacctttttaagtctctgtttccctgtggcaaggggcgctctcaactctcacttccagggaagccctgtggcccaagagcccccatcctgccccctcctggatccccacccaggtgccagacatgcaggggccagggtgcatgaccggcacctgcgcctgagtgccctcaccaggaggggctttgtcgttgggcatcagaacatgccctgtgagcctgagcatgttcttaggctcaacggcatcgaccttccatagccagctcctatggggcaacgcaggttgttcttaggttcttattttgctataatagcataatcctttacttctaccctgcactttgtgatttacaaagcacttttgcatccatcacctcctctcatcctcacaacagagggtgacccccacccaagattcagaaagaatgaaattgaaacttggagaggtgaagcaacttgtgccaggtggcaccactggtaaggggcaaagccaggactcaaacaggtcctcacaccctcaaccaaacagggcacagggaaagagtccttcctgcagaccccaaattcctgcatctgagctgggctggcaaggggaactgccagccagcaaggctgggggtgggttccttctcatccatcttcgcagtgagcctggcctccaatgctgggcacagacagtgtggtattgtctcatgggtgggagggtattgtcttttcctccgaaagaaaaataatcaaactcagatcatccagagct

SEQ ID NO: 1244190 - DNA, 4001 bp, Homo sapiens
ctgctgctgtgctgggtccttcataccatgctgagctgggactgcagctcaatctccaggccctggagcaccctccggagctccgtcacctcactgcggctgctctgtaccagttcgctgttggaggccacttctttgttcagctcctcggtctgaggcaggaaagcagagtgaaaggtgaggctctcccaaagcccccagctgggaagtgctgcaggctcactgcgggcccgagccccaccttgctcaggaaccaggtctcagcgtctctgcggtttttctctgccatctgctcgtactggtcacgcatctcattcaggatgcggctcaggtccacgccaggtgcagcatccatctccacgttcacatctccgccggtctgacctctcagagcaagcatctcctgggaagggatggcaggaggcggtcagttcagcagacttctctcctggccctgggtgcatctggcaaccccaccaaaccagcctcccaccccggaagccagcagcgaccgtacctcctcgtggttcttcctcaggtaggccagctcctccttcaggccttcgatctgcatctccaggtcagtcctggccagggtcagctcatccaacacccggcgcaggccattgacgtcggcctccacagtctgccgcagggccagttcatgctcatacctggcaggacagaggtcaggtcctcaggctgcagccctgaggattctgaggctcggggtctgctggccctgctgggtggaccgccccactctttgtcccttgccctctgcccccagcccaccatgctggctgctcacttggtcctgaagtcatcggctgccagcctggcattgtcaatctgcaaaatgggctgcgcattctcaatggtggccgcaatgatctggagtggggatggaggacaggagccctggtcagccaaggaccttactacttgagcatgaaaggcagaaaggggcaaaaggaaccgccccaaatctggaagtcttctggctggcagggctggcatgccttctccaccagctcaggctacgtagggatgcactccatcccgatcacccccttcctgggcccaaggcagggaagctgaacttgcagctgaacccttgaaggaaataagagatttagggtaacagccccagtccgggcacagagatactgaaaagggaccctctgctaccacttccctgggtgatcctggccactccccaaaggtgcccagtctccctgtttgtaaagtgtaattgctaaaaagaggtatcccaagggccactgtagccccagcctctctcagtgctccatacaccaaagtcacccaccttgttcctcaggtcctcgatggtcttgaagtagggactgtagtctttgatctcactgggccgctgcctctggtaccagtcacggatcttcacttccaggtcggcgttggcctcctccagagcacgcaccttgtccaggtaggaggccaggcggtcattgaggttctgcatggtcaccttctcactgcccaccagaagcccatcaccaccagcaaaaccaccaccaaagccagcacccaagccaccaccgaagccagcaccaaggccaccaccatatcctcccccgaagccactaccaaagctgctgctgctgctgaagccaccgccatagccgccccccagcccgcaggctcccccagaggagaagcgagaggagacagacaggccgcccccgtaggtgctgggggcacggcaggaccctccggccaggacggaggagatgcggctggagccgcccccgatgccgcctccgatgccgcaggagcccttcatggagctggaggaggtgaactggcggctgcaggtggtcatggtgccaaggagggaggtgagcgagtgagcagttggctgaaagaaggaaaggtgctcaggaaggctgagagcgtgctgtggctgcctccaaccccagagacctttatatgcagctggggaaggcggggccctcctaactgctgactccaggttcccctctggatttcatcactcccggtcccgtccaactcctcactctggattattcagcccaggatcaactctgctgtgtgccggctcagagttcccacccagctttgggggtgtggggccgagagaaaaacacagaaatgcgagttcggtggtgactcaggctaggcggtggggaatcaggctccctttcctggagccctcggggccagtcgggccttggcacaggtggctttgtggcaactgcgtccccaggcagtgagtcagcccttcagaagaactccctgccccacagtgacagccttggctgaaagagagctcagtgatgccatcctgggctgtcttggggagcagttgtggggatcccacatgtcccactctgggcaggggcagagttcctgtcttcactctgcttgctgtgtggcctgaggctccccacctcccacctctgggcctgtttcccctcagtgaccaggctggactgggtgactgcagagtcccttctgttctaaaaatcctataactctctttcccctcttggatctaattccagttccagaggctgccttgagcccccgggatctccagaagtgtgtgcaccatacaaacagcactggccatggagctagacaggcggcactgagtccctgctctgcccttaccaactgtacagcacaggctggtcctatagccccttggtcctcagttttctcatctgtaaaaggggatgacacaccactagccacaaagaaacatgcgcgaaggaccccaccggcccttccccgagggccagccctgcccctcagcctccccatcctgcccctccagccacctgctcctcacactcacctctacacactggcaccatcccgcacccctaagcagggccctgcgccccccacactcccagctgaagaacaccacagccccacacctagctctgccactcctctaccgccctctcctaatcacaggcaccccacctgcaggctggtgggagggagccccatcctgccactacagccaggtatgacccctgaccccacctgggcctcagagtccccccctaccctgtagaaacaggactagccggggatccgttcccagcagttctctctcctgtgtccacagatcccaggctaggcctggcagctccattcatccagctgagctgggggagagcactggttatgggcccactcaggcatgcatggagagcccagtgtgtgccatacagttctgtgagcgtagagattcactcaaagtcactctgctttaagctgcagagctgcaactagaacccagaactctggccctctccaggctcccaccatgcctgcaggcggggccagtatacccaactctcacccacctccccacgatcactggcaggaggtctgcccatggtgggcatggccttggcctgagagcctggtccagcaccgaggactggagggaggatggaggggtctgggcaccaagacggggcctcctcagggtgctgtggggcatccctcggtgctggccactggccttgctctgcagtgtctctgttgaggtgaggagcccagagacagcctgcttctgcctgagctccactggggcaggcaattccttgtctcagcagaaccagggttttgtcactgctacatctcccctggtcattcatcccagaggtaagagcagaacggatgcacatcccttcagagtcaaacctgggagagggaacctgacactcctcacccctaccccaaaaaggggcaaaggggaccccggaatcttggacaaaaacctcagtgttcaggtgtcaggttgggcctggagttctggtccatccacagacccatcaccctcagaactgaaaatggtcttcaaggtcaccaaaggctattaataccccaactggagagagcgaaagccttatccaggttaagcagcacaaaagtgagagagcagagactcgagccagctctaactcccaagccaggat

SEQ ID NO: 1244191 - DNA, 4001 bp, Homo sapiens
tcgagtggaaacgaattccagccccgggaccccgggaccatcacagggccagatcccacgcccaccagcttccttacttctctctgcctcccgcctcccgcctcccctccttctcttctattccctgcctaagctcagcaaccttcagaactggctgccttcactgcatcctggactaaggagtggggctcctaggactgccccaccctgagctcctgggccttgccacaagcaaccaaggaatcctggggtcaggaggggtaccctgagatcctccgccagctggcccaggctgcccaaggccacagctaggactcacttggtgcggaagtcatcagcagccagacgggcattgtcaatctgtagcaggatgttggcattgtccacggtggctgtgaggatctgaggagaagggagagtagtcaggtcattggatgggggtggctgagcccacaccagggttctgagcagatcttcctgcctcagggcctctcttctcgcccagcccctcccttgccccgtgctgtattattggcagaggaggggcaaacaggagtctgaagggctgaaaggtgcctcttcttcccccgatactcagtaccccaccagacccccatggcaggctcggccttaaaggagaagagacagctggctgggagtatgaggcaaccagaaaagaatgggaaaatgtccccagggcagaagctgtcccagaattctagaacaagggaggggatgtgggcaaccccctcgttttacagtcagctagagggtgcccctgacaggctcccccaaaaggaggctaaaggagccctcattaaagagtggttccaaatcaaaagtcaggacccctcctaatccctaaccctgggcgccagccagcagccccgccccctggggtttgctgagcccgtcttaagggacagcaggaggaaaggagaagccagaaaaatccccaaataaggcacatcagaggccttccccacactgaggtcccgccccctcctttctgcctcctcctgcagcaggtgctatcaggagctcactcagacacccccactccacatcacccaaaaccccctcctgttgacccctgctccaaaggagcaagacaccacacatccagcagcccacgggcccagccctccatctgcatcctcctgcctcatcctacaacctctccaggtggcggagctccacgagggagaaactgaggctccaaggggctccacaaggcctctttgttcctgactcagcttgctgtccccagaaaagggggatgtgagccacacaggggccccaaggcaggttcccagaagctaagccacagccaaaccacccttggctccctgagaccctatggctggactccaggcctttggccaaggcaggagttggggggaagaagtcatgccccccggagacccctcccaccagcaggccctaccttgttctgcagctcctcaattgtcctgtagtactggctgtagtcacgggcgggccccggggcctgcctctggtaccagtcacggatcttcacctccagctcagtgttggcctcctccagggcacgcaccttgtccaggtaggaggccaggcggtcattgaggttctgcatggtggccttctcacctccagccagcagcccatcaacacccccaaagctgctgccatagccaccaccagagccaaagctgtagcagctggagtagctgctacccccgagggtgctgcccaggccgccagcagatcccagcctgcaggagccggcacccaggccgccagacagccggcaggaggtgcgggacgagccgccccccaggccggaggagcccttgatggagctggaggaggtgaactggcggatggaggtggtcatggtggcggcggcaggaggcaggcacacaggagaagggctggagaggagaggggccccaagttgtgtagggctgccggggttcgcccgcttcctttataggccaccaagtgggcgtagcgattacaacaggcttgctcctctgtttccattcccctgggctttcatcaccactggccacctgccagctcccaggtggctgggggccccctccccgcccatcatcaggaatttgcctcatttctccaaatcctcgtgctgagtgccgtgcgtgtgcgtgcctctggtctcaggcccgtcacctgtgattcaggcgggccctccagctatgctttcccatgacctaatacggagaagaggagaaggcaggacgtcaccgtccccaggccctcccaggcagccaccaccccagcctggcccgcctcaaccctgtctggtggggaaatgggttgcagtgtcagctgacccccccgccaaagttgctgtctttcaccccacactgctccacccacggtgctggccccggggctgggtgctgaagagaaagaggagaccgagagcctatcctgccttggaaactgagcccaaacccaccaggcccacctcacagcatagaaatgccatcaagcctcggagaccaacccacatcacagataaagaaattggggctccagaggggtgccgtgtccacactggccccttctgcagagcctgacacccaggaatgcactctaggggctacagttccatccagtcagcttctgaccctgccccatccctagaaatccttgctaacccagtctcttcgtgtaaacctttccccaggtttacactccaggctggggtgggcaaacaggggctcagctataggatggggaaatggtgggctgtgccaactgagagggggatgcccccttccactcccctcacccttctgtaccccaagagacctcagggtcaggtgacgggtatttatctcaggtctcagcccacaggaaacctaaaggacattgcccaagaagaggctcttacagagaccccagccagcccccttcccactccaggctccccaagatgtggctcctcaggtgggccatgtgccccaccccacagccccaccctgccctgcccaccaccccaagcccggccctgggtcccagggtcccgccaggcccgctgggtggaatgtggtcatgtttcagactgccgatggcttccacttcccagacaggcccagacggccccgccagcagccgagagacattcctcaatagcccagtggctgccaagccaccaaagcaaacaggatgccccctacgcgtacacgcacagcggccaccccgccccacacacaccccgagctggggcagagccggtctggtttcctgggctggctgcgtcactgccatgccctctcactcatcaatgccatggaccactccttcagaagcccctccccaccaagcccctctccttctgctcttgaacccgccctgggctgaggcagggagtgctccccaacaggcaccatccttggaaagtctgtgtggccctcccagggaccagccacaggtgacagggactcaggggctgattcttagaaacttttcccaatacaaggggctgtcccatccctccacccttaatctttccgcctcctcccctctcatctttccaggagccccaggcctggatggagtgggcagaacagattggcaggtgacaagcccatacccaaacactcaataaactccacctcccccagtccctcagcccacactgccccaaaccaatgagcagatcagatcacacgaggcattgaacttggagcaaagctttaatagtaggcactggacaaacccaggaggcctcctcagtgaggggctgcagaaagtagatacagaaagacaacaggccatgcaccggggcccagacggacactcggggcgtggcagtagcatgctgggagctggagctgatggctgtgccgtggccctcgaggtggggctgtcgcagacagaaaggggtctcagtgggtggagaagtggacctgctcacagaagaagaccacctctccaacctggacttcctccacgatggcacacctggtggctggtcactgtgg

SEQ ID NO: 1244192 - DNA, 4001 bp, Homo sapiens
acacagaggtgagaaaaagaatgcgtaagggtgcgtagtaaaatgtacttattgtcgcaatttttttttttttttgatacagggtctcgctgtgttgccccaggctggagtgcagtggcactgatcacgtacagctcgctgcaaggcacacgccaccatgccaagctaattcctttttttttttttttttttttttttttgagacggactctcgctctgtggccgagactgaagtgcaatggcgcaatctcggctcactgcagcctccgcctcttgggttccagcaattctcctgcctcagcctcccaggtagctgggattacaggcatgcaccaccacgcccagctaatttttgtatttttagtagagacaggattttaccatgtttgccaggctgatctcgaactcctggggctcaagcaatcctcccaccttggccacccaaagtgctggggttacaggcgtgagccacagtgcccagcccctgtaggtcacaattttacaagtgtgtaaagcactgtttttgttggctgttgacatctctagcgcttcctcctggtctgtgggtctgggtctatgccacgagtacagcactggaaaatattttggggatctgtttgttgggagacccagcgtgtgcggctgtaaatgttccatggcttctgatacatttctttacgactcgaaaaatttctccttccctctgggtggagaccaagccctacccctcaggccccttagggttcccctgtaagagcgtgtgacgcagatccgttctttccccgacaaggagctgccactgtactgggtcctccccagcagaggtttaccaagcctccctcctttaccccgcccaggggccacgaccggctctcccattcttcctaaacgaatgggccccagggcgggagagtgggaggaggccaaagcctgagagggatgaacactagacccttccggccagagaaacggaatgcaggaggccctacgctgcggtggcagagggggcaagactggccccgggtggaccagatcaccaaagccaaactctcgcatcttcctgcggcagcgcggcccctggcctagacctctgggcactctacagccgggtcccatctcctcccactcttcaggcctcgctgacccgcgtcccttcttcgtcccggggctccaaccttgcccccgccacctccagaggccccacccacttatctgccctgcccagttctcctcccctttccaccaccccggcctctgcatccagccccgaggtcctgccccgcacgtctcctgtccccctttactcggccccacctgtggaccttcccacgtcctaacgggctcctgcccgccgccccgcctggaacctcgcccggcccgcggggctgggtttccgcggcaggtgcactgcacttcccgcggccgggcctccgcccaccttgtcccgcaggtcctggatggtcgtgtagtagtggctgtagtcgcgggagggcccaggcccctgcttctggtaccagtcgcggatcttcacctctagctcgccgttggccgcctccagggcgcgcaccttgtccaggtaggaggccaggcggtcgttgaggttctgcatggttagcttctcgttgcccgccagcagcccgtcggacgcggtcaggacgccgccgtagccgccgccgtaggcccccgaggaggacgaggacacaaagcgggcggaggacacggatacgccgcggccgccggagcccccgtgaatgctgggcgcgcgaaaggcgacccccggcccaaaacgcacggagccgccgcccaggcctccgaaggacgacgtggccgacgactggcgatagctgtaggaagtcatggcgaggcggagcacggacggagcaaccctggtctcagaagctgcgattcgcgggaggagcggcgaggccctcacctggcgccttttatgcccgcggccggtggaggggggaagggaggaatggtgtcaggggcggatatctgagccctgaggaatttgcaggctcctgagagcaaatatgggctctctccccattggtcaattccctcccctcccagagaccagaggcccctgccctccagaggtgccccgccccggtccgcgcagaagctccgacccgcactcccccactctctctctgcagaccctgttctggcctttcccccgtcagggacatacctggacacccctgtccctggaagccacattctgagcctcaccctttaagatcacccagagtttgacaccactgggaattacagtccctctggggtcatattcctacacacccctgacccagtgattttgtttttgtttttttggagacgagtctctgtcgcccagactggagtgcagtggtgtgatctcggcccactgcagcctccatctcccgggttcaagcgattctcctgcctcagcctccggagtagctgggattacaggcacgcgccaccacgcccagctaatttttgtatttttagtagagacagggtttcaccatgttgaccaggctggtctcaaactcctgacctcaagtgatccacccgcctgggccgcccaaagtgctgggattacaggcgtgagcccctgcgcccagccccagtgattaaccattcagagtgctccctgttaagagccccttgcttgcgatcctaaccagcccgccccccacaaagtgcattcacagattcctgccctccactggagattacagcctctcagaaccagcttcttgggaacacccatgcccaactccccttttgtcccctctgacaaaggcaccagttccggatcagggcacatccgggcattttgagctgcacgaacccagccctctcaagacaaagctgcctcaccctgctgtcgccattcagtgccccaggtgacaacagtctcctgagaacagctgcagggagcggttctggcagctgacacctttccaacactaagctccagcctgatcctcactctggaaccctcaaagcccactcgtccctggccaccaggatgatcccctcccttccatcccccaaagcatgcgttcattcaaccacaggagtattgggctgctttaatatttccaaaatgaggaagcagagcctgggagaggccagtaacttgcccatgaggcatttagcatctgccactgaaaggcaaacataggatgaatccctgccctccttgtcagagggctgctgaatgcatgtcctcatccttgtataaagatgagtgcttgaatgagctgggcagagcgacacaaagtgcccggcacaaggtaaaggttttgacaatagaggcagggccttcctccccacacagccccaccccttgctctgttcaacaattccacccaccgttttggatctctttggagggccatgccccctgccaggcactacagggcgctgcaacaacctcaccccagttcctgtccccagtgacccccgtccccagaactgtccccatggttccttcttgtccttatggcaaagcattcacccaggcttggaacagaggccctcctgagaaggtattaagggagacaggccagtccctgcccatctctgggtctcagttttccctcatgaaaagaggggtggcccagctcagccctcttctctgtgtattatcacctgggtcacctgtgactggtggagacttgtctccagcctcggaaacctaagttcccagcaaactacctgttagctgccaactcatccttgaactggggcaggaaaccccgtaaatacacacccctaacccaccaggaaccgctctgagccctcaggaaggccagtctgaggctgtttaactagtgaatcagttgcagaaagactgaaggtctttggagagcccaagagggagaaaggggagtccaagaccagccataaaagccagcaccctgtgactggtcagctctgagtcattcccttatcaggcactgatgaggaggcctgctccttgttagcgggaagggagattg

SEQ ID NO: 1244193 - DNA, 4001 bp, Homo sapiens
tcatcacaccttattgagtgccttgcctttgatgtttctacttaggacatttcttttagcccctgtggtctggtgaactcccattcctccctcatgtctcaggttcgacaacattgcttcataggagccttcacagatgctctcaaaactgaactggatgatctgcctgtgctctcattatccctctgtgtgctggtccctctgtccatccctgtatcctcataaatcatattgtgtccaccataatattcctcagtccccagcatggtgcccagcacctagttagtgttcattcagtattggctgaatgaaagaacatgatgcatgaaagaacgaaatgcatgatggaggcatatagatgaaaaatctacttgcagaagatgttacaatgacatttctctttcaatggacccagttttggagagggctgcttcctatggttgggactgtccagctcaatgggacggatggcctgtgcctgtgtatttcagatgaaccaaactagagtcagaaacacgagacaggtgtggttcgaacatttttagtgagagcttgcgaaggatgaactttattccggaagggctatttaaatgccattgcttcacatgcccatagtttctaaaattccaaagtaacttcccatggagtccgaatcaaattgccctgatgtttagtacaactcaagaaaaacagacttgctggtaagtaaatgcgctttgctctaaaggagtatgaatcttaacacaaattacagtgaacacttttcttaattagataagaactttaatttgaagcaagtgctctgtgtcatatctgaaattttcaattaggagcaaagtcttctgcttttattccatgaaactgataaaatacagagctccaccctttttttgatgacataggaggaggttgtgatatgattgtaataaacatgaattgggggcaatagaacattttattactgtagaagtagtttctgaactgcttgatgctgatggtcatgttattaaacagggcacttaaaaatccaggcatcattaagacccatattcctgccacactgtttccacccagaatcactttgctatttaaatctgcagtacagtattctaatagtcatattataacatttacttaaataaaaggagaaaagtctttgaatttactggggtttcaaaacttgataaggactaggtgaaaaactaagagagatttatcacgtaattaatttttagctcttttcagaaagattgttcactatacatttagccctgatgtgataagctgtgacaaagattcattttattccggaggataaaatgttcatattttgtatgtaattgtgttaaacattaaaaatagcatgatttaaggtcatcctgttgtacagtcaggtactccagcactaaaggtagatgaaagaatttttatagatgtaacattttagcctaatttgctttacaaagtccatttggacctacctaacatagataacctcttgatttatcttgaagctaaacacagagtaggaaacacaagcatcatctctcacctgacttcgcagctcttcaatttgtctgtaatatgcactgtagtcgcgaccagccctcggggcgttggtttcgtaccactgcttgatttgcacttcaagtttggagttggactgctccagggtccgcaccttttctaggtagctcgctagacggtcatttaggttctgcatggccattttctcattgccaacaaacaggtccccgccgcctgtgagatcgctcccatagttcaccgtgtgtctggagttggagatgcggatgccccggcctccagcacccccataaacgctgggtgtcgtcccgaggcgctgcatgcccactgtactgactacaggggcctgcaaggaggagctcaggcttctgtggaagcttctgcgactgaaatccattggagattccaggagggagcacctgtagcttcaggatggttggggcagagtgtgtctcatggagggtgttgagctagccttttatgaagtccacaggcaagaaactcctcctctgctgacatgtcactaggattggcaccacagtccaccttgccttacttccacgccccccgctttgtatagcaatatgttaatatgcttaattcaattccagaaaataccactagaggcatttcttggaggcttttatcaggggcaacttttttttttttttaattaaacaggtaataaaaggaaacaggaaagtgtattcttttagcccatgcgcctgccttggcaggtttttttcatcctaacatacacacaaagaatatttacaatcctcatgtataatttaggtatctaaaaaggcagatgtgcctacataactgaaagtcacaatggagataaaggacaatgtttgatttgtattgaggagttgctcttcagaacctctgtttcatgctttgcttgtgtttggcttttaagtttattgtgttttggacatcttattttataagactattaaaatattttgtacaaacacaaaacctcgaatccctaaaccaggaatgaaaccattgtacatttggagatgtagtttggggatgtgaattaaatgaatttagctgagtgatggattagatgatttgggaggttattttctttctatttctaatgttctatgactaaatattgcattttaggtttccagtcaccacctggcttcaagtcctgttaccaagacacttagaataaatcacacagtgctttgtacctggcatggtatcaggatgggtctcctcttttgtatgaggccagcttaacacccaccatgagacagactctgccccatccatcctgaagctacttacaggtgctccttctaaagtccccagtggatttcagttgcagaagcttccatggaagcctgatcttccttgtatgcccccataatcacagcgagagtggctgtttatataggaaggggtgcaggcggggacttgggactacactcagcttccagggttgggctggaggcagctgcttgtgtgtggacctctagacacatgggcatgatctcatcggtgggaatctgattgtaagcaaccaataaatgcctgagtcacttgcttcccttcattcaaaccccctggctgagaattcacacttcccatgaagcatgtaaatcacttccttagttaattagataatcactaattaatataattagataatcagttaatcacttccaagttaattagaagggattggaaaagtcactaaaaacatctaattaattgtcatcctgatactttaatggaattgagatttgtatataattaagcaagcaagtaaatgcaaaaaaaattggaatttaattgtcttattttagtggcttatttgttgttgctgttgttctgaaagccagtcacttaaaaaaaattttttttgagtttttagaaaccagtggcttttttacttttgagtttaaatttcttttacacacaactttcttctaaaataaggtcagatcatattatttctctcttataaacagtatactttaaaataatacattgtgtttgattttatcttagttatatcacagaaataaaaattgagataaaatggaatctattttatgcattttatggtatatgtgtgggcagctcttatatttttatccattcatgtattcatcagccaatactgagtactcaccaccaatgactggactggtagcaagaagaccttgctaacttattagagttataaattactttgttaatagatgtcacagctaaactctgtagcagagaagaactttttataaacacatgaactatgttctttatacatgtattcaaagatgaattgtttttggtgttgattaatggggtaggaggttgttagattaaagtcattggaaaattatactatttaaattacacaagttttatagtaagttggtctcagctaagagtttcatatgctaacacatgatcaaggtgtgtag

SEQ ID NO: 1244194 - DNA, 4001 bp, Homo sapiens
tgctggtcttgtggctttcaaatatggaactggcagctaagcttgttcggtaactacagtcccaagatggcccctaaagaagtctatctcccaagatgagtcctagggtgatccccttctacattgactctgggctgacctgggtcttgctttaaccagtagaatgaggcagaaggaatgctgtgccacttctagacctaagtcttaggaagcctgatagcttccacttctatgcttttgggagccttgggccaatatgcaagaagtctggataccctgctggagagatcctgtagaaaggccagatggagagagaccctgaggctacgtgaagtgagagagaaagtcccagcagagccagcctttcggcaatgccctgccaaagtgccagacacataagtgagcccagtcatgccccaagacgattgaggtcccagatgagttttggggtgttatacaacaatctgtaactaaaatagcttatttagaaatttaaaaaaataactaatcaggctgtcttgaatttatttcagctgactttctgagttatttggaagaaaatcctctaaagtagtttcaaattaaaagacactttaaacaaaactcaccgtagtcttgctttttcatttgaatttactcattttggccctgtgacttgtaaactaaactcatatttctactactgcaaagttaagtgttttgtttatgatttttagaagttgtcatctattgatttttttcttctgtttgtaaaggtgaatgaactatcccaatgcttacctgtaccagtgactttgcttaatctaagatgttgatcattctttatgaaggctgaaaatgttatctagaggtgaaatttacaatggaactaaaaatgagtggctaatggaataaaggcctgacatttttctaccaatttttttttttaaaattttgggtgatattcttaagtaaactttttgctgtatttcagggtttggaagataacttgaacccatatatgataggtaaactaaaaaatcccctaaatttcttaatctttgtttctaaaatatttgtttgtaaatttgtttaaagacttgagaccttaattacttgctgaaggtgattgttactttaaaactaagtctatgaaattaggatttagtccttatctaagtaggctctctttctcttttttaaatacttaaatattacaagctttgtaatggaaagaaatgtttctcatcttatagtacagaagcaaaaatcttagtggagaatcgttaccaatttggggaatttcaatggtcataatttatatcattgtttctgaatgccatgttcacacactcagatgatttctatttataacaatctggtataaaatggaactcgttaaaaagatgatagaaaccttttagaaatatctctagaaagtgtacatgctaataaatcttacttaaagatttttcattttaaagatgttatttaaattatctctgtaaataactccaataatatctttgaagggtatttggaatggttccttcctgaagattgtaagaggttagagtgcaccattttatggtatgttgaccccatgttaatgataggaacctcacaatttatataaaaatcaaatgcatcaatcaacacttacttaatggcaatttaacaatataatcacagtatttccccctgtagtcccagtcacactgcagtagaagctaaattccttccccaatagatgctgcatcgaaaaggaaatactgtacctcagagaggccgggacaggaattgggtagacatggactgtctccttattctggaaggtgcctgtctgtatgaaatcattacctggatccttgttgagagcaccgtctctatctgatttctggtgaggatcttttcatagtttgccctgatctcattgagtagctgggacagttccattcttttcccatcctccaccttggctaactgaaccttatcgataggatgagtcgctgcggcagtctgctcggtctgcgcggaaggcagggagcctcgcagagttttaaagatgcagagctcctttttcggaggccacggaaattctcatctttctaactaattatgcaaatacagggtaaactctttgctcctattgttattggtatagtagaaatgtcagattcttcatgaaggaaaggaaaatttcaaaaacctgtactggttccctgtaaaaattgagcactttgaggggagggggagttcatttttgtgaaaaggaaatggggcataacataagaaaattgccgggcatggtggctcatgcctgtaatcccagcactttaggaggttgaggtgggtggatcacctgaggtcgggagttcgagatcagcctggccaacatgatgaaaccctgtctttactaaaaatacaaaaattagctgggcgtggtggtgggtgcctgtaatcccagctactcgggaggctgaggcaggagaattgcttgaacccaggaggtggaggttgcagtgagccgagattgagccactgcactccagcctgggtgacagagtgagactccatctccaaaaaaaaaaaaaaaaaaaaaaaagaaaattatatttagttttctcaaaatgttgcagataagtgctggtagactatgagagttgtgagttaacatttccaaagttttaacaaggatgaagaaatagaccttttggtgtattcaccaaaagaacccttgagtcctttggagggtgtagtcagtgtaccattccatccaatcgttgcaatcacttgagcccttcggagggtgtatttggcgtatcattccatccaatccttgcaatccctgacattttctaacctgtaaagatgaaaagactgaggccagagaggttgaggcatcttgcccaaggttgctcagtgatgtatgacatcactgggactggctctttgacaacttgcttgtgttccatgtattacccctgcatatctgcctctgcgttctctctctccccttctaaattcctggtttaatcttgccagctggttgctagatgtgacagaaatatgtcgtgagagtggatctatcattattgttatttgtggagtggctttggctgaattgtatctggagcacagttcaggagataatcagacctgggttctagcccttacagggcctttgcatgcatgtcctgctcttttaatttctgaattaactcacatctggccaggccagtctatgctgggcattctcacagccctctccaaacaaagctgtcctacccacagctcctggtgagaggagaggttccaggttatttctgacccacccctccctacctcctgcaccttccccatcagtcacaacttgattatctatagattggtcagagacctttggagtaggctgagacagaaagctctgactaaagagagtcattaatgattatctaggccaaactgattctctttcttggtaactgggactgagaaatatgaagagaattaggcttgggagtggaggagagagaagaaagcaatgaattaaattcctaaattaaattcagggagcaatgaattaaatgcttcctgctactttaggtagctcctgctaatatccgcctgaaacacagagagctgaactagattccctggagggtcagtcctggcaatctgcattttaaataggtctgccagcatttcttatgcaccctaaataaagcagcactgtccagtggaaatataacacaaaccacaaatgcaaaccacagatgtccttccaaactttctagtagccatatcaaaagattgaaacaaaaagaagtgaaattaattttacgactatattttatttaacttgatatatccaaaatgcagcaacccatataaaatgttaatgagatcttttacattattcttgatactgtctttgaaatccaagtgtattttatacttacatcgcatctcagcttggaacagccacatttaaagtgctcaatagctgggcacagtggctc

SEQ ID NO: 1244195 - DNA, 4001 bp, Homo sapiens
gggatgtcatgatgacctatatgctggtgtggtgacaacttttaggcataatcttcaaaatagtgtaacagccttttgtcgatggataaccacattgttcaaaaaagtttgaggtggagcagaactgaggtaatgagaaagtaaacactctcttatgcctggtgcactgagcatgcagcatgaacaccagcccttatcatttctatgacatcgttgggtcataagtgacattaaacagcagctggttgcctcacattttaaagatgtttttggtctgtgagaaatcagtagtctcatttttgaaacagtctgtagcacttctatcatttttgctgccttctttttctacattatccatggacagtagactaattaaacaaaacagacgtttcccactccaaatttaagatataataagaaaacatcccccaaaacctttgtgcacaattacttcaagcgctgatgccattttcctggaaattgtcttctggactcatttttcctcccgagggtcccctggcaaagcagccccatctggatctccagggtcacccagcatcttacctgctcctgcaggtgtgtgatgttttcctcatactgggaataatctttcttactgccaggatctctctgctggtgccatttcaggatgcggctttccagcttcatgttggcctcctccagggcgcgaaccttctccaggtaggaggccaggcggtcgttgagattctgcatggtggccttcccatttccgcctagtagggggctgcttcttccagaaccccaagaccctccagggggtgggcagctccgcgtggtgaaggacagggagatgcgggctccccccgcaccgccatggacggtgggagccctggggaagctcctgggccggccccagccacctccggcgccatggaaggaggccgagggggtctggctgaagctgtgtccggagttcatggtcccatctgtgtttgggacggggctgagctctgctccactccctggcaccgcagaactgagccgccccagactgccctggatggttttatggcctttgctgtgggagttcccttctctgacaattgtaccaacaagattgtatcattgtgcaacttgtgtttcctcttggtcaatcccaaagtgcccctgggccttcgcacactgttgttgtttagagccacatcaatatgacagtttgcttcctcccttcccctggtaacccggaggtgtggcccacgacatcaggcgggtattgggctcaggtatctttctaatcttgccgtgaagtttttccattgttcatttacctggaatgggttaggttaaagtccacccaaaagaaagcatattcgatgtagtatagatttccttaaaaaaaaccaaaaaccaaaaccaaaacaaaacaacaacaacagcaacaaaaaaccagacattaaacaacagagatacacacacctttttccacccccaataagccccacctctaaagggagggtgagcgagcctggagaagggaaagccagctcagaacaggatctcaggtcccagaataaagcttgctgtgctgaggcagccgagaaggtggtgaatatctgatgcctttgtggcagtcactgtttgaaggaaagtactttcaaaggactcgctcttaagaacaaaccctcaattatagatgtaattaattaatgaatgaccgaaccttccacttccagggtgcctttcatcccagcacacctcaaaaccaaacaaccctggcctgcgctcaggatttcccttggccctgggggaggaatgtagccgttgttagcagccccggaccccggctgagcctgccacggctgggctctgtgtgtctgtgacctgcagagggacgatggaaaacaggaaacctgccatgggctgtcaaatgtggttgatgaatcttatatttcatctgccaaggtaaaggttaggaatgaataaagaagcagtctgggggcgggagccacgtgctagttactggcagttggatttaaaggggacttacaaataaaatatcagcgcaggaagggcttctggcctttctggttccaagccactaattggacagatgaggaaagctgaggcctatggtggtggggaggttagtggcagagccagggctagattctttctccacatagcactgttatcttgggttgaatcttgacaggtcctgtaccacacttctctttcataataataggacttgccaattggtgtagctcttttatattctttattgaatcctcacaactctttatgtatccaggcaagggttgttgtcttcattttgcagacaaagaatcagggtctcatagggatgaatgatccagagctgattcgcatgtacagtgtaattgagcacatgaattcataggtgacactgcccgagtctgtgctgtcctccctgcctggaaagtcactcacccctacctcttctatagttcaagggctacctccttcaacaatcattttctgaattctcctgcatgagttgggtgaccctctaggaggaaactgcctcttctggatgccgaggtcctccagaggggcagacaccttggcatcccacctcatggtggaagctgggagcccctagccaggcgcagccacctcctgtgcctgggatgaagtccactccgttctttcactccattatactgcatttgccacacccttctgagaccgcaggcttcttgaaagcagagtttatgtcttccatttttgagcaccaaagtctggtttcttggtggtattttgcaaatgtatgttgactcaatcataaactttttagagtcaggattttaacacaggtctcctgatgccatcaacttctgctccttttaggactgtgagttatagaactagaaagtaggaaaacgcctctcctgggtatagattaaccatccatgaaggccaatcttttccaattacaaataaagccacccaaaagcacaccagctctgctcctcccagtcttacaacaaaaccttatcagggaagagtctctgaatattttttatttcactgtgcacgagctggaaaaatgagcctccaagcctcagggaagcttggagagtgcttagaaagagtgccgacagtcacttacatctcagatatgagaaaaagacaaaagagacaagtgataaaaatagagcaaatgagggaactagagagacttgtttggcgagtggtggcaaccagtgttctgtggatgtggacggttcctggtcatcaaagttatggtcagctctggttcctgttcgcctggacccagacttaccaaggaagaaaacatttacctttagcatgtgcaagggccgggctgcactgcctttttctaaattctctcaccagaatctacaatgaaattaatgcttctctaattatttcaggcatgtctgagtggcagtgacttatcaaccccatagatttggccactgtctcattttatgtccatgtgtgggagttttgatttataggacttatccttgagcaaaagatttcttgtgtcatagcaggaccagggccaggaaaaactggtggtgagatctgagagcactggggagaaatagtctcttctagtactgttatatgatggtttcccataacttctttttttttttttctcaagatggagttttgctctgtcacccaggctggagtgcaatggcgcaatcttgactcactgcaacctccgcctcctgggttcaagcgattctcctgcctcagcctcccgagtagctaggattacaggtgcgcaccaccatgcccagctaattttttgtatttttagtagagacggggtttcaccatgttggccaggctggtcttgaactcctgacctcatgatctgcctgccttggcctcccaaagtgctgggattacaggcatgagccaccctgcccagccaattttccataacttcttttttttttttttgagacagagtctcgccctgtcgcccaggctggagt

SEQ ID NO: 1244196 - DNA, 4001 bp, Homo sapiens
atatatatatatatatatatatatatatatttatttataaaatggaataaaatttatttttctcccgtaacacttgttttcaagtctttatgtttcttacttcagtctgaagtcatcagcagccaatctggcattgtcaatgtgcaaaatgatcccagcattttcaacagtggcagcaatgatctaaaaaagatgttaatagtgagtgaatcacgaatgatttttaccttgtgtctgcatgcctacttgtaagggtagctgttgcctgtgttattagctcttttttttgtgtgtgtgtagagacagagtctcgctctgtcgcccaggctggagtgcagtggcaagatctcagctcactgcaacctccgcctcccatgtttaagcgattcttgagcctcagcctcctgagtagctgggattacaggggcgtgccactatgcccggctaattttttttgtgtgtgtgtttttagtagacacggggtttcaccatgttggccaggctaatctcaaattcctgacctcaagtgatttgcccgcctcagcctcctaaagtgctgggattacaggtgtgagccaccgtgcccggcctgtgctattagcttttaaaggtgacttgctttgcaaacttacttagtaatgactaagtatacagccccagacctgtatatctggggctggtatatttaggactacatctttctgcaaaaagataacagtctgcacatttattggactaggcacaggaacctgttttacaggacatagtcctctgcatatttctgctactttgttagatcattatctcatgagctttttcagaaaatagtgcaaaaattgtatttcacttccaaaaaagtctttaaaaatatatttcccatacaaaagtggctaaacattttagattctactacattcttatgtaatgtttgcaccagattttctgggaagaaaaataatactaaagaatatttaaatcttgtaagacaataaaatgtgtcagtctgtcagaattcatcataaataattagattaaactaatgttgactcactgccaccattcttatatataaatgataattagctgcctggtgttgtataagttttactgttatgtagaaatactgaaactgagatggaaacagaaaattaatgtgattggacatcacataaggtactataataattaagacacatcaggtcccactttgcatatgtaacaagcaaatatgttttcaaataatttcttaaaattttcattatagtacatgatctgaaaagaagtgaaagatccacaaataatagaaactcaggcacagatagtctcacctggtttctgagatcttcaattattgaatagtatttgctataatctcttcccgatccaccgtctccagacccaggcccatatttgtcataccactccttgattttgttctccagatcagtgttagcctcctccagggctctgaccttgtctaggtaattggccaagcggtcattgaggttctgcatggtttgcttttcccctccagagaaaagccccccatcgccaacaccacctcccataccaccaccatagctgtagaagcctccagtagcaccactgctgaatctagaactcccacagaatccagaacccctgccaaatccagagaccccgccaaagctagaacccccaccaaatcctgtcccagagcctgaagctcccccaaaaccaccccctactgagcagctaccaaagccccctccaaagctgcccccaaaagcaccgctagaccccccactcaggctgcagctgctggctcctcctcggaagccctgggccgagctgccccccagaccacatctgcttccactgctgaagctgcttccaccagcagacaccctggctgagctgctgcctccagccctggaggaggaggcgcgagacgagcaagacatggtgctcctgcaaacatgagcttgtccaggcgaataggagaggtgatgacgaagagtgtattcaaggctgcctttttggcctttatatacacacttcgagggtgttccttttctctgtcacttcttaatccctgttacagttttggtaatccgtaattggataatttctgtttcttgaacacttctctgaagctaggtcagagccctgggacatttactatatcaataaaaaaagaataaagtggagcaaaacaaaaaaattttcagaattacagttttaatctttcagaggttttgatgattggtaacttttctctggaagtgtagttctattaaatttgcttcatgatttcacatttgcagagaatatctccaggttaacaaatgtaattaaaatacttaatatgatgagaataaaaatttcccatcaatcatgtaacttttttgttcatattgttctcaaaagttgaaattagctttcacatcagcaataatttcagatttgattaagcatccatctctttgattatttcaatcagcgtgttttttaaggttgttgaagtttgtgattttaagttattgctttctttttttgtattttgtataatatacaaaaaagcatataatttgtaacaattatgttttatagttcataagaaaaacataaataatagttttctaggtaagtattattacatctcagcaacatgtttattcaagtagctaatgtctaagaaagattgaaaagcttttaggcagattgttttaatacgattttctttctggttgaattctagtctgatataaagacagcaacttcctttttgagtcaaatttcaagaaatgaagagatgatgcagatatctcctgccttcgttttaaagataaaagaggatttgtatctacttctgataactagtgttacaattggagttattttatagattctgaaccctcctgagctccctttgtgcttcatggctttttgtccctttgtattttagactgtttccattcatgtcttctagtcacttcaccggtttaatagtgtctttttgaaagacagatactgtataattccagtactatgaggtgcctagagtagtcaaattcacagagacagaaagtagaatggtagttgccagtggccgaagggttggggatagacagttgttgcttactgggcatagaattttaattttgcaatatgaaaagagtttggggccaggcgtggtggctcacacctgtaatcccagctctttgggaggccgaggcaggtggatcacctgaggtcaggagttcgagaccagcctggccaagatggtgaaatcccgtctctactaaaaatacaaaaaattagccaggcatggtggcaggcgcctgaaatcctagctacttgggaggctgaggcagagaattgcttgaacccgggaggcagaggttgcagtgagccaagattgtgccactggactccagcctcagagacagagtgagactcgtctaaaaaaaaaaaaaagaaaagagtttgggagattggttgcacaacaatgtcagtacacttaagactactgaactgtaaacttataaatgatgaagatgataagtttatgttatatgtattttaccacaatttttaaaaagtcttaaaaaacaggtgcttccagaaatagtttgtatcctccttagctttaaacttaagtagctgacttttgtttatttaagaatttcttccttcttttgccagtctctgttaaactatgttcacaccttaatctttatattcaattatttgttaaacaatgttctgctttaaatttttccttaaattgcattttattgggacacatgattaaataggtaatcattcactttactatgtagctcttatgtggcttttatgatctacctgtactgttttcacaggagtatgatgttactcttcttcatatttagggtgacatatctccaaggggtacatggtgtacaaaattttaaattgttaagctgggagtaatttttataacgcccttctaaagtagctaaaaaatgcaccacaca

SEQ ID NO: 1244197 - DNA, 4001 bp, Homo sapiens
ttttttttttccccataggaaacttgatgagagagcaagggtgaatctgtacaaagaatctgacacttaaaaagacagctcaggccgggtgcggtggctcacgcctgtaatcccagcactttgggaggctgaggcaggtggatcacgaggtcaggagatcgagaccatcctggcttacacagtgaaaccccgtctctactaaaaatacataaaattagccgggcgcctgtagtcccagctactcgggaggctgaggcaggagaatgccgtgaacccaggaggcggagcttgcagtgagccaagatcgcaccattgcacttcagcctggacggcagagcgagactccgtctcaaaaaaaaaaaaaaaaaaaaaaaaaaaaaaaaaaaaaaaagacagctcagccctcatgtctgtctgacaatgtgtcttcagcaccaactttttatatgagaggttatgtacattatctcctgtcaggtgcacagtgtctgcggagggatagcaaaatgtagacgaccagctcttacctctttatggttctttttgaggtaagtcatctcctcactcagggtttcatactgaatctccagatctgttctgcacagggttatttcatccaaaactcttcgtaacccattgacatcagcctctacactctggtgaagagccagctcattttcataccttaaagagtgttaatgatttcctaatttgtcacatggttggagacatagtcactagtcactgatcaatgacaaatgctagcattctggaattttgaagatttggccacaagaggcattttcaaagcttgttgtataataattattgtttctactttgcagtatttgacagaaaaagaactagggtattgggcgctagttttaatagcagttcatgctttgtatttaatagtcaaagcataaaaaagtaataacatcctgtttatgtgaaattcaagtgttttataattttggaataagagttgctaaatttgatgtaatgcgttgcatgaattgccatgaattcatttcactctggcagtctacttacttgagtctgaaatcatcagctgtaagcctggcattatcgatctgcagaacagcattagcattgctggtggtggatgcgatgatctagaaatgggaatttgacttttatcatgaagtaaaccaactgaatctacttaatgcttatttctaatgctaaattggaattctctttaagaaatcacaagtaggagggcatggtggcaggcacctgtaatcccagctacttgggaggctgaggcaggagaatctcttgaacccaggaggtggaggttgcagtgagccaagatcccacggttgcactccagcctgggcaacaagagcaaaactccttctcaaaaaaaaaaaaaaaaaaaaatcacaagtaggaatgataaatgtttttagaatttaataaagaaaggaaaacaaaatttagaaataaaggtacatgaaaatgattgtgcagtatgatttcttacctgatttttaaggtcatcaattattgggaaatatctgctatagtcatgatcaagaccacggcaagagccaggcccaaatttctcataccagcccttgatcttctgctccaggtcagcgttggcctcctccagagcatgcacactgtccaggtaggatgccaggcggtcattgaggttctgcatggtcaccttctcattgccagaaaggagcccccgctcattcacagtgaagccagcacagggattacctccccctgtgtttcctcccgatgagctgcctccgaaggcactagagaagccacttccaatccctgaaatgccacaagaatttccagtaccaaagctggttcccccaccatagagtctgagtgatccagtggtgggacgaggacaggacctcctggatgcactggaaagtcgaagagacatggtatcagggcaaacgcgttgcagagctgtatttgtgaaagccagaatggagtgccttcttgtctaaaaggtttggtttgcctttttataggcaagtcccaagtgtgttctgaatgaaattctgcctacacagagtaaaacatggcttgccagtctcagcaagttggcataattgggtgattttttctaattagtaactcactttgctgggctcattcctgtaggagggcagttgccctcaggttggtggttatctgagaaatgggtctgggtggagcaatgtcaggttcattattacgtttttaaatgctgagtgagtcattcttcacttccatccttggaagtaaacctcatcagctcattacaggatagaaatttagcatcatggttttgggctattatgccaaggcagattgtgatgtttctgaggctttttctgcttttattttcacaagtttttccacataagtagagaatagaactgtaatcatttccccaacctggttcttcaaccaataggtttttgtttttatttttaaattcctcttgccactctttcccatgggaagttaacttccattctggctgacatgagcatcatattctgttgacacttatgactgaggagagttgtcttaccttatccattttggtaattaggagcacacccctaattggtgttatgttttgtgggagtttggaaagacattaacttatttcctgaccctgcaaaatctgaagcaaacctggtaggaactattttttctgtcttaatttattgtggtttagctcagatgaaagtcatcagtaaggtatttagtcggtgggaattcacatatatttactgaaaactctacctattatggaaatataaaaaattgacaaataaggccaggcacagtggcttacgcctgtaatcctagcactttgggaggctgaggcaggtggatcacttgaggtcaggcatttgagaccagcctcaccaacatggtgaaaccccatctctactaaaaatacaaaaattagccaggcatcatggcgaggtgcctgtaatcccagctactcgggaggctgaggcaagagaatcaattgaacctgggaggcagaggttacagtgagctaagattgtgtcactgcactccagccagagtgacagaatgagactctgcctcaaaaaaaaaaaaatgagaaataaaaattgtatatatttatggtgcacgacatgattttttgatatatgaatatattgtgtaatgaccaaatcaagctaattaacatatctattacctcacatacctattttgtggtaagaacatttaaaatctactttcttattgttattaactatagtcaccatattgtacaatagttatcctgaacttattcttcccacctaaatgaaattttgtattctttgaccaaaatttccctagtgcacttccctgatgattagtgatgttgagcaccttttcataaacctattggctatttgtatgtcttttgagaaatgtcttttttttttttgtttgagacggagcctcactctgtcgccaaggctggagtgcagtggtgcgatctgggcccactgcaagctccgcctcctgggttcaagccattctcctgcctcagcctcctgagtagctgggactacaggcatccgccaccacacccggctaatttctttttgtatttttagtagagatggggtttcactgtgttagccaggatggtctcgatctcctgacctcgtgatcctcccacctcggcctcccaaagtgctgggattacaggcgtgaaccactgtccctggctgacaaatgtctttttaatcacattcttttcttgttattgagttgtttgaattacttatatattttggatattaagccttgatcagatgtatggttcatagcatttcatccaacaggttcatccatgttgtcacaaatgacagaatttccctttttaaaggctgaatagtatcccattgggtatatatactatattttctttattacttcatttgttgatggatgcttaggttgaatccctttcttggcta

SEQ ID NO: 1244198 - DNA, 4001 bp, Homo sapiens
tttgattgatgttcatgccctgctacgaaatgaacagtggacttcaagaaggaaattagaaactgtatgaagccactctgcaggcttccttacctcctcatgactttttttgaggtaggtcaattcctcactgagggtctcacactgtatctccaggtcggttgtacaaagggtcagttcatccaacactctgcgaagaccactggtgtcggcctcaacactgtggtgcagagccagctcattttcatacctgaaagattagtaaggcacctgagagttgtcatcgtaggcaggtgcaaagcacaactttttaaggtatttcatatgctgaaagatatgatgttctgtacatacctctgaagcttcttgcaatggcaaactgctaaaatggtttgagatacctaacaattcatgaattgtattttggggatgttatttcttcagagctgatttttgtcatccaatgtgcttaacaattaaataaaatattgctagattttagattttaaaaaatatgtgattgctcttttttgttgtttgtttttgagacagtctcactctgtcacccagactgaagtgcagtggccccatctcagctcactgcaacctccaccttccgggttcaagtgattctcatgtctcagcctcccaagtagctgggattacaggagtgagccaccatgcctgactatttttttgtgtgtgtacttttagtagagacggggtcttgccacattggccaggctggtctcaaactcctgacctcaagtgatctgcctgcctcagcctcccaaggtgctgggattacaggcatgagctactctatccaaccatgatagctctttttataacggcttatttaattcaatttctttattgatctagtctggctttagaaaaacattttggttttcaaagcaaaatatatattccttaatccaattgtaatattttaacttttattaatataattaatcagtttgttttcacctacttcagcctgaagtcatcagcggtcagtctggcattgtcattttgtagaacaatgctggcattgcagatggtcgcagaaataatctaaatagggaagattgtgaaaaatgttaattaccaaaagtcaaaggaggctccagacttcagtgtgattttatatcttcttaatctgtcaaacatctgttttagtatcttttttctatgttaaagaaatctggattttcttcagataataagcatccagagcttaagagccacatagatacttttactacttttgatcaaatggtatgagctaaatatatgaaaaacgaagtgactatatctgttttgaaatgatttctttttcattatttaattctacaagattttattgccaggtactgtgcttagcactggaaatacagagtgaacaaatcttacatcacataaatttgttaggcacattttatattttctcttctttaaattatcaacacacaaagtctgtagtaaaagtatgcaaatccctatttcttacctgccttttaagatcttctatgactgagaagtatctgctatagtcatgatcgtgttcccgggaagagccaggctcacatttctcgtaccagcccttgatcttctgctccaggtctgcgttggcctcctctagagcatgcacatggtccaggtaggatgccaggcggtcgttgagattctgcatggtcaccttttcattcccagagaggaggctgtgctcattgccaagaaaaccagcacaggcaccacttcccaaccctccaccgctattgcagaagcttcctccagaagagatgccctcaagagtacaagaaaagctgcttcttgctcccgatccaacacacacattcccagccacgaagcctgttcctccaccggacagcctaccagacccagttcgcgagcagatcctcctggatccaccagaaagtcgaaaagacatggtggcagcacagccgggcaaccccttcccagaaagaggagcaaagccagggttcaccttccacacttgttagctcccttggccttttatagtattcactgggtcatttcagtcttgactatgccagtctgtaataaaatttacttgcatcctaattgttgtttttcacaattgggtaatttttaacagcgtccagtctgtaggtggaaaggtgccccaaggatattttttatatataaaaatggtgccaggtgaagtaaaactaaatcatagcctcaaaggccaaaattaaatatgactaaatgtgcatctttttggccactggaatattaatagaatctagattctccccctgccacatataacaaagaattaataattccaatgagaaatgtctcctacttttgtcctgttaacgctcatagagtatttctagtattcccacttcattgagtgcttcctttcttcctttcgtttctttttcttttttcctttttttaaagatatgtggtctcgctatgtttcccaggctggtctcgaactcctggcctccagtgatcctcagcctcagcacccagctcagcctcctgtggccagcattacaggtgtgagccactgccctgggtgtctgggtgtgtgttttccttcttatcaaaaccagaaaatctcagcatctattgatcttttggtagtgggagattttaaaagaaatctaccatttcttgaattgaaaactgaagtaatagaaatcctgcagtcctgcttattgttaatttcaatataattcatgaatatgtgatgatggtggagaattaattcgattgagatttcttggtttggtccaggagcaggacatcaattcaactaacagtctccaaattgttcacttccctacccctaaatagtgtttactgtcttttagtttaaatgtatgtatttaagacattaggaattattttgagaagtgagcatcatattgattagcaaggagtaaaatatataaggagggaggtgttttcatcattacctagaaaaccagtacttatagtaccctagagagaagataagttgtcacagggaagtactctttattctcttgccttgatgctcttgggaagttatccaggcttggatcatttccctactgggcaaatgaaaataatagcatcaaagagtctcaaatgaatgttgagcagttccaatcatgaatgacgataagacagtttgaaaggcacaaacatttttaaatgttaattatttaaattattataataaagtggacatgtcagacagggtcgggtctctatcacctataatgatacaaattgattggttaactaattatgggtttagttttgaaacagtaattttcttccgaatgatatttttcaatgttgtggatagtgaatcctttggaaaacatccaacattattgtcactaaatcgtatggaacatttagtggactgcatggattttctaaatcaaaaatatttaaaaataaataataaatacagagctataactggaccatcagcttatgtttagaacagtgcatgataacctagatacagttcctgtttagagactttttactgattttgttgtgacctggtcaaatttttaatcttttgctaatttttcccagaaataaaacaagaaaaacagagagtattgtcagtttaatgatttataaggcttgagtttcttaggtgagttattatgagatttcaaagtattattaacataatctatttatctctagatactttataaatacaaattatcttttgtgaaacaagttaaacacatattattaggactattttggagatgagttgtctctgaagctaagtggccacacagattacaaagcatttctatatcaaagcaggactggaatatatgatgcttaactccttcttgaaatgttgtcgcctatttactcacgtgagtaggtcttttaaattattttaatcatagattttcctctaaactaatacttattttaaaaatttaggtatgctctagttctttctggaagtggag

SEQ ID NO: 1244199 - DNA, 4001 bp, Homo sapiens
ctaagctttgaggtaaaactactaagataatacttaaaacttcaggccgggcgcggtggctcacgcctgtaatcccagcactttgggaggcagaggcgggcggatcacgaggtcaggagatcgagatcacggtgaaaccccgtctctattaaaaaatacaaaaaattagccgggcgcagtggtgggcgcctgtagtcccagctactcgggaggctgaggcgggagaatggcgtgaacctaggaggcggagcttgcagtgagccgagattgcgccactgcactccagcctgggcgacagagcgagactccgtctccaaaaaataaataaataaataaataaattaattaattaaaaaaacacatttcagttaggtcatctatcatgcaataaatacatttcattgaagcaagagaatgggaatagccaaaattctttctcatatgactttgacactcgtttttgttagtcccgaaatttcccaagtaaaatttgttgctcagctagttactcattctaacaggcattttgtttaaaacaaatacatgaataaacaagaacaaaggcttgagacaacgtcaaataacttagaagaataaaggagaaaaaatgcttagacaacttttttttcccatttatcttcagctctacttactttagtctgaagtcatcagctgttagtcttgcattatcattttgcaggacaacatgggcattactggtagttgcagaaattatctgacaaatgaaaagttagttaagattgaggaaatatttaagatgcatttcaaagttccttgaaataaaattacccatgaaattatagtaatatttctggcatctgtctctaataatcagaccattcttttgaagatgggtaatttaagtatggtctctctctctgtcttttattttgagaccgagtctcgctctgttgcccaggctggagtgcagtggcacgatcttggctcactgcaacctccacctcccagattcaagtgattctcctgcctcagcctcccaagtagctgggattacaggcatgtgccaccacgctcggctaacttttgtagttttagtagaaacagggtttcaccatgttggccaggctggtcttgaacccctaatctcaagtgatccacctgccttggcctcccaaagtgctgggattacaggctgaaccactgtgcctggctgggtatggtctcttgtatttcccaccccaagcattaaaaaaagctctttctatgggaaagcctataaatatataactggagacactggacagcttttgatattttaatattaccaaaagcatatacctaatactacatgatggacgtgccatgttcaaatattagaatttattagaaattatttttaatattgaaaatgaactcctaaaatttagaagctgagggcaaagccctgttattgtgatagcttatacatttgtgcatctgtgagtggctaaacactctcaggagtgctaacactcacgccatggcgtttcttacctggttcttaagttcgtcaataattgggaaatatctgctgtaatcatgatcaaggccacggcaagaaccaggtccaaatttctcataccaccccttgatcttctgctccaagtcagcgttggcctcctctagggctcgaacattctccaggtaggaggccaagcggtcgttgaggttctgcatggtcaccttctcattgccagagaggaggccgtgctcattccctgtgaaggcagcacaggaagcacttcccccgcccagacctccgccatagcctcctgcagatgagctgcccccaaaagcacaagagaagccacttccaatgcctggcacaccgcatgtgtttccagccccaaagcctgctcccccactagagagcctcacagagccagtgcccccgcaagagccaagtctcctggaggtagaagaaaagcgcacagacatggtgtccggaggctggagcctttgtttctgcggtgatgctctgatggtgaacggcctactcaaacagcttggtttgcctttatatacacattattagggtgtttcttgatgagctttgctcatagccaaatgatgtttgccagctcattgtgaattatccataatggggtgatttttttttttttttaatgaatggctttaccatactgtgtccatttctgtaggtggatagttattgtggggttatttgttatctctggagttggacagggtggagtattatcaggattattatagtgatgcatttcaaatttagtatgagtaactcttcctgtcttccaggcttcaggaatgcataatacctataagaataaaaaagtatgatagacagatttctctttcccttgctcaaatcagcattgcattttcttcagcaatgaagtatcatagtatcagaagaaggaggggaggtcctaaaggaaaactgaggcattaaagggaatcttctttggagacagaaagtgttcctttgatccttatccttcctgaattaccatttcatctgtactggttttctgtctaagttccattgctaaccaggttaagtaaaggaattggtcacctcctcgggcctcagtttccacatctgtaaagtgaagggtctagactgtggtctctatattcactttctgtctgtagattgctcatatttctgcattccttctattggctgtccatttccatagcacttttctgcattgcttcttgtacttttcacctcttatttctgaattgtggtcccactattttactgaaattaacctctcagacatcactgcacatctctaatcatcatttcttttattttttcccctataccctcttggttacattcaatactgacaacctcagtctgatgagtctgatcgagtttcagacagttgctttctaagaaattttctacatctcatgttgctccccttttctcttccacttatagctcctgtgccctacctttgtcatttcttatagttttgtgcttggtatttacgactctctctcttttttttttttttttgacagggtctcgttttgtcacccaggccagagtgcagtgacatgatcacagctcactgcagcctcaacctcccaggctcaagtgatcctcccacctcagcctaccaaatatctgggactacaggcacacgccactatgcctggctaatctgtgtatttttttgtagagttggggtttgccatgttgtccaggctggtcttgaatgcctgggctcgacagatcctcccaccttggcctcccaaagtgctgggattataggcaggagccacctcactgtcttaatgtaaattttcccgcactgacttgtccgttctgttttactacttccctctttcccatctctttgcctttgttcatgttattctttccacctggttttcttcttcagactaaaaattataacaaatcatttgagatcttgcatttgccaagaatgattgacatcactttcaattacctagattgaaaatgaagttggcaaaaatataaattttcatgacttaataaatgagcttgcggaaaaaaagccagaaagatttgtcaatcaatttaatacattattaaagtattatggtttattgttttacataaaattaggacaccaaaacattatttctttgctgtttgtagtttatgctgttatatatgtgtacccgttacctcattacatgttataaataataagactttttagaagaaaaagatttatattttactatttctttttttttttttttgagatggagtctcgctctgtcgcccaggctggagtgcagtggtgccatctcggctcactgcaacctctgcctcccgagttcaagtgattctcctgcctcagcctcccaagtaggtgggattacaggtgcctgccaccatgcccggctaatttttgtatttttagtaaagacggggtttcaccatgttggccaggctggtctcaaactcctgacctcagaccacccac

SEQ ID NO: 1244200 - DNA, 4001 bp, Homo sapiens
ggccctcataggcattcatcctagggatgaccgctgtcatttattgagtgattattataggccaggcactgttctgagcgtgtgatatgtattaattcattgaagccttttaacatcccctcgtagtaggtagtattattagactaatctgtctgtatccgttggcaaattataacaatgaacctgaattactattgtgattttaacccccaacccctgcccagtatttaaaatgtacagagttgtgattggactacaggtaaagcttctcctacctcttcgtggttctttttgagatatgtcatctcctcactcagagactcatattgcagctcctggtcggtcctgcagagcgtcagctcgtccaggactcgccgtaatccgttgatgtcggcctctacgttttggtgaagggtgagctcattttcataccttggggggcatttaagtgaatttcagtgccagtaagactaccccaagaaacagaaatattcaatcccaattgctttaaactgaaaattagaaattgaattaggactgtaaatagtataaaaatatatgaagaaagcgctcctgcattacccccactcaattctgtacaggataattggaagttatttcatcacacaaattccaatagcataacctagttaaataaaaatacaccattttggaattttattttagttaacgtttttccttagttgactaatgatttactgagcatctactttgtgcttggcagtattctaggcaggcagagaaatatattgatattttgtcccaggaatataataactatgtataagttgattgtaacattataatacaaatcctttgcttccttttatcttttaggtgatagttcattctacttgggatgaaatagaaattttatttaacaaattaaataaatagaaacttttttctagagcaggattttcttctgtcacttactttagcctgaaatcatcagcagccagtctggcattatcaatctgcagaatgacattagcattagtagtagtggaggagataatctagaataaaccaaaacagagaacacaacaagtaagtatgcttttatgtgattcattatttcaggaaatgaaaaaggttactcaagtttttgcataaaaatttcacctccttatgtaataatcaaaatgtttcaagtttaacttttaaaaattaaagacatggttttatttattctcatatattcccctaaatttagaactacaatacttttttattcatatgcctatgaatgtacttcaacataaacaatggaactaataacattttaactacattaaaattcatgaatcaaagggcccatttttgaatagtaggaagaattgtttatctaaataaataaatacaagttataacagtcatgaagcatttcttattgtatgtcttttgttaggtatttcttagttttaaatacttgggttagttccaaatctgtgatttctcaccttattcttaagatcctcaattgttaggtgatatctgctatagtcatgatcaagtccacggcaagatccaggtccgtatttttcataccaacccttgatttttctctctaattcagcatttgcctcctccagagctcgcacattatccaggtaggatgccaagcggtcattaagattttgcatggtcaccttctcatttccagagaggagtcccccttcgcttccagcaaagccaatacaagcagcatttccaagggcaccaccagcatggctcccaccaggaacactgcccaagccccctcccaaggcacaggaaaattcacttccagcaacagagccaccacatgcactgctgcctgcaaagcctgcacctccattgaggggtctgacagatccagctccagaccttaagcaaacatgcctggatccattagaaaattggagagacatggtgttttgagaaatgttcaccttgtctatgcaaaactgtaatgtcccaagagaacagaatatcatgcactgataatttctttgggtttttatatatcattattggggcgttcctatttgagttatacatgccaaaagcaaaatggcatcacttagattagcataaaattatgtataattgggtgattttaaaaataattaatgtctaacatccctcggtgttgctttgggctatttcttatcttaaatataatagggtttgttctatattaagtttattaatttaacttctaattttgagtgagtaatcctttcctttcatctagaccctaggcatatactgtcattatctggcgccaggtattatcaaattttttataaagttaagtaagattatgatagagttctgtgaggtacagtagggtctcaattaccatggaggggtataaaggactgctaattacagaaacagatattttatcccaccagaaaaaaatgtgttatttagaaaacagaggctagtgacatctctgttcttaccatgattataacatctatttattatcttggacaatgacacaaatattgacctattattttgtttaaaatagcatggttatgatgtttggtgctctatgctaagtgctaaaatgaaagacatagtgttaactaaatgcagaagtgaaaaatgcgtgattacaatctttaagaaatctattgtcaggtccagacaggggctggatcatggttagctttctgtgctggtctaaagagtttgtaatgaatcctaagtaaaaagcagagggcaaaatgatcaggttgaaatgaaacaaggtggtcaattacaaggttggaataatggtccaggtgagaaggatgaaggcagtggggatgcagagaagatggctttgagagcatatggtaatatgattgaatttggagagtagggaataaggcagaattggggataactcttaggtaattaattttagattctgggaactcataatattcactgagatggggaatagaggaggaggaagacactgagtttaggtttggaccaactggatttgaggggttgccagaatgttccagatgaaggtgactgatagcaagaatgactgtttagaatatgtatactgaactggaaaaatacttgactagcaatgagtaaaagaaaattggagggtccagctctcatttataatgatgttcaactgcatatttggaagtaatcctggtgcaggaatagaaaggatgatgatcagattgatgtgggttttgggatttgaagacaggtccagaagaaggaaatagtggcaaagaaatttctggtgttcttgagaaaacaattgaggcgattgactgtatgatcatatagcaagaagaaagtaaaaccagagggacagatggactgaagaaaagggcagagggtgagtcattgggtatccttatgaggtcatggagcaggcggagtgtgaggaggagattgataaaggtgaaggatgacaggctaaaattggatagtggaaaccagaatttagaattttaaagtaggcacaactccaggtgtcaccaaagtccacagagtagtcatgggagtggaccaacagtcactggaacaagaagtcagaagtggattggacctgaaaggcaagagagtaggaggtcaggaactatctgtctgtgacattaaatgtaccatctataaaggcgtgaagtttctcatgatggcaggagacaggagggaagtgggctgtgagccattgtcaaggtttttggatgatgaggcagaggggagtgtatgtggtgaggggccattggatggcatttgcctcaaaagaggagtcttagcataagaattaagtggcacaaagctagatgtggcattggggatctagagaacacagactctgccttgaagtccttatgttaggtgtgtggaagtgggagcagaagaggagatggaagtgaagaaggaggatggagaggagatgacaagaaaagatgtgggagaaaatgagaggaaaagatgtgggagaaaatgagaggaaaggggagaga

SEQ ID NO: 1244201 - DNA, 4001 bp, Homo sapiens
ctccaagctggcagcgcagggtattgacctcctatggatgcagaaaatacaagagttactatgctcagcaaagaatgaactctaaggaatggcattgcttgttgaaaccctgttagtctattttctcggaaaagaaactttgagtggagcagtttgtgacagctcaaggcactccatgtggcatagccccctccccaccatctgctgtgccatggcacttggcttcagaaaaaaatcccaaaagtttgcttggatgccactgaaggatgaactaattgatattcaactttcccagtttacaattggctgtgaggacctcagaatgccaaaaaaaataggctgtgcaatttcagaccatatatcaaaaaactcttgctgtcaagtaagaggtaagagcatgtcatggcccctcccaagagagaggaagaatctcacaaacactcttcaccaatactttgaaagagtagagactcacatttataaggtttgatattttttttcttggcctttgccaaaaaaaaaaaaaaaagactttacaaagcaataacactgcaatgctaggactcattctacaactattgatcaactgcaagcacatggagctgctccgggcaactcaaataatgtgctagtttaaagtgaaagatgtttcctgtctgggaacatgaacaggtcttatctctctccaatttttctcttaccgtgatgttttcaaaggaaaccctcagtcttgtactcatactctgcattctgctgccccaaatcactaaagcaaccctgagccagaggctgagacaggtttgtgcatttctcatttctagtctcacctgctcatggttgctcttgaggcagagcagctcctccttcagggactccacctgggcctccaggtcggacttgcacagggtcagctcatccaggatcctgcgcagaccgttgatgtccgactccaccagctgccgcagggacagctcggtctggtacctgcgcaaggacagggtcagagtactacctggtagatcttcaagactcacaggaatgatttttgataacctcatgtgccttatctttccactttctgtaatgaataggcccaggagacagaggtttctggaggctccatcaatacccaatattcatcccaaaacaaacagattgatgtgagtcctcatccatttttgcatttctttgcttggttctccccagtcctctgcagaatccttcacaacaagtgggtagatctgttttcagatggaaatcccttttctttaaagattaaacagaagcaattgacactagtgcaaattccgaacaactcacttggttctgaaatcatccgcagccagcttggcgttgtcgatctgcaccacaagcctggcattctcagacttggtacacaggatctggggagtgagaggtggcttagtgaggactgaaaataaatatgaaatcatcaactttttaaaaatgacttaagccattttgaaataaaagaggaagcaagaattatgacagcacagaagcaagaaacacacttctctatcacagacagaatcacagcaaactctcttgcttggagatgacagcaatgccgctcaccttctgctggagctcctcaatggtcttaaaataggactggtaactggggcacagcaagggctcctgctgctgagaccgctcccggatgaggttctccagctccgcgttgtcccgctccagctgacgcactttctccaggtagctggccaggcggtcgttcaggaactgcatagtctccttctcgctaccattgaaggagccctcgcagaaccagttgcagttgctcacattggcggggatgttgcaggccccgggcagggtgcagctgtggcagctggggggcacgcagggccgggaggagcagctggtgcggcagctcaggctgggcaggcagaagttgtagggcatagtgctgggagggagggagggagtgcctggctgaagacagagtctaaattctccaagccacagagctgtgggtctccttcctctagggagcatttatatcccactgcagagggtgtggacacagtatgtaatgtcttttttctttttatttcttcacttcttttcaaacgccctttccttcagtctgttatttgccttcctctgaagagtcccttctcccataaaattctttacttgggcttcttgctaagtcaggactcctccgcagacagtccacccatgaaatcagagttctgtggtaggccttcaaagaggctacacagtccagcccaagtatctgccctcattaattgaggtgttgatccatccgatgacattcttttgtgtcacataattctgcaggcccataaacatactcatgtcctggtccacctgccgtttctagggagaaacacggattgatttgaggaagaagttgcattaagaggccacagtggactgtctttccctctgcatttagagaagaatcttcaaatgatggagcattctgtgccttggaagccttaaggtggatgattagaatcaatggaggacacgactgaaaagattagacagcgatttgtgttttacgggtccgtgtaatacttcccccccaccaccacatattacttaagaaaattgtagaggagagaattttaaaggtagaggctttgataactagttggagaacaagaagtttctggggtaagagatcgttttgaaagaggctgaaaagtgcaaaccgagagagccataaaaaacacatttaaggctgggcacaatggctcacgcctgtaatctcaatactttgggaggccgaggccggcggatcacgaggtctagagatagagaccatcctggccaacatagtgaaacccatctctactaaaaatacaaaaaaattagctgggcatggtggcacccacctgtagtcccagctactcgggaagctgaggcaggagaatcacttgaacctgggaggtgaaggttgcagtaagccgagatggtgccactgcactccagcctggtgacagagcaagactccatctcaaaatacaaaacaaaacaaaaaaaatgcatttaaataatctaggaaagatattcaggggcagagagaaaggaataaggaggtctttgtcaaacatttcctaaggttatccatagtatccgaacagagtagatggatatgttaggaaagtcaggagatagcccaaaggggcctccacggcctgaaatcacttgtagttgatctttaaacttcatatgaattgaccctatattccataatatatccatgttggctttaatctttatatatatatatatatatatatttttttttttttttcagatggagtcttgctctgtcacccaggctggagtgcagtggagcgatctcggctcactgcaagctccgcctcccagattcatgccattctcctgcctcagcctcctgagtagctaggactacaggtgcccaccaccacgcccggctaattttttgtatttttagtagagatggagtttcaccgtgttagcaaggatggtctcaatctcctgacctcgtgatccacccgcctcagcctcccaaagtgctgggattacaggcgtgagccaccgcgcccagccagctttaatgtttttaaaaagccccttttaaatttccagttaaactttcaaatactttgcttaattctctaagagaaatggatacatcaggaagatgtaccatattctgtcctgggcttcccatctccagcccgagtggagatgccacctgctttaagaaccaaaggtctaaaggtaccaaaggaggtctctgtggttgtgtaattaaatccaaggacctgggcaccaggaaagaaaatgctgagcacggcatgagcaagggggttttgcaaggcaagctggagtcatttggggttgctttgggaggtgaaggaaggcactagaagatctgaggaagaggtagccaaagttctgaatatataaaagttgcagcacccccatctcca

SEQ ID NO: 1244202 - DNA, 4001 bp, Homo sapiens
ccactctacctctgctgtgtggctctcgagagaaaaaaatgcagttgccactagtgagtgcttggcagtcacactagcccaggaaatgcagaagggaagggggctacacttctgagagttgaccaagtggcaggtgtttcatacccatgccttggggatttccatgatccatatcctgtccattaaatcctcacaataaccctgcgtgatcatgttgtccccattttacagaagaggaggctcaggaagattccataaattgggcaaagtcactaaaacaacatgtggcaggcttgggaatttcaacccacgcctatccaaccccataccccacgttcctccccctctgcttcccggggccacttcagcgggacttccagcctcacctcctcatggttctttttgaggcacatcagctcctccttcagggactcaacctgggcctccaggtcagccttgcacagagtgagatcatccaggatcctgcgcaggccattgatgtcggcctccaccagctgccgcatggccagctctgcctcgtacctgcacaaggacagggtcagcaaccaagggtgaaacagaatgcagaactcagggaaggccttaaactgccggcactttccaaccctccgtgaaactaatggaaagttgccccagagcctatgaggacaggtcctccccagctccagccccccgactgaactcacttggccctgaagtcatcggcagccagtttggcattatcaatgttcacaaccatcctggcattctctgccttggtacacagaatctgtaggccaaggcacatggagagggttagttcaggatgagacgaagcaagaagaacccaaatgaagagaagacagcagcaaaggtaggatccagcagccctgcagccatccctgcagaaggtcctcttccctggaactctgggagatatttagcgaattgctagtccttggagaacttgagatgtattttttaagaacctgaagcttcgtaaattcaaattccccattttggatgtgccaagcaatgtggaagggaagaatctcatgtctgaagtcactcatgtgacagttagaagggtctttgacatttactgaaaacttaccgtggaccaggggctgttccaagcacttgacctgcatcatctcatcaaatccttttgacaaccccattagataacgaccattattatccctgttttacagatgagaaaactgaggcctggggaagggatgggacccccaaagtcatgcaatgaggcaatggtagaactgagactagatcccagatctctccacatgaaagcctcaggctgagtgctcaaattataaaataaccctatgccctagggaagtctctttgtcctgaacatagcttaataagctaacgagattccaatctggaatgccagctagtccagttcccttcccagagagcctattcacctcaccgctgccctcaccttctgctggagctcctcaatggtcctgaaatgagactggtagtcaggagtcatggtgagcacctgggagtgagaggcctcttggatcctgctctccagctccgcattctcctgctccagctgccgcaccctcgtcaggtagctggccaggcggtcgttaaggaactgcatggtttccttctcattgccattgaaggccccttcgctgtaccagctgccggggcccatggagccggagatgccactggctgcctggcaggaactggatagataggttttggagaggcagctggctggccggaaggtggtgggcaggcagaccgaaggcaggcatgccatgggctggcagacatagcccaggcacagctcaggccggcagttcacgccgctggaacagaccgaggcaggccgggggcagctcttgagagaggcttgcaagttgttggtgacacagcaggaggatgtcatgttggagaggccctttctcctcagccacagctacctggatgtctacagaccccatgccgcccgggccattttatgcccttgcagtgagggggctcatgatagaaattcatcattgggtggtgttgatgttcacacccagccccagaggaagctgctaattaatttgtaatttggtttccaataaaagaggccaaacttatcatttggctaaagcaggagtctgggttcctgtcattgatcaccatgagagagcttcaggacacatcttcaaagggtcagccgcatgcctgggccctcattactagggcaggccctccaggagactgccacaacccagcctgtgcctccactggctttgcccactgcacccccgcctgctctagccctgagaagcctgcaggtctgtgcagcagtggctgcctcttttaatgaaagcattccccatgggaagaggcctggctatttaacaaggaaatgtgtgggtggtagaaactgctccgatgctggcagcggcataaatccagcagaaaggaacaggaacctcagaggcttcctaacagacatcatcttcctgccaaggggaagaaaataatatcagtggggagagaatgaactcaagacataggcagcatcacttctcagccttttggctaagatcaagtgtggtatctgttcttatcgtcttaatatctgatacgtcctccatctgaggacaacatattaaatggattttgggagcagggagatggaataagagcttgctctgttcactctacatgttgacctggtattgcagtacctccaggaatgctgcaccccttcaaaaggcaaaaaaaaaaaaaaaaaaaagacccaaacagaagcctaagaatcaggtacatctttccagttggtctcttcctcttggaaaagtccatatcatgaacatctccaggtggcagctgctctgtcttgaccccctctggaccatccattcaattatcactgcaccatatacacaattgtcaagtgctcaataattgtttgttgaacagactgagaatagttggaacaggttctacttttactttctgttgtggcagatggggaaggctcacttcaggatctcagactatggaagcagtgtgaatccactcccttgggaaaggatgttctatagccctggaatgagctaagccaggagacagggagcatatttgcccaactatagaagccctgggcattcacttaagaaggcaacatgctagagcagtggttttcagtcctggctgcaaaagctgtgagcttcacatttagtatgtgtgtgctatatagccacttttttattcagtaatcttcttgatataattttggggtataagtacttgccttatgtttcacatattcccagaaatgtcagtacaagaacaggaaagggaaaatgccacccagctcattcattgcataagaaaaggagagcgtagatatactgcctctgacttgccatttggccttgggaaagtaattttgtctctccagacctcagtttcttcatgccaatcgagggggtcagatcaaatactctcacaatttgattctctgcaacaactacaaattccagtaccttgtctggattacctatttagagaagattatagcatcagatggaaggaggtgtgatggcaataccaactacaagggatgagactcatcaggccacccttcagaatcatagccagcacttgtggaatgtatacaaataccaggcatggtgctgagtgcttggcattaatttgcccatttaatcctctcacccaaaaactataattattataataaggtgttatcagtcactctcagcatcaacctgactcaggaacatgttagaaatgtgagttttcaccctagaagaaagtctaggcaataccattcaggacataggcatgggcaaagacttcatgactaaaacagcaaaagcaattgcaacaaaagccaaagttgacaaatgggatctaattcaactaaagagcttctgcacagcaaaagaaactgttatcagagtcagcaggcaacctatagaatt

SEQ ID NO: 1244203 - DNA, 4001 bp, Homo sapiens
ttaaagatccagtggatagacttctatattcctagctattcaggaggctaaggggagagggttgcttgagcccaggagtctgaggatctgaagttacactgagctatgattgcaccactgccctccagcctgggtgacagagcaaggccctgtctctaaaaaaaagaagaaagccagtggatttaggataaaagctgacaaactgtaagacttccaaaataatatgcttccacattctccattctcatgaatgggttctgtgcataggagaacatcgggggccaacacgtctacactaactcacagtacgactaggggtgtcacgtcacagaggagaagaaggaggaaaggaagtctaaggcctggggaaaggatctctgagctacggtgtgtggtggctctgtgaatcttggagaaagcagctagaacatagctcagtcactgtttgtttaacttgtgttgacaacaggctaaaggaaaggagggctgccagagaagagaaataaacagcaacaccccgcttgcccactcacttggtcctgaagtcatctgaggccagcttggcattgtcgatctgcaccacaagcctggcattctcagacttgctgcacaggatctagaaggcccaaaacattcaagaatgagcaaggacttggtaatttttcaccaatggcagtccttcctaattcacttccttggaaggatcaggatgtctatcttattaaatgctttctatatacagcaggtactcaatgaatatttccaaaattatattcaaaaaaagaacaccaaaatatgcaaaaagtataagtagataatcttttttctatcctaatgagcaatactgagaagctgatcataatagttgacatttatgaaaaacacctactatgtttctggcatgatactaggagctgaggatacaaaaattggtaagcacttgatcctgccctcaagaaactttcaatcaagcagaaaagacaaataggtaaactagcaattgcaggggactggatcagggaagaagccacatgttcccagatgtcccagacaactgggactactttgtcctaggtaatttccaatcttcccaatttgggccaaacattttaggctctcactggacactgtgcaccaggagaagcccagaggcatgaaggtgaggacaatgaaatcaggataagtaggaacctagaagagagaggcagccagcagtccaaggggcaaaaagctcagatgagggagaaagaaaatggcccagtctttacaaaagattccgtttccccagcttcctttggactcagtccttttctctcacctcagggtaataattctggagcttggcaggtgcatggaagcattcagaggtagtttttaattacagctcatttatgcaaagtgctgctacctccacatagactaacactatgcaaatatttagacctaacagtcccaagtctagtattagatgggccctcaaaaaacaaaatggaaaggccagttttcagcttttcattcacatcaagagcttacgttgtttctcaatcacaactcggattctctcccgacaacttcctactggaggcactgtgtcgcccactcctcaccttctgctggagctcctcaatggtcttgaagtaggactggtagctggcacacaccaagggctcctgctgctgtgaccgctcccggatgaggttctccagctccgcgttgtcccgctccagctgacgcaccttctccaggtagctggccaggcggtcgttcaggaactgcatggtctccttctcactgccattgaaggagccctcacagaaccagttgcagttgctcacattggcggggatgttgcaggccccgggcagggtgcagccgtggcagctggggggcacacagggccgggaggagcagctggtgcggcagctcaggctgggcaggccacaactgtaagacatggtgcagggagggagtgtccagctgaagacagagtccaaaatctccaggttgtagagcggtgggtctccttcctccagggagcatttatacctcgtccatggagggtgtggacacgtaagacaaccccttttttttttttttttttttgctcatttggtgattgtcaaaagcccttccctccatttgttgtgtttcttcagaagagtctctcccctcataaaatactttacttgggcttctcgctaagtcgggactcctcttccatgctgtgtgtcatgatgtaagagcttcatggtgtgacttcaaagacctggactcatgaaagccctggccttcttcagtggggtgcagcaggtcaagagacagtattgctgttctgctttgtggcttgaggcccctaactctttggcaagctctggctctccttggtgaaatggaaaagcatagctcttgccctgtgtcttttgctaggtcacatttccaagtgccaaattccaaattcatggttctcagaaagaggaatagatcctttctgggacagttcctgatggccatgtttcctgatatgatgggcttttttcatgtccatgatgacgtcaatcaaccaaataatagatatccactatgacaatttcatccagggcgatgtaatagacactgggaggggtggaaaataggactcaatgctatggtcagaagaagttcttacttgttaagaaactgcacaagcccaaggtagtgtggacacttttcacaaactagatcctttttacaaacatgatcctcaaacatgcagaacttagatgtccattattcctcaccagaactcttaaaggtaaactgtataattcccattttatagatgagaacaccaaggcatagagggtgaggataataagttgtggacctaggattccaaagcagatcacttttcttttcatcacaacacttggcttaaatataaatggcttacttccttcccttcttcagacaggccgtccctttctcctctccaagctctctttttaccttgagcatgacactgtcatgacttatgtgcttgtctctctgtctctatttgaggtccctgaaggcaagggcagggtctagtttgtctttgaatccccagctctaggcacctggtaggcactgttgaatgggtgtgggtagagtgatgaagggatgaacaggaaataataatctgaggcagaagttgacaagtgataactgagtggtttacacactggggagggcgagcagctccaggattggaggctcttaggaatggatgaatggatttgtgctgggatagggaggcttctaagaagcagaggggagaaaagtaggaagtgcaggtgaggagaataatgtgcacacaggaatggggtgggaaagcccaaggcatggttgaaggaccagggtaagtctaggcagcaggaaggggagagttgtgaagggaagtgctagaaattaaagctttatgggggattgtatggggaccctatggtagggggtctcgatggtgaagtggagcagcttggacttccccagaagctgtagagccagtataagcttttgaacctaagtgtggtgtgacaaaaggtgttttaggaaatgttttagcaaatatttatctgtttttgaaaaatgaaggaaagattggaggcaaagagttcagcaaagagactattgcaacagtccatgcaagactagaatttatggcagggatgatgatacagataaggtttagtacaagtgagagagttagagaactgggccaagggagagtacaaagagaagagcaacaaggagctgaggaccaaactttggagaatttcccaatcagagatcaggagaaggaaaaagaatctgtgataaatggagaaatggtgagaaaaaaatgataaaaacaagttcatggcatcccagaagggcaggaaggagggtgcttccaagaggaggtgatgttagaagtgccaagtgcagcaaaggggccgcacatgatcaggaccatggagagggtattggctgccttgaccagaaat

SEQ ID NO: 1244204 - DNA, 4001 bp, Homo sapiens
tcctcccaatagaaatttctgcttccacattccaggatagggagctcatcactttgtaattcagcctgtccgttactagactgctctgatggttaggaaaatcttacttggttctgaagtcatctgcagccagcttggcattgtcgatctgcaccaccagcctggcattctcagacttgctgcacaggatctggggataggattaatcatgaaatgggttatactaagaaatgccttgtgccttaaagtgaaatgctattttctttcagccacattcctcccaaatagctttgagtcctttcagattttcagctctgagataaaaggaggatttgatcataaaactgatcatttcaaaaccaggacaaccaatgtgaattcatcatgaattctattcttatctgcttctggcttcctgcaataattaggttactgggtatccaacccttcggttgggtgaccaaccatcccagttaacttaggactgaggggtttctgggatgctaaaatgggaaaaatcccaggcaagccagaacaacttggttatccaacacattccacctgctaacttctctccactctcccctcatattgcccttgttcatgcctttgcaaaaagcttcttgctgtacccagaatgccctcacccactagcaagaccccttgtgtaacccacatacttaatcaataacacttcttatgacctttgtgtgatcattttgtttccacatctatctcccctgttagactgtgagctcctgaaggaaggagactgtcttactcagtacattatcccccaccccagcactgtgcctaacactctccaactctgggtaaataaatgaatgatattcaaatagcacaacccctttctggcatctaattttccagatctacagaacagtgggcagtcaattccctcccagaatcaagggcttgtacaattggatataaactcccactcatccttcaaaccccactcagacattgcctcttctgggatccctcccaaacctacaccaggtattcagtcccaattctctgtggactctttacttatatctacttctcttccagaacagatggccccatattgtcatctgtacacatggctgctctagaggatggtccatgtgtctgtagatattgctggagtcaacagctctcttgtgttgccataaatgctatattttgctacagctttgaaaggctttaaatatttgaagatttacttaggaaattcttagcatagaaaataattcaggtgcatactttttgaaaatgcggtaatgctctgaaaacaaaaccagggtatcataatcaaaccaaaaaatcagatattctggtttggagtaagacgccatataagattgctatgactgattttggtctaatgcttcactctaacaccagcctgcatccttcctttgtggctctacaacagattttctaagactacttgatgtcatacctaagccagtgaatctatgtctttatcattctcagcattactgtgaacagacttagatccattcacagtttagtatgtcaaatatagataagtagttcattaagctggcagtgtggtgcccacctcctcaccttctgctggagctcctcaatggtcttgaagtaggactggtagctggggcacagcaagggctcctgctgctgagaccgctcccggatgaggttctccagctccgcgttgtcccgctccagctgacgcaccttctccaggtagctggccaggcggtcgttcaggaactgcatagtctccttctcgctgccattgaaggagccctcgcagaaccagttgcagttgctcacattggcagggatgttgcaggccccgggcagggtgtagccgtggcagctggggggcacacagggccgggaggagcagctggtgcggcagctcaggctgggcaggcagaagttgtagggcatggtgcagggaggcagtggagctctggaagtcagtttcaaaacctgattccttttccctgggataagccttggtcctttccagggctttatattctgttagcagtgggtgtggcaaccatgtcaagtattcctcctttttacctcctttgctgatttttccatttgttatttagccacttcacctgagtcctatacctcattaaatgttttactctggcttcttgctaagtcaggactcctcacaaaacatgctgattggttaagtaagagcttcatggtttggcttcaaagtgaccaaccttgcctgtagcagtgcttatccatgggacattgagctagagtgacagctgggccctgtccccagagtagggggcacatatgtgcctctttctcctaaatgaggaaaggcttgtgtctcatccagttcatattcaattaagactctgtgagaaaagccatgtaaggaaacccgtctagaaactagactatgtgatagggaatcctggaagctgaaatgagaaaggacttacaaggccattggttcaaggcccatttgcagttccatccaggcagatggaggcaactctaccctcttcctatggggctgcaggaagccacccacctccgtttctactagtattcagtgttcacagaacattaagaaacctaaattttgggagcacctactctgcatgaagcactgtgctccatgcctgtgcacagcgtgactctgtcattggtgatgggtcctgcttgctgagcctccactgtgcaccaggcacagtgccaggcacctcatatgcaccagctccttcagtcctctcaaaatgctgcaagggtttgtagataaggaccctaagcctctgagaggtctcccaaggtcacagagctcctacatgatggagccagggttcaaatacagatctctctaattccaatgtccacactctgtcatattacatgtctctctcttccaatcttttcagtactgagatgcaataatgcaaaaaatacagattgagctccattgagctcaatcagtgctgacaatatcctaaattagaatgggccaaaaaataacaagcctgttttttacttattaaagaaccaaaagtcacttctatgctgaaggaaggaagtttactaagtgaaaatgcctcatacccactagaagcttgaaaaaaaaaaaaaaaggaaacccttggttgatctgagggagaaatacccaagcctagctctccaaaggatatgaccctgaaaatccaccactatgtcatgtgcatgaagtggcattttatgaccattggcacattttggcaagcagatgctctactctcatgcattccagatggaactatgaaatatgaggattttatgtttaatctatcagtgctcaaattctgaaagatactcctccaagttgttccttttggaagctacatattaagtcttgccatacaagaattcttttcctacaggtgacctgccattcctcagatcacccttccttcaaacttgccttcacagcttgggacacattcttttggttatcctcattgaaggccaatcttcatcttctatgggtgtgtttatttttggaaccagccagaagtcatttgaaaccacacctagtgcatagggtgaataaccaagctgcatagcatctttaatgggtcagaaacaggttgtgactacaaaataataatgtgtgttttcttgggtgactctggaagtcatttccaaggagaagcttcaaatatgcttttataaaggacagcagctttggggcaaacatgtggtcttccagggtgaatgcattgaaggtactgatatcctcccctacaatcacaatccacaactttctgcccctcctgcctgaatctctaattttttttttttttttttttttttggagacagagtctcactctattgctctattgcccaggctacagtgcagtggtgcaatctcagctcactgcaacctccgcctcccaggttcaagctattctcctgtctcaccctccctagtagctgggattagaggcgtgc

SEQ ID NO: 1244205 - DNA, 4001 bp, Homo sapiens
ttctacaagactaagtctaaactccttggcatatgcaagtccttcctcgcttcccatcacatcttcactttcatcccttggaggtactgcatgcccagccatacccagatacaccctgccctgccacttctgtgtctttgttcaacctcttccctcagactgaaacacccaagtactggaatcctcctctttgcatctgagaagagttccctatctcctcttgggcagcctggattatttctagagcatactgcttgtacatctcatatggtacttgtttcactctgtcttgtttatatcactgtgtttatatgactgtctttctatactagactgtgagctcttttaagaaaagggccatgtcttatttcttttttgtccctccatctccaccaccaaattcaggacctagcagtgatcagcagagagcagggctcaatgaatgatgtccctcctcagtaattccaacacctgcctaaccctcacccagccgctgaagaatgagcagctcactccactccttgatatggatgtagcaccgtcactctctgagaacatcttgagttcctcagagaagggtcccagaccagggatccagacagtaatcctctcctgattcccagtgctagtagcttagttctgaggcctgcttttgtgaatttgtttcatacctcctcatggttcttcttcaagcagatcagctcctccctcagggactccacctgggactccaggtcagacttgcagagggtcagctcatccaggatcctgcgtatgctgttgatgtccgactccaccaacagcctcagggactgctccgtctggtacctgcacgtgtcggagtgggaggataagtcaggaaagaaaaccaccttcccctctcatgtgttgtttgggtagaattggcctgaatcttcttgaacttacagttttctgcctcttctcttccatatgcttcagtcaagctgtccatggataggctgaagaggttccctgactcacctaacaccacgaggagcccacaggcacacatgagatgaagtctctcactgtgttctcggttttgttagctaatataccaccaaatcaattcccaaagaacaattcatttcaatctctgaattttgtggtttaagaaacacttccaaaaaaaaccagtatagaccaaagagcaggcagcacatgagtctagttccctatttgaaactaattttacataaccagccctaggaggagaaatagagagaaatggctttctcctctcttccaggcaatagtaggtccctagggccatgaaagaaccatagggaccttgaagttcaacatacttgcttctgaagtcgtcagaggccagcttggcattgtcaatgttcaccaccagcctggcattctcagccttggcacacagaatctgaaaagaaatttctctcatgaggtacacttgaacttgaaaatgtcttactgttcaaagagagccagctgctgctggccccccatatggccaaccccctcaccttctgctggagctcctcaatggtcttgaagtaggactggtagctggggcacagcaagggctcctgctgctgggaccgctcctggatgagtttctccagctccgcgttgtcccgctccagctgacgcaccttctccaggtagctggccaggcggtcgttcaggaactgcatagtctccttctcgctgccattgaaggagccctcacagaaccagttgcagttgctcacattggcggggatgttgcaggccccaggcagggtgtagccgtggcagctggggggcacgcagggccgggaggagcagctggtgcggcagcccaggctgggcaggcaacaactgtaagacatggtgctggaacaggtaatggaaaagcaggtaagctgctggaggtggatgtgggcaggtttgagtctctccttcctctgcagtccttttataccattaattgtgggtgggggcttggcatacagcatagtttcctttcctaatgcttcagctaatttttctccaaaatatgctagttagatgcttctaaagagtcccccctcaacccataaaattattccattcagcttatgtcacaccaggctcttcctgggtgctagtggttggtgaaatcagagtttcatcagatggcttcataggagatagaatcatcacagccccaaaaggctgtctgcattactcagaggggaggacagccagggacatggggtggagttgtttgggaatcagggattcctcacccaggagtttccgccactgttctttctccccagagagagagctctgagagagagctttgagagttactcttccaagtagctctttcctcccacattcatccatgtttcagcattcaatttgtttttatagcagaaactcaacctgtattcgccgaaatgatcctgagccttactattcgttggggtttagggaacttgccaacacatggagcaactgaaaacaatggcatgttcatggttgagaaatgagaaagtaaaatggaaaccaatggaatggatgggagtatacctaaaagagggcatctgcaaatggcagcccacacgtcaagtttaccctgctgaatttttgtaaataaagtttttgtttgtttgttttctgtttttttttttttgagacagagtctcactctgtcgcccaggctggagtgcagtggcacgatctcggctcactgcaacctccacctcccgggttcaagcaattatctgcctcagccccccgagtagctgggattacaggtgcccgccaccacacccggctaatttttgtgtttttagcagaaatggggtttcaccatgttggccaggctgctcttgaactcctgaactcgtgatccgcccgcctcggcctcccaaagtgctgggattacaggcgtgagccaatgcgtccggcagtaaataaagttttaatggaacacagccatgcccatttgtttagctattgtatatggctgcttttgtgctacagtggcagagttgtgtagttgtgacagagactatagtgtccacaaagccctaaaattaaaaaatttgccaacttgtactaaagcaacagcctctctaaagatgagcaagagtagaaatatctagaagaaaaaatatgctggaaacagtctggagcagtgagagttcagatggcagcactgaagcatgaatatgaagcataatactgcagactcaccaagaaacgaaaattggagcaagggtgctcagaggtatctttgtatccatggtggctttttctcaaattctctggaaatttctatcatcttatttctagacttgttcctctttctagagtattaactctcctagaggtatgactatgccagcctgagatgcttccaggacaagccacagtgcccatgagaatgcagatttactctgttgtccctacaagtagacactgtctctgataagtgtgcttctatcacctctgggatccagttaccctttgactcttgcataacctagggagcctctctattgcccaataatcactcttcacagaatagccttccctacctcacttcttttccctgtcactctaccttgcctttgttccgcagggaaacaaagtcatgtttcagaaagaagtcccaaaagattatttgtggaacacaatacaaatcatttaaagaaggctgcatctgaatttcaaaagcagcatgagaggagcagaaaagcacatcttcgattttatttatttgagtgtttcctctttttttcttagtctatctagaggtttgtaaattttctgtgtctttcaaaaaaactctgtttcattgattttttgctattgtttttctagtctctatttttatttatttctgctctaagttttatcgtaagtatcataataaaatttagagcaaaaagtgttattatatccttcctgctgctaactttgagcttagtttgttctttatcttttttaattttttaatttttgtaggtacatgg

SEQ ID NO: 1244206 - DNA, 4001 bp, Homo sapiens
ccccatgctcacctcctctgcatgctcacctgctctctatgctcacctgctccccatgctcacctcctcttccctatgcacacctgctccctcatgttcacctccccctatgctcacctcatccccaatgctcacctcctccccatgttcacctcctcccccatgctcacctgctgtgccgtgttcaccttttcccccatgctcacctcctcatggttcttcttcaggcagagcagctcctccttcagggactccacctgggcctccaggtcagacttgcacagggtcaggtcatccaggatcctgcgcaggccgttgatgtctgactccaccagctgccgcagggacacctccgtctcatacctgcaggcatagaacagggcacctgagtctgcatttcctttttgcatctaagtcaggcctgccctcagactgtccaggtgctgtgagtcctgcttttatgccccaatgacagagtacagccaaaaccctgagctcaggcatcacctgtgtccagttctagcagcccccaaccacatgacaagcaggacaactcacttggtcctgaagtcatctgcagccaatttggcattgtcaatctccaccaccagcctggcattctcagccttgctgcatagagtctggagatatgaagaagttatttcattgcaagaaaggacattccacttgttggagctccctaaagctgacaagggctgactctggaaggaggaagtcacccatcctagacctctgctactccatgtgcattggagtgttatgggcaggctctagggatcaactatggaaagtccagggtttcttccagtgcagtgtatctgtgacctgttactcaggttagatagctgcatgaaaatgcaacaggaaaggcctggcatgatgaaatgaggcttcttccaatctccctgtctcccaggcctactgggggcccagggcatttcattgccaacaacataccccgggattctctggtcataaatggtccctcacaggagccagctataactttgggccaggcgagaagtggatatgggcccttggcaagaaagaaacttctctgacaggcattttcttccctgagttacttatgggaagcctgaactgcactgcactaaatacatcaaacccaatcccctgactttaaataaaagaggaaatgaaaactcagaagactcagaggattgggcaataccaccaaaggtcacagagttcattcatagacctgatgttcaagctctggctccagtaactgccatctgggtcgcttacccagcctgaatctcagtgttctcaactgtataatgggctaatgatacctccctcttaaggttattgggaggagcaaatgaggccacagagatgaacatgcttggtgacttccaacatgccctatgggaacagaactaccaatgaatgctggtgacacaaagttcctgggaatccaaagccactctgaacctcttaccttcttctggagctcctcgatggtccggaagtaggactggtagtcagggcacatgtaggggacctgctgctcacaccactcacggatgcggctctccaggctggcgttctcctgctccagctgacgcaccttctccaggtagccggccaggcggtcgttcagggattgcatggtctccttctcattgccagtgaggatgccctccccaaaccagcccccacccccactgtagctggtagcgaagcctccagcagggaggcagagagcagggaggcagctggtggccctgtagctgcttctgcccagacccactgagcaggcagagaaacttctggccacaggggagagacttggaagcttgcaagagctgctggagtacattgcggacacacgagtggagcccccactggcccctcctgggctcttgagagacccagaagagaagccggccttgaggcatttggaagccatggcccctgcaactcagatgcaattgataggtctctgaggccagacaccccaaagcagagaagcagctccttaccccagatttatatctctgccccagtgggcattggttggcctttacaaagtgttttctcctcattaaagttaacaccactttctattaaaacccctcattaacctgttatttagtttcctgtgaaaatttaccagtctcataaaataggagccccattactatgtcaagactcatctccaccaccccacatcactgggaagaccaagtccctgtcagttcttcaaagggacctgtcatttgagcccagacctcagcctccgcattaagcaagcatgggagttcagccactgtcttgactttctccaactttgacttcttttattggcctgagggagtagaggaggtctctggggtgctcccagaagatggaagggtaaacttggttggtgcaggaaggcaggggtcttgcagccagggagacacagaaggctcttgaattggcccagaaaatatggctaaggtgaccaattttcttggtttccccaggaattttctggctttagttccgaaagttccatatgccagggaaacctcagtcctcggtaaaatgggacagcttatcaccctagatactgcagagccctgatggacacttccctactctttcccttgccaggaagtctgtgcaggttgtagagcctaagttctagccacaatgcctagagatcagttaattggacacctgcccatgatgacatctaggagggcatgtcttccccagccctggttgagaaatggagaagcccttccttctggctgcctgaattggagctcttttcacacagccctatcaataacccggctgatggtagcaaccatcattcactgagcatttagtacccaccagcccccacgctgatctgtctctatgcattctcttattcagtcctcacacaaactcatgagattggcatcaccaatagcccattaaatagaggaggcttggactgtttcaggagcctgtcccagatcacagctgaaaaagcatctgtacaactgttcaaggcatgctatcttctttaaggcctcacacacaccctccaacacagtcgtggatagaaaggtgctgactcctacagaaggagacaatggtcagagtagaaaatggcttacccaaggtccacacaggcttcccagggaggctaaagcccaggccttgcagctccaaaccacaggcccaccccactgcctctaagggcccagtcctggccaggccttcccccgaagtctggcccctgctccagccctgctgtgccctcccagctctgaatgcccaaggcagtgactattggtagatttcttggcctccaattaactgacgtcttctgattgtcttgtgtttcagccctattttcccagggagactgtaagcatgggggcaaggattgaccttgtactttttttttaaatctctgtagtgttaagcacagtgcagggcttctagatgtctatgaattaattaattaattaagtgatttttcccacggtgaattgtgttaagaaaggaaagaaagaatgggaggaaacaaaagagagtagggagcggggaaaggaaaacacagtcaatcttaactattcctacttcttttttttttttttttgagatggagtctcactctgttgcccaggctggagtgcagtggtgcgatctcagctcactgcaagccccacctccagcgttcacgccattctcctgcctcagcctcctgagtagctgggactataggtgcccgccaccacacccagctaatttttctttttttttttttttttgtatttttagtagagacggggtttcaccgtgttagccaggatggtctcgatctcctgacctcgtgatctgcctgcctcagcctcccaaagtgctgggattacaggcatgagccaccacacccagcctactattcctacttttgtaaatgaggaaactgagactcagagatggaaggggatccggcatctctgtgtagg

SEQ ID NO: 1244207 - DNA, 4001 bp, Homo sapiens
tctctgagccttggtctccttctccgtatatacctacctccttctatgggatatttgtgagatgatacaaaccctaggcaaattaaattgctgttatcaggcactagagcccaaatagacatgtagtgttatgggcaaaagtgtagaccctctatgaccttaggcaagcaacttaacctctttgtgcctaagttttctcatctgtaaaatggagcttgtaacagtttataattcttgggattattgtaaggatgaaatgaaacgagaatgaaatgcaaggcctttgtatagttcctgccgcacagaaaactgaaagcccagcagtggcttcctaagctggatgggaaacactgggaagtcacatggcaccagcctcacctcctcgtgattcttcttgaggcacatcagctcctccttcagggactccacctgagcctccaggtcagccttgcacagggtcagctcatccaggatcctacgcaggccgttgatgtcggcctccactagctgccgcagagacagctctgtctcatacctgcacacacagaaccctgccaagtctgcagcaaaggaaaccacacaccagcagggacccctgccctactgtccagctgcagtggctgacgggatcaggagcatgacactcctttcccctgaggtccagggctcatgccacattttcccatccagccttattcccacatcaccagctcccaaaggcaggggacagaggcaagggagtggcatggcaaaccttccctgatcaggcccactcacttggtccggaagtcgtcagcagccagcttggcattatcaatctgcaggaccagcctggcattctcagacttagtcagcaggatctggggaacaagaggcttcccataagctacaggaggcccagcagtgtgggggcaggtagggggatagctcagctcacagaggccatgccactgtgtaccaccagccccttcaccatttccagccctgagccacaccccaggtgtggggggagcatccaccccacaggggcatcccgaggatgtcagtgaccatcagtcctggcgcctgtagccttcagagtggcacagcaagatacaccagggtgaggcagacctgagttcaggttctgcatctaacactgagcctgtgtgctcttgagcaagttgctgaacccctcaaaattcaacttccacatctgtcagatgggtccagtaataccaatctctccaagatgaagaataaataagccagggaataggaaagtgtcaggcacagtgctgtatccggtaggggcttggtacatgttccttcccttcctacagcaaggggaggggggtgaggaacggctggcaacaaggtacaagcaagagaccagcagagaagcctgggtcccccaggaaaccaaagccctagagagaaaagtttgccctaccaggagaattccctaaaagctaccgtcccatctggaaaggccctggaatgagacagacgcctcctaagagttgggctgctcagctggaaaggggccaggtctccctcaccttctgctggaaatcttcgatggtcttgaagtaggactggtagtctgggcagatgtatgggatctgaaactcgtaccactcctggatgcggctctccagctccgcgttctcccgctccagctgacgcaccttctccaggtagttggccaggcggtcgttcaggaactgcatagtctccttctcgctgccgttgaaggagccctcgcagaaccagcccccgctccccacaaagccagaggtgtggcactcagaagacaggtaggagccaggcaagcagctcccaaggccagagaggcccgacctagcagaagagatgtaccctgcagcaccggcgagactggggaccctgcaggagcccacagaacggatggaggacacccgagagatgccgcctgctgtgccacagaggcccttgatagacccagtggagaaggtaggggtgcaggtctgggtggccatggtgctagcagaggaaggttgcagcttagcaaggagctcaggttctggactctcaaggcctctatggagcatttatgtacactcaccattgggtgttggcatggtacacatctcttgctcttgggaaagcctgttcctaccccagatagctaatattagaatgtgatttttgctacccatccggaaccccatgccttgtaaaaaaaaaaaaaaaatcaaatcgttgaatttggtttgctaagtcaggactctccactgttgtcatttcctagcagaatatgagttttattgcctcttcaaagagtctctgcaccagatcccataaatcgggagtggctgcacgaatgacatttggttcctgctttctccacctcccttcccctggggatcctcatctgtcccttgtcacttccatccactgctgccacgcctcatagctgctcacccctgcctgggctactgggatggtaaaagggagcaaaggaactaaaattcagggagcacctgtgatgtaccaggctcattgttatttcatttacacctcgtaacaaccctaggaggtggctgattttatcttcatttttaccagtgtggaaactggggctccgaatggtttaatagcttgctcagtgtgaacaggaagtgactggcagagcttgggtctgaaactagggctctcagacaccaaatcctacttccttgccccactgcttccccacacaactggagtcaagtctgggtacccagaatttagggacaggagacatagttcaaatcctggctctgctactaatttgccctgtgatactgagcacatcatttcctccctgggaacctcagtgttttcactggaacagtagagattgtccttctgtcccgcctgcttcacacagatataaggaggatcgaacaagaagtgaaagtgttttgcaagccactgggtcctgcagaagtgttggttggttaggttaggttaggttaggttaggttaggttaggttaggttaggttaggttgacagtctttgatgatggtttatggctgtgaccagcaaaggttcgtgagtgtgagcattcacatggcactgctgagaatggtctgtctgcccactgggcacagcagggtggcagtgggagaaggagatgccccatagccagtccctcagtcaatgaacacatcatcacagactcctgctattatggaatctgcatgcttggatcactgggcagagctggagggcagtttcctttgtggccgtcagctttttgaacctcatgggtagaatcaggaccctagaacaacctgctctgaccctcctggtcccttaacaggtcacagaaatggccaatggcagactctttggacagaggaggaatacaaagaaaaaagctaaatactgccagatagttaagcaagccgagagagaagaacctgagaattggggaccaaagataaacctgggtcttccgccttgaaacatggactttcccaaggcttgggaaacctgctcactctgcccccacacacgcttggtttgcaaagctggcgtttatggaagcatttatgtgcttctaaggttgtaatttgccaacctcttaaaatgttttataagcttctctctgaaattatccagggaggattggctgtggtgaacatgcctctcccagcaaggtggacaccttgacaagatgtccaggagcagctggcagtggaccccgtgcagcccctctgggagcaagagcacagcatcagccctccagagcaccagctgccccagcaatggcttcctcacagccacccaatctccccagttctcctggcagggcctaggattggattgtcatggggtttcccaacctcagcccttcgtgccaggtcattctttgttgtttagggctctcctgtgctttgtaaaatgtgtggcagtatccctggactctaccaccagatgccagtagccaccccctgccccagtgttgacaaccaaaactgtctacagaca

SEQ ID NO: 1244208 - DNA, 4001 bp, Homo sapiens
tgcatttgggagagcccacctggacaccttcctcatgcccaaggcaagtctgcactttccacagaggccctctggaccctcagacccacctcagccctgcatccttaggccagctgagcccaggcaatgctctgagagccccagggccggggagctcccctgtctgcccagcgccctccccaggagtctgagcagccagggccacacctgctcgtggttgctcttgagggagagctgctcctccttcagggactcctgctgggcctccaggtcggccttggccagggtcgcgtcatccaggagcttctgcgtcccgcacttgtccgcctccaccagctggtgaagggagcgctcactctccagccttccgtcacaggaggcacagggtcaaaaagaatgccccaatagcccctctcagctgccctggcttcctacctcccacaccaccttggatccttatttgttcacgtgggcagtatacactattctcaaccctgcagcgacacggtttgtagtcaggacattatgcccattgaccagatggaagactgaggctcagaaacaaaacacgagttgttcagaattccatgcccagttaatagtaaatgcatggactcatcctaagtgttctgacttcaaatgcagcatttattctgccataataggagtcatttggccaggaaaaagaatggctaaaaataagcctctggaccttcagtttgctgcttttcctcttggattcattatttctcgttgttttcttgcttttccccttcattcaagcacaactctagctaccaaggagcttcaatgacaattcctccagctgatggatttggccaagagtcagagagtctagcaacaacctatgcattgacagtttatttttgtgatgactcaattttacttctgattgaaaagcaaaatcctcttatcttctagatatgggagaaagtgacataggttctaaccaatctagactacagcccttctttttctttcaatgcttatattctctttcctcctatataatgaccatttctagcaacaggctaatttaaggtgtggagagaaatattcttctagtcaaaaactgtttttgaacacctacaatatagactgagtaatggggcgggcccttggaaatacagcaggagagaagtcacactgaccctcctcatcctgacttacttgatcctaaagtcatcagcagccagcttcgcgttgtcaatttgtacaatcagcctggcattctcagccttgctgcacaggatctgaggaaaacggaaagacggttcacacacaaagcaccatactctaagctcccactccatgtgtggtatttacgctcatgtccaagagaaaccaagaacccaaagctctctggaccttatgcagattcctcctgcgaaggcttctgccttctcagacccagcatgcccaggcgatcccacacctcaccttctgctggagctcctcgattgtacggaagtaggactggtagtcggggcacacggtggactcgtggcacttgctcctctcgaggagtgtggtctccagctctgcattctcctgctccagctggcgcaccttctccaggtagttggccaggcggtcattcaggaacttcatggtctccttctcatggccattcagggtgtttttgccgtaggccccacagattccgatgttgccgggaatgtgacaggtccctggcaagggacaagcagtgtgactggttgggggcagacagaggctggggcggcccaggggagtcgaccccacacggactctgttggcgtgtgccacgttggccaagaggcacatggaggcagcattggcctctgccacaggctggcacccaacatcgataggagagacaaagacatttcttgctccaggagccatggtgcaacccagagggcatgaggaggtgctgtagaaggaggtcatggtgtagggctgaggctgcacaggagcttcagatcagctgggaaggctgagccactgagactgaagcctcctctcctcccaacccttttataccccatcctgggcgggtgttggctccagtgctttgacctcctgccttgattatctacctgttgtggtgccatcatcctgttactcagctgctgagtttaccatgagaagttcctcagctcattaaagcaatgttgacaaatctgagatgcctcttggctcttccatatcaggttagctgttggtgggaagtcagagactcactgtttctgctcaacaaacaccagcagttgattcaggccccaattgctctctctggactatggtctctgtggatgtggtcacaatgaaggctcaaatctttccgtcagtaatttgtgtagcaggagacacagagaaccaatgggacccactggatctttcgcctgtgcaagactgaatcagcctttcctttgaagagaaaatatcagttaataaaaccaatgcatctactgatatttgacgattgagaggcgcctttttttctttcttctttcacattgcatactcccttgagaagcaataacatctggaagcaatggcgctaattaagttttggttgactagtcagaatcagctattcattcatttgttcattcattcattggttcagcatgcttcctgaatatcccccataactcaggcagtgtgctggttcctggacacgcaatgttccctgttcatcaggagtaaacaatgcctctgaaatctctggatgttctacacaaacttgaatgagaaccatagatcaacaagagttagtgaaagacagaggatctatagttctggccaaggaagtatctagaaagaaatcactaacaaagaaaaatcttatttgatccaggaaagggagattgggcacagagctcaagcagtattcaaatgaaaggtccagaactaacattgattgagtacttaggtgtgctaggcattctactgtgttctttcctatctaacccttaccacctatgaggtggttactcattgcctcaatgtacagatgagaaaactagagtgaagtacatttgcacattttctgattgacagttagtgaactggcaaaggctcgattcagtctcatgtctgctaggcccattctcttttcacttcatcatggcccccggtgagaacaacggtgtcattgccccgtcagtgctgggcctaaggagagggcaagaaggggcttagttactggatgagaaattgtggtgaaaagaaaattactgaaggtctttgtgttccagcaaaggaaaagatttaaatactatggcagtgacaacaagaaaatgcactttaaaaagttaaactaggccgggcgcggtggctcacgcctgtaatccctgtactttgggaggccaaggcaggcggatcacctgaggtcaggagttcgagaccagcatgaacaacatggagaaaaccggtctctactaaaaatataaaattagccgggcatggtggtacatgcctgtaatcccagctactcaggaggctgaggaggagaattgcttgaacccgggaggcggaggtttccgtgagccaagattgcgccattgcactccagcctgagcaacaagattgacactttgtctcaaaaaagaaaaaaaaagttacgctagtttgtaacatatgcatcatttaagacagggtgcgtcctgagaaatgcgtcgttaagagatttcttcactgtggaaacattatagggggaactcacacaaacctagatggtagagcctactacacacctagactgtatagcacagcctatagcacctggctacaaacctgtacagcatgttgctgtactgagtatcataggcaactattattaacacgataatatttgtgtatctaaacatagaaaaggtaatgcattgcactacgacattataaccacttccacatcactagagaataggaattttcagcatcattataatcttgtgggaccaccgcccgtatatgtggtctgtcgttgacag

SEQ ID NO: 1244209 - DNA, 4001 bp, Homo sapiens
cgctcactctccagcctttcatcacaggaggtacagggtcaaaaagaatgcccccaagagcccctctcggctgccctggcttcctacctcccacaccaccttggatcctcatttattcactctgtttagccctctgtcctcaaaggtgaattagacccagcccctcttctcaaagagctcatggtctaatggagaaatcacaacactacattgcacaatatacatttttgccattgtattctgtggcaactgcagttcaggaagatcaactgacttgcgtaagatcatgcatcttgggacccagtccaacgctcatgccattgcaggggctgtcagttaccaaagataagcaataaccaggtgcctgatcgtgatctgcggctccttatcccttgctttcagctgtcttcccctctctcatttttgcctaggtaccttatacctggtaccttagggctccctaattaaatctggacaaagactcatctgtaagtgactcctctgacttatatatgaaacccaatggctgtcttgctcagttcatccttcaaatcacctcattttgctcctggttaatgaactcaggctgccttatcctccattttagggaaataaatgaaggaagacaaacatatatgcttggattaatgaggagttttcccttccatcttccatcagcttcgattgtaatgaaaattttactgtagagaatctagcaaggaagaaatgacaatgattccctcactcaacaagtatttgggcattgggatggagggtggggaaggagtcaccctggccctcctccgcctgacttacttgatcctaaagtcatcggcagccagcttggcattgtcaatttgtacaatcagcctggcattctcggccttgctgcacaggatctgaggagaacaggaagacagttcacacacaaagcatcatgccctaggctccttctccacgtgtggtgtctatgatcatgtccaagagaaaccaagaacccaaagttctctgagctttacatggattcctcctgtcttgcctctgccatctcagacccagcacacccaagcgatcccacacctcaccttctgttggagctcctcgatggtgtggaagtaagactggtagtcggggcacacggtggactcgtggcacttgctcctctcgaggagtgtggcctccagctccgcattctcctgctccagctggcgcaccttctccaggtagttggccaggcggtcattcaggaactgcatggtctccttctcatggccattcagggtgttttcaccataggccccacagattccaatgttgccaggaatgtggcaggtccctggcaagggacaagcagtgtggcaggtaggcggcagacagaggctggggcggcccaggggagtggaccccacacggactcggttggcatgtgccacgttggccaaaaggcacatgggggcaatgttggcctctgccccaggctggcacccaatgtcgatgggagagacagagacatttcttgctccaggagccatggtgcaacccagagggcatgaggagctgctgtaggaagaggtcatggtgttgggctgaggctgcacaggagcttcagatcagctgggaaagctgaaccactgagactgaagcctcctctcctcccagcccttttataccccatcctgggcgggtgttggctccaatgctttgacctcctgccttgattatctacctgttgtggtgccatcatcctgttactcagctgctgagtttaccatgaaaagtttctcagctcgttaaaggaatgttgacgaatctgaggcctcttggctctttgaaatcaggttggctgttgatgggaggtcagaagctttttattatctttcaaagaagcaaagttatagccatcagatgcttagaccttgactgggtttggcctctttatggatgtgtccactctggagacacaaactttcctgttggtcagtggtgtagcaggaggactaaccccggtgatgacaatggttctcacttgggttaagactcaaccagccttccctatccagggaagaaactgagtcttggaattggtggatgttatggccttgggttatcaagaagtcctacatttcttctttctttagttggttgcctttcagactcactttgaggagcaacaagacttagatgaatccagtcactcaaaacacatcccctggctacgtcccatatgctacgcaccttgctgatgcttgatatatagttggttaagcacaaaatagttcctgccattggggaacaactgtaacttgggtagacgtgatgtttcaaacaaggtatctgagaagctcatgaaaatgaggatgactccaaaaaccatggcttatctcgaccaagaagggcaagctcaagaagccagaaataaacaaagagaaatgagcaataatcttactgaacctcaaataagaacttggtcatgaaagtcaaaggacattgagtgatcagagcctctgtgggctctcttcataccttgcttcctttattctaaagtcagtcatgagccttcaccctatgagctaggggattgagcaatgataccttttaatctttacttccaacctgggaggtgggtactcttaattttacaaaataaataaacaagccattgaggacagttttctaagatcaacctcactataaagtataaagcctattctcaacatcagcttctttcaactccagaaactgtttcttcaccttgaccacctccaaatcctccaccccaaggataactactgtgtcattgctagaactaagaaggattcaaattcctagaaaccgggcaagaagttgaaattaagatgtaaaacaaaaatctgacattgtgtatttttccctttgtatctcagaaaatacagatgtggaggtattcatacaataaaacagagtttctccaagggctaaatcagaagatgccaggggaaagtcctgtccctaaaatggttatattacacattccacattcagatagttcttggtactagggatccaagacacatggctgctgagatcccaaaacttttctcccaaaatttgtgacagaagatacatagacccctgagactaagaaaaacctaatgtggaacaatccaaagtgattataactagaattttgggaaaatgagtttttgccagtcccctgagcattgaacaaaagctgaacatacacctctatagggatcagacgtgcatatgtgaaacacaggctattggagttctatcaagaagaaatacagaatctgagaattcagtccagattgggcttctcaggaaagtaagtagtagtgagcgctgacctaagggttattcagagctcaccaatccataaccctttacagacaacatcattgggagacatcaccagggcaggctgtcccatcctccagaggccactgggtgcaatctgcatatgttacatcttcaaacacccttttgttactctcctccgcctcatcacatagcaacaagcttctctataaatcagagagccaggcttttaaagtcatttcctttgatttgctaagtagcacccatcttttggctttatcctctgcccagattcattccatggactaaaagccacgatttcgtccattcacaatacatgactcatcactgctgaagccttgtgtgtccagatgacacccctctctgccaactggcttgggtcctggcttgggcttctaccttgtactgttttgcataatgatactgatgttgcatggctctttgtaaaatcgctttgttcccctgatttgtattttctcaaaggaggtgaaggagcgggtggggatcctaagactctcttccttcccaaccctttaaaaagagtccctgtggcccctggtgaccgaatatgaggccaggttcagtaacaagaagtgatgaatacagagtgtgagagatgggagcctgctgccctccttcattcacctgtgtgcacaaca

SEQ ID NO: 1244210 - DNA, 4001 bp, Homo sapiens
tctactaaaaaatacaaaaattggccgggcgcagtggctcacgcctgtaatcccagcactttgggaggccgaggcgggtagatcacgaggtcaggagatcaagaccatcctggctaacacggtgaaaccccgtctctactaaaaatataaaaaaaaaaaaaattagctgggcgtggtggcgggcgcctgtagtcccagctacttgggaggctgaggcaggagaatggcatgaacccaggaagcggagctagcagtgagccgagatcgcgccactgcactgcagcctgggagacagagcgagactccgtctcaaaaaaaaaaaaaaatacaaaaattatctgggtgtggtggtgcgtgcctgtagacccagctactagagaggcagaggagggagaatcgcttgaacctgggagctggaggttgcagtgagcagagatcgcgccattgcactccagcctggtgacagagtgagactccatctcaataaatacataaataaataaataaaaaataaaataaaatccatcctaaatttatataaataccatgatccactagaatgtcaactccatgagggcagggactttttaaaggtcaccaatattttcccagaatctagaacaatgtttggcccaatgttgttgctgctcagtaaacatttgttgaatgaataaaactgaataaatccagatatgtagtagcagaatacgtctgtgcataacaaacttaggtttggtgtagaaacaaaccaagcaatgtggagatgataacataagcataaaaggagaaaaaggtggtgatggttgaaaaatggataaaaactaaattgcttagaaactcattaaagcaaaatttattttctctgatctctgtttccctatttttatttaaaaaatggcaacaacttgctgttaacatcttttggtcctgagtcatctagttataatggtagagtgtatttctggagaaaggaaacaccatgagactcttctttttgtttctgatttttaaagacatagtctcacttttgtctgggctggagtgcagtggcaggatcttggctcatggcagcctcaacctcttgggctcaagtgatcctcccacctcagcctcccaagtagctgggaccacaggcatgtgccaccacgcccatctaatttttttttgtgtgtgtatgtgtgtgtgtgtgtgtgtgtgtgtaaggatggaatttcatcatgttgcccaggatggtctagaactcctgggctcaagtgatctgtctgcctcagcctcccaaagtgttaggattacaggtgtgcatcactgcgcctgaccagaaatactatcagactctgaatgctgcctcaagatgacaatttcactcaagaaatttttctattcttcaaaaaaattttcagcatcaactgaacaaaaaatattaaagtttagcaaataactgttgcttggaaaccattaattcacaacacgattaaacaggttcttaggaatcttaccttctgctggagctcctcaatggtagtgtagtaagacaggtaatcaggacatagaacagggagctctttgttactttcttcctggattttagattccagttcagcattctctcgttctagcattcgcaccttttgcaggtagttagcaaggcgctcgttcaagatttgcatggtctccttctcattactgttgatgccttcaccataccagctgcagtcatccagagaaaaacgggcattgaagttgttcattaggtagatgggcttgcgacaaaagcgaggagtgggttggcagccctggtcccagggaattctgagaacgtggccagctggttgacagttgttgactgtaaggccaccaggatggcagccgttgttagaagagatggtactaacatttgtaatcctagagcagttttgacatggggttgaaggagaattggttgttgtacagcccttggtgtccatagtatgtgtctggctttagtttgttccaggtctgtggtcaccaggatgaaaagctcaagccacctccacagagtctgaattccaaggctcttggtgttttcctctttgaagtgcttatatagcctctcttctacgtggtgtcacacaggtgggatgttttcctttctcaggtttatatcaaatcctgtaggaacatcttattagtctgctttttacttgcttaagaagagttatttgtctcataaacatgtgcatttaggctgttagtaagttattacccatcataactactacttgtctattggacccagagcttcaaattatgtcttcaaaaggaactgtcctaacagcatccattattaagcaggtgtgagtatactaagttcattacattcttgttgacctctccacttggcactgagcttaaccaggaatgagttcatccttcttttcctttcttctctagaaaagggaaactattaatgtttaataattattggtaaacttagaaatcagaagtcaatattttagtttgttctgcccaaatggtttccccattttcagtgtcaggacaatgtgagtatgaattaaaatgttagtcttttaaaagtcttgttttaaagataattgctagatttatgttttagctttccataaaatgtaataacataaaataaaatataaataaaatatgaaataaaataaaagccatggggaaaaggtagggtttgattgctaataagaaatttcttggaaaagagactagctctcttttggttttccaaagtccacattttataacatttttagtgcttggtgtttgcttgtggtattacattagataaaaatgtatcacagtgttggtttatactggatgtttaaataggattcattgaaaggggtgtgttttctttctgaggaatacttactcagcattttcttcagaaagttacttgctgctaatcctttatggaggctctaggggaacatcattttcttgccttttccagcttctacaggctgtccacatcctcagctagtggccccttttcatccttttttttttttcttgaattatgagattttttgtactttgagttctgggatacatgtgcagaacgtgcaggtttgctacataggtatacaagtgccatggtggtttgctgtacccatcaacctgtcatctacattaggtatttctcctaatgctatcccacccctagcccctcaccccctcacagtccccggtgtgatgttcccctccctgtgtccatgtgtgctcattgttcaactcccacttatgagtgagaacatgcagtgtttggttttctgttcctgtgtgagtttgctgagaatgatggtttccagctttattcatgtccctgcaaaggacatgaactaatcctttattatggctgtatagtattccatggtgtatatgtgccacattttctttatccagtccatcattgatgggcatttgggttggttccatgtctttgctattgtgaatagtgctgcaataaacatacatgtgcatgtgtctttatagtagaatgatttataatcctttgggtatgtatcaagtaataggattgctgggtcaaactgtatttatggttcttgatccttaagaaattgccacactgtcttctgcattggttgaactaatttacactcccaccaactgtgtaaaagtgttccaatttctctccatcctctccagcatctgttgtttcctgactttttaatgattgtcattctaactggtgtgagatggtatctcattgtggtttgatttgcatttctctagtgaccagtgatgatgagcttttttcatatgtttgttggccacataaatgtcttcttttgagaagtgtctttctatatccttagcccatttttttgatggggttgtttgttttttcttgtaaatttgtttaagttccttgtagattctgtatattagccctttgtcagatggacagattgcaaaaattttctcccattctgtaggaggctgaggcagaagaatta

SEQ ID NO: 1244211 - DNA, 4001 bp, Homo sapiens
tcagagtaggggcaaggaacccacaggaatcttttcttctgagatgtagagcctgttttctcctatttatttatttatgaaggcctgaatttcatgaaaattgaaaatactggaacttggaaaataaaattctatttaggttccaaatcagtaattccactggatgaaatctctggtgccaaatctgacagacaggaacttgagatacgtaatttttttgaattatctcttggatttcacctccattgtgaaggataatctatttcactttgcttggttttagtcgttacatttatttcattttcaaaggtgcatagagaaaattgtctctagaatttttaagaacattataggaaaaaaacagattaatctgaaaaagttaaaaaatttttgatccagaataaacttattttttctcctaatcttgagtgctacttcctaggtacctgatagtagaaaccaaaccaaaccaaaccagaagaacatatgtaagtgagttaaaatagtctcttaggatttattactccctgggcagagctgggtttgaatttagtgattctctttacacatcaacacttatgcaaaaagttcttagagtgtctcatggtatattgacgctgctctgcaacaaatatgagttcaaggattcaaaaacacttctgaaaaattacaaatctctgaaagaaaattatcttttcacagtaacctaatgagtcaaaagaaaaatatctgtgaagaaaacccatgttttggttgtccatcacaggctccagttagctaaaatgcagtcatgtaagtgcaggtaaaataagaaatatttccttctgtctggaactaatttctaattgtaaattatttgttactggttattgtcctgcaggtaggactatttattttggtcttgattaattaggtagtgttgtataatgatctatagctatagtctccatcgtagaatatagaaatcacccagaattcatttctgtggagtcctccttagggaaaagaagtcaggctggcaggaccagaggaaagcaagttagtgggtgcagcgcaccagtatggcacatgtatacatatataactaacctgcacaatgtgataaataaataaaaaaaaccaaaaaacaaaaaacaaagaaagaaagcaggtaatgtataagactcaccttcttcatggtccaggacacatagccctcctgcacaatattcctgcacccagctatcaccagaccttcagctgatagaaaaatgtaacttagctcactgcaaccttagtgttatcagtaccacacaaaccctcttcagcacacagtacaagcaccatcctgtaaaatctccagcacgcctttgtctccttgcagacagccccttctctgctgtgctgcccattgcttccttgcaacgtattttcatacgttctctaatatatctgcctttctttacctacaactatcttgataaattcttcttacccccatgccaccagccccagatagttgctaatcacccgtgacaatttctatagcatatcatcaccagaagaaaggaacattgggaatagagaaaaagaaatagacatcatgaaaggccatgataaaaaaaaaaaccgacaacaacacggtagtttattttgcataatactatgctcttaccttacaacatccacctaggctgccagaatcattttcctaaaatacaaacctgctttttgtcgccttccacttatggaatgcaaactttctaccttggcaaatatgaccttccctaacctggtgccaatttacctttctgggctcacttcctgatgttctgtctcacaaaccctaagctccagccatccttcaagcttcgtaggtactattttcttggtcaaatgctcttctgctattcgtttcctggatgaactcacatgtcaagactcagctgaaacgtcgttcaactgcctcatgtggagatgtggctcctcccagagcactttgcacgcatctctgctatagcagttgtcttgttgcttttaacatttgtgcgacaggttataagagtttacatgaggccttaagaaatttggctcagggccagagctagtatccacgtgcagcaacttggttgattttcactgttttgggcaacaacctaaataacttttaacagtgcctgggaatgttcaagggtcagctcgggttcaagctgcaggggaaacacacagctggctgggccacagggtggtcaaggtaatctgtttcccaaggcaaagaaggaagtggagggatgatctgggtgaccctacaacatgatcaatcatattgaataacttggtcactctacattatcctttatgtaaattgttttattcagttagttgataggattagcaaatggatttccacccccatctatgttcttgagaaatatttcctgtaaatttcttttcttctaatgatcttgttaggttttggtatcaagttacatactgggttcacaatatgacttagctctgcgtccccacccaaacttcatctcaaattataaaccccaaatccccacgtgttaggggagggacctggatgattggatcatgggggcagtttcccgtatactgttcttgtgatagtgagttcgttctcaggaaatctaatggttttgtaagtgtgtgacagttcctccttcccacgctctctctcacctgcccccatgtaagaagtgcctgcttccccttccaccattattgtaagtttcctgaggcctccccagccatgtggaactgggactcaattacacctccttcctttataaattatccagtctcagatatttctttataacagtgtgagaatggagtaatactgttcataaattaaattgggaaatgtttcctctttatttcatgaaattctgtaagattagtgttatttattccttaaatgtttgatggagtccagtgaggccacctcttccaggagtctcccatgtgaaaaagttgtgttttgtttttaactaggaaaaaaaatgtctgggcgcggtggctcaagcctgtaatcccagcactttgggaggcccaggcaggcagatcacttaagggcaggaggttgagaccagcctggctaatatgctgaaggcttgtctctactaaaaatacaaaaattagttgggcatagtggcgaacacctgtagtcctagcttttcgggaggctgaggcatgagaattgctgaaacctggaaggcagatgttgcggtgagccgagatcacaccattgcactccagcttgggtgagagtgagactccatttcaaacacacacacacacacacacacacacacacacacacacacacacatgcacacacacacgcaaatatatgtatatttgctgacctctacatcaaattgcttacctctacttatagaaacctcacaatgctattcagttgttctatttcattttgtgtgaaagttgcatttttcaaggagtttgttcacttcacctaagttgcaaaaatactgaaataaagttgttcataataatccttatcatgaattttagtatctgcagtgtctataaattctcactatttaattccagatattggtaatttgtgttttatctcatgcttcccccatcaatctggcttgatgttcatcagattaatactaatgtattgtttatttcaaggttgctgaaagagtagatttttgatgttctcaccataaaacaatgatcaggtgcttaggtgatggatatgttacttagcttgatttatctttccacaatgcatacataaatcaaaacaccacattgtaccccacaaatatacatatacacaattattatttgccaactaaaaaataactaaatagaagtactttatgaatcctttcaaagaatcaaattttagcttcattaatttcctcgttttctattcattgatttctgatattatgtttattatttatttctttctccttactttgaattttaattgttctttttctatttagttg

SEQ ID NO: 1244212 - DNA, 4001 bp, Homo sapiens
gccctaccaggacctccagagcactgaggttcaggggtaagggctgatgacaggagaggagaagaggagcaggactcactttatcctgaagtcatccagtgtcatgcgagtgttgtcaatgtccaggagagttttgttgttgcccactgtcaggtccacaatctgaaaaaaaaaggacacagccatgatatcatgctgtggaccactgctgagagggcaagaggccaggcaaagccacaggaggtgaggattccatccaggaagattctcaagaggaatgaggaacttccaacagctgggacatggcacagaccccttccagccttcagcgaagatgtttggtgtggccttcattcattcattcaacaaatatttgaagatctactgcaaagggcattgtaggatttagagattactgacatcctgttcctcagggagcccaccattgactacaaagtcaaaagtgtcctaaaagagttcaaggaaaggagaggtggcttatggcaatgggagatcaagaaagacttcaggaaggaggtggctggcaattgaattgggccctgaaggatggctaagatgtaacattaataaataaatggaagaggtttagagtagaagaaacagcacattcagagacatgcaggagttaaaacaagaggaatcactgagaatactgaagagccagaccgtgagctccaccagaactaggtctagcacatcactatgtctacccagagcaaccctgagggtaggcactcactgaactgagtggctgaataaatggatagatagatagacatgtgggtggagggaggaagggatagatggaaggatggatggatagatagcttccattcccagatttctggatcctctccaacacttgaataaccaacatgtacagtcaggtccaaaataccttaaaagatcaagatacactcctaaagaagcccaggagaagtacaaaggaagagaaagtattgacttagaccaaacctaaaggaggttccacatccagtcccagctcagctcacgttaacccaggtctcctctctgctctgcccaaactctgaaagttgaggaaatggaagtgaacactcagagcacaggccaaagtcctatcctgggatccccagaaaccaaacacaagtttgtttctgatgaaagcgtacatttccaaaaggtggattccctggctattatctgagcttagagtttagcattttaacttttttggaagataaagaatgaaagagaaagagaccaagacagagacagtttcctgcacctacctggtccttgagatcatcaatagtgttataataaggggagtagttcttctggatagcagcaggtcccttcttgtcgtaccaatcctggatcttattctccaggtcgttgttggcctcctctagagcctgcaccttatccaagtaagaggccagccgagaattgagttcctgcatggtgctcttctcattagcagtcagaataccaccatcacctcctccagcaccacctccaaagcccccaaaccccccaaacccactcccatagccaccaccaaagccacctccagaaccaccaccaaagccacctccaaaacccccagaactactatagcctcctccagaagcaccaccaaaacctctggaaccacccccaaagccaccgcctaaactactggcactaaaaccacccccagatcctccgccgtagctgtagccaaaactgccaccgcctcccctcccacagacacgagagcttcccccaccatagccactagaagagctgaatcggccccctcctccaccgccccctgaggagctgaagcggctgtaggaagaccttatgctgcccccgctgcccaggccgcccccgccacccccgccgctgcggctcaagtaggacgaggagaactgtctgcagctcatgacacagctggtagctcacgggttgagaagcagtgataggagtgctaccggctcccaagtgcagggtacagagctgtccctggggctgcctacttatacccccagctgaaggtggcacgcctgggtgtgcccttgttctgtgccagcctccccccacagacccgagggaggtctgggatacggaggcagccgggctgccccaggctcagcgtcctttggtgactgcctgggggcggcccagcctctctccattgtgtgggataatttgatgacattaggctgtcagggccaccataaatcagctgtactgccacaggggtgacctagatcctggagtctggtctctggctggccccaacagcaggtctgagacttagccccttcgggatagaaactcccaagagcagagtcacctcctctattgatggtcattactgtctgcatccctcatgcctccttgctcccaccttgtgcccactgtgagctgagctggaactagggtactaaggagttatcatagaggagggggaggcacagcccctgcccttgtggagccccaaatggatgaaaaccaatccttgctctcaggatcctcgaggctttctgcagagtctgaggctctgcccttgggagactccagtttgatgaggaggcaactggcatggccaaaagatggagacgggcaccgagaccatgcccgccagcactaaaggacagcgtgcagagttcacacaaagggctggaagaagaaagtggaccaaataaacaaggtggtgctgacactagctgacctctgagcaggaatgcaagtggctcgactgtcctggtccttttgcagggcccagcagggagtgtggaattgaccttggttgagtgcctaccccatacagaactctggaggggatacagagatgtgtgacttatccctgctcctggcagaaacttggatgtatattctggtcaccaaggccagaagagaatggtaaagaacacgctggtctccggtgtgcctacctgagctccatccagctccatgctcatgagctgtgtgactttgataagttacttaaatactctgtgcctcagtttcctcctttgaaaaaggttgatatgagtagtttgtccatctcctagtaagagacttgtgagaagtgctcaaaaaatgttcggctgcctctgatcattcagccccctaactccccgtcaactctgccctcacccagaccttagccatgagcttctaactgccctccctgcctctcccattccctctgactcttcctgcacagcagccagaatgacctttctaatccatgtctgacaacatcacttcaccagtttccctccaccctcaagataaggtccacattcctggcacttaggcccatccccatctttccattcctgccccatctcccaccatcccccaggccccctagaaaatcatacaatgcttcccaaatgcccttcttccctctaagaatactcggcacttgcagtgacctctgattgaaatgtcccactccatcttttctacacagaaaactacccatcttcagtgatccctctgactgcctcctcctctgtcttcctgtactctcgccccctgggtttgtactgtgctctgttatagtgtctcacacttatctccatggctctatgaagcacttgatgaagaataaaagttcatgtactgaaaaaatagaagaaacctctctctgcgggcagccagagctcctctaagcctgcccctgctcatctcgtacttgccccagtgcccagcgccacgtctgatccaagtaggatcccaacacatatgagatggaggaaagataccagtcattccagaaagatgctcattgctgaaaaggagctaaaggtaaggaaatctctttgccaggatggtcagcaagggcctgaaagaggcaatgcctgcatgtgtaggcggcatagatgactggtatttcttgaggggcttttaagtgatgctcaacgactgttaaataatactgaagtggccggacacggtgacccatgcccgtaatcccagcactttgggaagccgag

SEQ ID NO: 1244213 - DNA, 4001 bp, Homo sapiens
gaaacatttagcttattggtttattataaagacaattacaaatggcacagaagaagagatgcatagggtgaggtgtgggggaaggggtatgaggagctttcataacctctctgggaacagcacattccaggaacctccacacattcagctatctggaagctcctcaaactctgtgggtttttttttttttttttttttgaacattttacggggacttcagtggatgggcatgatggacaaccattagaaacgtgattggacaaaaagagtatgatctaatgttagtagagtgagtgatgaaacctgtctgtcagatccttcttggtctctctatgcagccttccttcctccagggcatggggcagaacctcttctgaaatggggatcttatgacctacaatcaggcaaggtaggtaggagaatatcttgatggccagtgccaagaacagtgggggaagattcttgccttgaggagtaaaaggagcaggtgaaaagaggtggggagaaggccagagagagagagagagcaagagcaagtgagtgagcgagagcgagagagagagagattctgttttctgaggcctgcttctgaagtgtaaagtgccctaacatcaataaaagggctatgggagttatgagcctagaccttgaatgaaatgtgtatattcgttacatgctattactctgtaatcttgtgtttgtattctttcacaatttttattatgcttttgtatatcttggaggacagaaataattgtatacaacctcatatatgaatggatgaatgaatagatttggcaaaacctcaagaagctgaatcaatctgttggaatacctagcccaccactttgcacatgagaggaccttaggaaacagttcctaaatgttgtcaagttcctttaatcatatgtcttggctgcaaaatattggaccatttaatggtaaaacaaaggaaaattgctgttaaatatcatcattaaaagagcaaaagtacagaaaaaccatagtgtcatgtcatgttgatattttgaaaaatcccagtaccccaatattgttaataaattccaaagcaaagaaagttcaaacaacaacttcatcattgaagagatgaaaacttttattaaatttaagtcccaataactgttgaaatatttcaggtgatatttatagtaaaatagtatctaactcttttcacattgtaggactttggctgacaaccaggtctaggaaaaatttttggtcttccattgtaaatgaatttacttcctagggaatttatgtggctgtgtgatgagaggttgcaagcccagttataggtactggagttcagaagattgttaggattctaatttggctagttttaaggtgccatcttatcaggatccccagcagaaggaggttttcaacaagtgggctcagagcagtagcagcagcagactgggcggcaacaggactgtccacagtaggatgggcggcagcaggaggcctcggcgtggtgcagctggcagcaggatgggggtgtgcagctcaccacgcagcaggggggcaggcaggtaccctccacacggcagtctgggcggcaccacctgatacgggtgctcacagctccactgctgccctcctggccatagccaatgccaccaccaatgccacagccagttccgcaggagctggtctggtagcagcttggctggcagcagctagtttcacagcagcttggctggcagcagctagagtcacaagtcccaccggttgagaagctaggaaatccacagaagctggtctggcagcagcttggctggcagcagctggtctcacagcagcgtggctggcaggagctggtctcacagcagcttggctggcagcagctggagccgcaggtcccactggtggagcagctgggaaatccacagaagctggtctgacagcaggccatggtgtcaggagttgatctgaaggttgggttgcttggaggagtttctgaattatggctgcctattccactgccggctttttataagtctgggccaattcctctatttgtggcgagcaacatttttatcttgttactctttaaaccagcctttctagggccctctgatggttcaaatgctgaattgttttaaatatatctcaaaattgatttttccttattgctcagctaatactcaccaaatgtgtttgtccttggtaaaaatgttaacattttgtttacaaacaatggtataatttccacttgagcttcagcttcaggtttgcacttgtgggtatatcacctgacaaagtgactctcacccataaggtgatgtgattttggagatcatattcaccaaacctcaggtctccagaaaagaattattaatcatgattgcccttatgtaagactgctttgtattttttagactaataagattatcctctctcgatataatcttattagccagatagaaactctgataaactctatattcatagaaattcatagatttttccctgaaatggaatctttccaatttctgtgatatctcctgaacttcacattcatattttaggaaacattgatcactcaggaggatatataaaacaaaacctgttcaatttcaatgtctcttaaaaaagaggctaaaattcatattcagtaattggaaaaaattgcaaaatattttaacaaaatttacacttctctatgaaagacaaaaatcacttgtatatggattatctggcatataatttttcaaaggcagaatttaattttaatttatgtcatttcaagttactaaaccatgtgtcctgtgaaaagatattagaccaaagagcatgacaactgaatttaggaaagggaataaatcaaagaaaaagcaagagttagaaaatacttttatctgctttataaggcaggttagaaaatgggtgaccaaatatagttcaagaggtgtagtataataaatgcaaagagattaagaaaaatttcagcaaaataaaagttaaaacaattcctggtcattgccagaagaaagaatgtaattttcactgggagtttagggttacgtgagataaatgaaaaaaggctggtcaaaaacatattatttctacttggggtaggtttatttctcccttccaatcatgaatagaaacacatagttagctttttatgaggtggtggcatttgtttgtacaggaatggggttatatcacaatgtgattcatgccagcttcagtaaagatgttcacgtcatatggtaaccatgactgtaggtatgaagttgaaaatggttatatgtaatcaatgaatgttggagatcaaaaatgtagtaaattatcttgttccaccacttaattttataggtgtagaaactgacatcattcttattataaatagcacatatttattaacttctactatgcccagagcactaaaggcttatacagaaagcaagatcccatctatttgttttgtatcttgctctagtataaaaatcagtgtagtagcaataggagggattaatcaaggaaaagagttgagtatagaaccatttagtctcaaagttctaaatgggaacattggtgatgtgctatggagcacttttcattttcacttaacatcggctgatgttagaatactcttgagtcttgaagaggttaagtggcttgttccattcacacagtacacaaccagaagagctgggtataaaattcctatcacttgttcctagaccagttctttttattttataccatgctgcttttcagaatcaattaatgttagtaaggctctttgtctttgtctttttttctaaaaaaaaaaggtattttgtaatagcacaagaatagaaatattagatggtagagagatggcactatggagtagtgattttaaatacacaataaataagtacaaatatgttaaagttcttttaagtatctggaccagagacttataattggaataagtcacatttgcctcctagttgttttttgtttcccacattcaactaagttaa

SEQ ID NO: 1244214 - DNA, 4001 bp, Homo sapiens
aggatggatttttttaaaatttctgcaaaaacatcattgggatttttatagggattgcgttaaatctgtagattctctgggtagtattgacatcttaacaatattaaatcctataatccatgatctcaggatgtcttttcatttatttgtgtcttctttaatttctttcagtaacattttgtagtttctggtgtacgagtctttcccctccaaggctaagtttgttcctaagtattttattctttattttattattattattattatttgaaatggagtctcactctgtcacccaggctggagtgaagtggcacaatcttggctcactgtaacctccacctcctgggttcaagcaattctcatgcctcagcctccccagtagctgggaccacaggcatccacgaacatgcctggctaatttttgtatttttagtagagacagggtttcactatattggccaggctggacttgagctcctaacctcaggtgatctgcccacctcagcttaccaaagtgctgggattacaggcatgagccaccatgcccggccataagtattttattcttttgatggaattgtttttaaaattttccttacagatttttcatggttagtatatagaaatgcaatttattttttttagtagagatggggtttcaccatgttggccaagctgatctcaaactcccgacctcgtgatctgtctaccttggcctcccaaaatgctgggattacaggtgtgagccaccgtacccagccagagattttgatttctgtaacttcctggttgtgaaagcactgtgtaaggttaagttatggtaacagagcctttgccatttctgaggccctaaataactacacttactctatgtttttatggtcattaacctccactggacctctggataacaaatttcctaatgtggtattagaagagaagggatatcaaaagcagattaaagtttttcatatgacattctatgaaatatacatcctgagtacactcaatgaaaaaaaaaagatatgtttgttgcaccaatagttaaaatttattagaccttggtatattattcctctttcatagggggtgcaatttgcaggacggtgggatacaggaagtgagtgtcctgagaaggacagatggctcttccatggtctcgtcggcgctgagactcagagcgtgggcttcaatgcttgcaaaggctcagtttcaaggtaaatcggctttttcatttcttgggtcaaatttgtattttggcgtcctcagagagaagagtaaggtctttctggaattgaaaggaatcagataattctgaggccaaaatatttggtaacccccataagaaagacaaagaaaggttgaagaatttgttcgttgtccataagtgcttgaagaaataattcgttcatgaatggaactgaaagtggaaatttcaagttgaaaatcagcaaactggcttttagcaggtgggctcacaggagtagcagcagcagactgggcggcagcaggactgtccacagtaggatgggcggcagcaggaggcctcggcgtggtgcagctggcagcaggttgggggtgtgcagctcaccacacagcaggggggcaggcaggtaccctccacacggcagtctgggcggcaccacctgatacgggtgctcacagctccactgctgccctcctggccatagccaatgccaccaccaatgccacagccagttccgcaggagctggtctggcagcagcttggctggcagcagctggtctcacagcagcttggctggcagcaactggagctgcaggtcccactagttgagaagctaggaaatccgcagaagctggtctggcagcagcttggctggcagcagctggtctcacagcagcttggctggcagcagctggagccgcatgtcccactggtggagcagctgggatatccacagaagctggtctggcagcaggtcatggtgttgggagctggtatgaagtctgggttgcttggaggagtttctgagttttggtgatggctgccacattgggccttttataagcctgggccagctactgtttacataattccagaagtctcttgcttatttgtgttggataatttgtctctgaatgataattggcctctccctgaattatttgttgaacctactgagagcctttgaaagttgattgtatttggtctgcaattaggcttctttaccatggtcaagaagtcattggcattaattaggaatatgatccctaactcctcatgtttcttaaaatttcctcatggtcaaggaataattgactgatgcctcacctttaaggattgtcaatattactcagtgttgacccttacaactgggtgattgggtctcacatgacagtttaattccctccaattttaactgtggctccttctctaactttcttatcttccctttgactgtgaagcaagactatattcagctggccagaaagggatgctttcttgggcctgggagatttgcattaattgctattgataacattttcccatcactgattatgtgcctaaatagttctgagtacttcgcatgtatcaatttgctgaattttcacggcaatctatgggctaggtatcactgccactcccatcaaccatgtgagaaaactgagccacaacaggttgaagtaacttaccctagttcacactagtatctagtgaatctgaaatttgaatccacaacctctgattccagactaaactctttaaacactatagtcaattctttctctctttctctctgtctttctcccttccttccttccttccctcctttcttctttctttctttctttctttctttctttctttctttctttctttccttctttctctttctttctttctttcctttctttctttctttccttccttccttccttccttccttccttccttccttcctttctttctttctttctttctttctttctttctttctttctttttcttctttctcctttctttctttcctttcttctttttttatgtaaaaagtcattctaaggaaattccaatggtgaaagcaagccgtaaaaatttgcttcctttcttacggacttttttgagagtaaaaggaaggaagggagagcttagggtaagtaataacacagtttactacagccattcctagagattttatttatttattaacagcataataagcacagttcaagaaaatcttaagtgctaaaaaagttaaccttcttgtgactttgtctcatcttttatcttaggatattctatagatttagattttttaactgcataaaattatagtttttaacatattaatactggagtatgtgatttactacagagtgttagatcggctgtatgcagtttattatagatattagagactaatccagtgaactggaaagtttatataatttgaatgagacagctgatgacggtgaatataaaggttttgtttagatgcaataaaaggtgaccaggcctccatggagtatgggttcattactgagaaatgcaagttacgatgctactcttggattttgaaccagaacaccaagtggtagttctgcttctctagaaatgacagctttgagtttacatcataactctttctgagtcagaattaagacatattttcaaatcccacatcaaatttggtttaaaagatatgattctttgtgaattccttgcttcttcttaagcaaagctacatcacagattctttgattagctaatattttttatgttggatgcttgaaatacgtgggtgtgtcatgacaacaatctcgggagctatttaattcagatctaaatttagcagaatctttgatactaaacagatgtatctccttttgcaaaaggctcagatatctgaggacctgaaatacattattgataagagcactggagacagtggcgttgcatatcagttctccctttctgggcttttctactgtggcactattttcaacatcttcctcaa

SEQ ID NO: 1244215 - DNA, 4001 bp, Homo sapiens
ttattcctcttggaaattgcataattttgtgtgtaatccatcattgctaccaattaaatatagaggtaagttctgggagcttgtaaataatgtggaaaacgtgtttctttctatatttgcatcctattgtattttgtgtattacactctaatgcctaatgaagaatttaaaaattaaatggtaaaatatgttttgttttgttctaggttgtgttaatttttttttttgagacagagtcttgcttgttgcccaggctggagtgcagtggcgtgatcttggctcactgcaagctctgcctcccaggttcacgccatactcctgcctcagcctcccaagtagctgggactgcaggcacccacgaccacacctgactaattttttttttgtatttttagtaaagactgggtttcaccatattagtcaggatggtctcaatctcctgacctcgtgatccacccatctcagcctcccaaagtgctgggattacaggcgtaagccaccgtgtccagcgtgttaacttcttaagagaatatcttttaagttgggttgcaaagtgcaaaatataatcgagctgtttcagatttctaacacttctgtctgacaaatggcaatggtagaactcagcgggtgctctctatagctgtttcttctactatcatttagaccaaagatacaccttatgcatacgtacatcaaatgaaggtgaatagtgggagttgaagcttagagagcaattcaaggatcagtgggaagaatgtgaaaggctaaggtgtagaaattaaacctaaattctcttggaaaataggtagtatctagtagctatttttaaatctatttagaaggtaatgcaatttctttagattttggggcataaatgaaggagaacatttagtatattaaatggaaggagacaaaagatggtagaattacatttagatagaaatcaatagctttgatcaaccttaacattttagctaaaggtcaacctttattggtctagacctaatcataatagattagagcatgtaaatatttgaactataaaaattctttaattcatggagcatttttaagctgatggattcaagcataatttactttgtatttaatctttctggtttagactttatggttatgccttggtattattatcaaattgcaaatccactcttgaataccagctacaagaagacatgtttaaaggtagaaggaggacataactcagtttgctttgcacattaaaacattttatttggattaatcagagatattcaaggaaaaaccaggtctgaagatgcatgagcatcaagagagagttgggggagcagagatgtcactgaaatgatgaactattccatcctggtcctctgctcaagcaacgcaagctatccagaacactgattgatacatctttcagtaagtgaattcggcacatccacagtgtcctaactaggagtttcattatctctgagcagcttaacaacatcatggtacttagcatccaagtaaaatcgaacagttcttcagaaatcagcacaattttgctgtgcttcccctttcattcttaagcgatcagcaacctggcttttagcaggtgggctcacagcagtggcagcagcaggctgggcggcagcaggactgtccacagtaggacgggcggcagcaggaggcctcggcgtggtgcagctggcagcaggatgggggtgtgcagcttaccaggtagcaggggggcaggcaggtgccctccacgtggcaatctgggtggcaccacctgatacgggtgctcacagatccaccgctgccctcctggccatagccaatgccaccaccaatgccacagccggttccgcaggagctggtctggcagcagcttggctggcagcagctagtttcacagcagcttggctggcagcagctggagccacaggtcccactggtggaacagctggccatggtgtcaggagttgggttgagagctgtgttaagagaggtttctgagtttgggctgtaccttctatatctgtcctttgatatgttccctagagctgcatatttacccaacaccttttcttgatgtcaatttcagtgtgagtctctggctaatacctgaggtgtttataaagttataaatagcatttcaatagcctttttccattgtacaattaagtctcattatgtttcttctttgccctctgggcgaagtgaaggctcatcatggaagccaagcaccgaagtgcctctttatgcaagtcacatgacagactagccttgagccaagtgtcgccctggcacgttttgtcatagttgtcctttgataacctttaggcagaatttatcttaactgatcatttttccttaaatggtcacttaactatgatcatgattttataaacaatttgtccagacttggaaagactaacattagtgtcatcaaaacatgaactacaacctgatgtatcaactttcaaaccaagtatgcctttctatgatcaatttgtgcaagttataggatcctcagagctctatctaatattcttgccttcagtaatagtgaatgtacaaattgctaactaaaatctttaatgacttttgcttgtagattgttttctgactctattaaattaaacatatgtgctagtaatgagtacacattgtaacaagtcaaagagtacagaggtatataaagaaaaattagtgtcttttcccttcctggaagatgcacacatctcttccaaaactaatgctctagaggtaatcaatattaagaatttggtgcacattctttgacacctttatccttgcttctgcaaatataaaccagcatatatacatatatatcttctatttcagaaaagtttgggtctcctacacatgtttatagttacaaatttttaattgtggtaaaatatacataccataaaatttatgaaccatttacattaaccatcttaaccatttgtaaatagtcttgtcacccttgttgaaaatcatttgaccacattcacattcagaagaaatgaaattagaccattgtctcacattatatacaaaaaccaacttagaatggattaaaagactgaaatgtaagaaagactcaaaatgataaaactataagaagaaaacagaggaaactccatgacttttgcctggccaatattgtgatattgtgaacatgaatccaaaagcatcagcaaaaatagacaagtgggattacatcaaactaaaaagcttctgcacagccaataaaacactaaactgagtgaagacgcaaaccgctgaatgggagaaaatatttataaaccacatatctgataaagggttaatatccaaagtatagaggaaactcaaacaactcaatacctgtagtaagaaaacaaataacgtaattgaaaaatgggcaaaaaatctaaatagacatttctcaaaaaaaatctacaaattgccaacaggtatatgaaaaattttcaaaatcaccaatcatcggataatgcaaattgaaaccacaatgagatatcgtctcacacatattagatagttattatcaaaaagacaaaagatagcaagtgttggagaggaagtggagaaaagagaactctggcacactgttggtggaaatgtaaattagtacagccattatggaaaacaatatgaaggttcatcagaaaattaaaaatagaactgtcatataatcaagcaatcccacttctgtgtatatacccgaaggaaagtaaatcagtattttgaagagacatctgcattcccatgttcattgcagcattactcacaatagccaagatatggaagcaacctaagtgtccatgtccatcattaaatgagtggataaagaaaatgtgatacacacacacatacacacacacacactcacacactggaatattattggtcataaaagaaggaaatcctgctatttggggcaacagattaaacttgagaacattatactaagtgaaataagtcagacaaagaaaaagactaatatt

SEQ ID NO: 1244216 - DNA, 4001 bp, Homo sapiens
aagccaggatcacaatatctatttcacaggatcagtatagatgttatgtgaagcaaagttcgcatgatgtgtacctggcacatgcacagcatatggtactaacaaggccacgctggttcacctcctttcccttcaggtgtgtcttctccatcactcttcctccttttctttcagcctctcatacctagcctttttcactgtgtcttctctctgtcttttctcctatattttgttctcttctcccccttttcattcttgtctccatccttcgataccttaattcatcttgcttcatccctttcgttgtccacctacccttacatggccaatgatcctcaataaaagaaaagctcccacatttgctttcgacttggaaatatgtgtctttttaccattacttaactttttaatgcactttatgtcttctttggtgtcatatataggaaattgccattttgagagcttgctgcagtttattgcatagtgtaatggagtgcagtagcatgatcttagctcactgaaacctctgcctcctgggttcaagcgattctccttcctcagcctcccaagtagctgggactacaggtgtgcactaccacgcccagctaattttttttttttttttttgtatttttagtagagacagggtttcaccatgttgcccaggctggtctcaaactcgtgagctcaggtaatccactcacctcagcctcccaaaatgctaggattacaggtgtgaaccactgctcttggcctcaagtagacattcttgaattataagcagttaaaccaggtgatgtacaagtgaaaacaaagacaatggtttctttgcctagtatataatatttattaagaaatgacagaagacattgtatcacagatataactgaaatatccagcaggcaagatcattatgatccaaaaaccaagggatggatcagatgttaaaatgtggaaagtccagcctacttcttagaagctgaatgttgggtgatgagcttccattctctctggtgacttgaggaatgtcacttggctataatttggtgtctttgatgttgcaaaaaattttaggtaaacaagataaaatagattataaagcatggaaacattagacttgtggatagttctcatggataaattccacaacatgtcagtaatttttaatcctgcagaaatatcagaaatagtatatcccaagcaaattgatgatcagcaggtggctttgtagcatttctgtgtccccagtgaagggtcaaggtattcattgtagaatggaatcagatagaattgtgagctcatatacttagtagtctccatcacaagcaatgcaaagtctgagaacttgttagtggtccagaggtggtcaagggatgaacagttcagagacactgtgacctaggcaattgaaaataagcaaactggctttcagcaagtgggctcacagcagcagactgggcggcagcaggactgtccacagtaggacgggcggcagcaggaggcctgggcatggtgcagttggcagcaggatgggggcgtgcagctcaccacacagcaggggggtaggtaggtgccctccacacgactgtctgggcggcaccacctgatacgggtgctcacagctccactgctgccctcctggccatagctgatgccaccaccaatgccacagccagttccgcaggagctgatctggcagcagcttggctggcagcagctggtctcacagcagcttggctggcagcagctggtctcacagcagcttggctggcagcaactggagctgcaggtcccactggttgagaagctgggaaatccgcagaagctagtctggcagctgcgtggctggcagcagctggtctcacagcagcttggctggcagcagctggagccacaggtcccactgatggagaagctgggatatccacagaagctggtctggcagcaggtcatggtgtcagaagttgggttaagagttaggttgcttggaggagtttctgaggtttggtggtgacttccacgttggtccttttatatatctgaaccagctgctgtttacaaaattgttaacatattttctttgtttttgtttaaatttgttactccgtggatctctgattggcttatgttgaaatacttgtgacacattatgagcaatagtttagaaattactgttttatagtttcttctggactcctcatatcagtcctttgctctttggaatatgtttgtggtttcccatgttcaaagagtacttccattttagtccaaatgaatgctctcattttacataatagttattccacgtgacaatctatccatacctctaaggctaagagtaataattgtgctgttatatttaactattattttttcctcctagatatatagactaaattttattgaattttggatatctggatatctactgaactgaaggaatacctttggtcatacataattcgcagatttcacctttttttgttccaatgtcttattgaattaccgattatagttcctttgatttcaaccaatttggaatgtgtgactattattcctgttccagaccagaaatctgttcttgggaaccaaactgacatagtatttaggaaggtatccagcagagtccttagtttgtggtagaaccttaataaatgtttactgaatctgattcaataaatgtttattgaataggtggagtaaaaggcttgattcatggatatcaataccactcaaacatgattaaagagaactttcaagctgtagtacttctcatgaaagagtcttgttatttgctgtaaagagactaggaaatgtgttttttggtttattttattttattttttggatttagtagtggaaccgggctcgggaaaaaatatctaggagttatgacactttgaaaaatgtactgccatctactttattcctcttggaaattgcataattttgtgtgtaatccatcattgctaccaattaaatatagaggtaagttctgggagcttgtaaataatgtggaaaacgtgtttctttctatatttgcatcctattgtattttgtgtattacactctaatgcctaatgaagaatttaaaaattaaatggtaaaatatgttttgttttgttctaggttgtgttaatttttttttttgagacagagtcttgcttgttgcccaggctggagtgcagtggcgtgatcttggctcactgcaagctctgcctcccaggttcacgccatactcctgcctcagcctcccaagtagctgggactgcaggcacccacgaccacacctgactaattttttttttgtatttttagtaaagactgggtttcaccatattagtcaggatggtctcaatctcctgacctcgtgatccacccatctcagcctcccaaagtgctgggattacaggcgtaagccaccgtgtccagcgtgttaacttcttaagagaatatcttttaagttgggttgcaaagtgcaaaatataatcgagctgtttcagatttctaacacttctgtctgacaaatggcaatggtagaactcagcgggtgctctctatagctgtttcttctactatcatttagaccaaagatacaccttatgcatacgtacatcaaatgaaggtgaatagtgggagttgaagcttagagagcaattcaaggatcagtgggaagaatgtgaaaggctaaggtgtagaaattaaacctaaattctcttggaaaataggtagtatctagtagctatttttaaatctatttagaaggtaatgcaatttctttagattttggggcataaatgaaggagaacatttagtatattaaatggaaggagacaaaagatggtagaattacatttagatagaaatcaatagctttgatcaaccttaacattttagctaaaggtcaacctttattggtctagacctaatcataatagattagagcatgtaaatatttgaactataaaaattctttaattcatggagcatttttaagctga

SEQ ID NO: 1244217 - DNA, 4001 bp, Homo sapiens
atgagactatggcattaatggaagagcaaggagaacagcaagttgcttcagcttagccacctttattggacagttacatattttacctgattggagaagtccctaaggaacacaagcatgcatagcaagggagcacatacatgatgacagaaaaaactacatgcaggaaagagacccgagatgatgtggcaaagcagctcttctcagcttaatcgtagcagaagacaagaacctggaatgtctccctctcactgtccagaaggccttcatttaagtgatcaggatactgacatttctgatgagttctttgaggggtaagccgattgtgagtaacaatgcagaaagaaagagctcctagctaagtcataatgagctttggggaggacagtgcagttttgtctctagctggtggcttgacttgcaagaattggggggctgaagccaatttagcagttggcaggcttgctggcagcaggctgagctgctgcggcctcacgggtggttgggctgatgggtttggcttcagtgggctggcagggagcctcttctgagacatccaccttgcagggggttgtgtcaacacaatccagttggctggaagtggattttttgcaatcccgtttgcaagagtcagactcagtgcaagatgggcggaagtagactgggcggcaagagtaggaagtgacacaggctgggcggcgcaggatggagtagcatgggcgatagcaggcaggacggtaggagatggatgtcatgtatggctgcctataggtgaggagtccagagcagattgggcggcagatcggacgggagaccgggcggtaggaaatcgtagcactgcaaggccgtttgctggaactgggtatgtagaaagtcctaggacaagttggtcggcagatggcagatgcagaagaccctggactgcaggaaagaggtcggcaggaggtagatgggcaggaaactggctcagggcagacagaaggacagcgcttgactacatagcaagtaggttggcatggactggacacacagacagctggtgagcaggggctgggctcagagcagatgggttggcagatactggagacacaacaagaaggctcttggcaagtgctggggacagaaggtggctcgcacgagctctgaacacagcagacagggcggaggcaaactggctcacagaccagagccacacacgtagctggctggcagatgctagactctgagcaacttggctcacaagggctggggtcacagcagacagcctggcagctactggtcacagagcaggtaggtgtcgggcacaccggctgacagcaggaaggctcacagaccacaggttggcaggaactaggcagggtgcagacagctgaacagcagctgggctcacagacaactggctggcagcagctggatttgcagaggacaggctggcaggaagtgggcacacagaggactggttggcaggaagtggcttcagagcctacaggctggcagcagctgctcacggagcaagaaggctcacaaatagcaggctcacagcacacaggttgagcacagctgctcacggaacaagaaggctcacaaacggtggcctcaaagcacacaggttggcagcagttgctcactgagcaagaaggctcacagatggtggcctcgaagcacacaggttggtagcagttgctcacagagcaagaaggctcacaggtggtggcctcacagcacacgggttggcagccgctgctcacggagcaagaaggctcacaaatgacaggatcacagcacaggggttgggcacagctactcacaggacaggagggctgacggcactgtggcccacagctggatgatccacagctgtcttgacaagtcaccagctgccatgtctggctctggcaggaactgggcaggcagatggggcctccacagctcacctcagtggagcagagagaggtggctggcacggagaagcatttcctagaagagcaactgccagacatggtggaggtggccgtgcttccttgtgctgagtgctgagaggttgctgcctcactgtgacagctccctgaggccctcacttttataccccctcactggcgtgttctgtttgggactcctgcatcttttcctcattgttgtttgggccagtttgcagaggaacatcttattataccaccgtttgttgatctggaagctgtttatctacccgtaaagaaggtgtttatttattgatgtgctaaatttggaatcctcagagctacaggtagtcttggaagaagcatcctcacctccaaactggataatctatatttctgagcattgtgaacagggaaagaagaatgaaacttatgatttatccaccttctagtcttccatacagggccctgggttggattcagaggatgccacaggaataagacctattcacccattctcttggatctcgccttctagtgggcagataagcatgcagacaaactcactgcaatacaataataagttcaacaatagacatacagagattaattgagaggagaggtgatgaactcagttgggaaaagaacaactgggctggattttaaatgactgcaccttacagcaatgatcttgcttaaaaccaccagcaatctcatgaggcagagatttttctccaccattagaaatgaataaatggtccaggaaccatggctcacgcctgtaatcccagcactttgggaggctgaggcaggcagatcacctgaagtcagaagttcgagaccagattggccaacatggcaaaaacccatctccactaaaaatataaaaaatagccaggcatggtggcacacacctgtaatcccaaatgcttgggaggctaaggcaggagaatcacttgaacctgggaggtggaggttgcagtgagccaagatcaagccactgcactcctgcctgggtgacagaggaagactctgtcaaaaaaagaaaaagaaaaaaaaggaaggaaggaaggaaagaaggaaggaaggaatgaaggaaggaaagaaggaaagaaggaaggaaggaagaaagaaggaaataaagaaagaaaagaaagaaagaagaaagaaaagaagaaagaaagaaagaaagaaagaaagaaagaaagaaagaaagaaaggaaagaaagaaagaaagaaggaaagaaagaaagaaagaaagaaagaaagaaagaaagaaaagaaagaaagaaagagaaagaaatgaagaaatgggggcagagggtcagaaagtttcagtcacttgctaaagatcacacacagtctgtccctgatctaaggcggctgtccctccttctcaccaacctgtctagacctacctttctcagaagacttcatcaaagtcacatatcgccagcttagcccaccgctgtcctccatgctatcccatgaacatagaacattggcttgacctgttcctggaaatcatgtgacccagcctttctgctcttcctcaagcattcattagacctccagggtcttccttgcttttaatgattttgacagttcctttaaaaaaaaaaaatctccaagacccaaagggtaaatagtaaaaacaagagacttctcaggtgtgtctctcaaagactttgtgaacaaaagactcgtctttgctactcttgagacagatgaagggagaaatgaatcctaggtttctgaattccaggacttaacatcttgctcagtgaagggcctagtttgcctccaccatgtgttttcatcaacacaaaaggcaggctctcgcttggaaaagctgagccattctgccatccattgtgccatccattcatccctcccttcatttattaattcatgcaatcattgactcagtttctcttttatttatgcactcaactcagccaacactgggttctgtgtgatagatacaaaaagagtgagttgtaattctggccacaaggagcccaagtttagaagagagatagacacatctataagcaagtatggtacagaatgcaagtgttgtga

SEQ ID NO: 1244218 - DNA, 4001 bp, Homo sapiens
atcacatcatactgttcactaaaaatgggaactttttattatatgtaaattatatttcaataaagttgaccataaaaaatgaaacaaaaaaattttttaaagaaaaaggtaaaagcaacataatcccagttttattcataactatgcttagaaaacagtctggaaagcttatcagtaatagactctgagtggtgagccttcgaatgctatattctttatatgtttctgtattttttcattttttagagttcattgctatgcttataatcagaaaaaaatttttctttgtcaaatgaaacatcgctttgtaggcataaaaataaatactatttttccagggcaagagcaaaattagttttattacacacacagcttaaggtcactttcaacaaaaggttgatcaactgtcttttgagttttaacctcccaggtggacccacacaccttggctgggccctacctagcagaggtatactcactccctcctccttagaactcaggcagaagaaacgtagctggttccaggtaagacaacctagcacagaaaagtgagactggaccaagcatgaggctggaagaaggaactgtactgcgcagaacatcctcagaaactgtgaattcactagctttgccattagaaatcctttccattcagaaccaatcttgttttaccaaagcctcctttccgactttgccagaaagttctgatcaagcctgaagccctcctgcagaaccatcctaggagagctgtagtgcagaagaaagccatgcccctcaatcaccattaaatgtggccagcatcagcattcacccaggagcttttaaaaatgcaggtccctagggactctaggccctagagctaacgggtaaaatctccagtgataaaacccaatgatctatatttttaaaagcttttcaagtgaatctcatgcagcacacggaagcttccgtctagatctatggttctcaaacttcagtgcataagaattatctaaggttcttgttaaaaacacagattcccaggccacactttggtggattctgattctgtatgtcttagggagggcctcagagtctccagttttaacaagctcccaggtgattccgacgcaggtgatccaaaaaccacaattcaaaaaccctaaggcagatgccagagtgaatttttctaacccagtcctcagcagggaggtcaaggaagaggcaagagaactaattaggttatgccagcatgctcaaatttattaagaggctcacaaagaagatggaccttttttgcatctcaaagctgcagaaagccagggcggaggatcagtcccaaagacaccttgaagaagaggatgtcttatagtacaagacattgaacttcatgtgaataagtaaagtattggggattcacccttgagcttgggatcacttagttgtgaccgagttttaatgtttcatcagagtatggctcttgttctcggtgccttgaaataccagagaaggtgttggagaacaagccctcctctacaaatcacagaaagacaagacactgtcttgggggtatggaaggttctggacacgaggggctgtccccctggagcagatggaggctttcggtgggactgcatcagtggtggagggaaaggtcttcattttgtgtcgcatataggtgtgggctggcagcacacaggcccacagcacccggagccgcagcaactggacccacagcaactggatccacagcagccacccccgcagcctccgcagcctccacagcctccgcagccagatccacagcaagacgatccgcagcagctgcccccgcagccagagcccccgcagccagagcccccacagccacagcaggagccgcagcagccacagcagcccggctgacagcagcactcttcacagcagttttgctcctgggtgcagcaggtgaagcagtcccccgggcagcaccccatggtccgggcccgtcagctcgcaggtcggtaacgcagccggagttccccacgactgacggtggccagccatctggatggcagcttttatatcccctcacccaggcatgagggacgggatgttttctttgttattatttatgcaagtttccataagaccggctcattaactggctgtttattttccagtcctgagtacctcaactcataaaaacgccccactcctgccaactgctgtttatccagagggtaaaaatacatcttcgaaaagacctgtcatcatggccaagcatctgccagctgtcattagcccaggttggagatgggaaggggaagccggccacagcttctggctctggaatgaggggcttgccttccacatcttcgcaggttggcgatggaccccatcttccatggatgctagtcctggaaaggcagaccggcaacagccgaatgctctgttccccctgacaccagtggaggctactgagaacgcctggtcacgtggctcctcccaggtggaaatggcatcctcatcccggttcatgtgagccaggcaaatgtttgtgtctgtgtgtggtatggggagtgtgccacacgtttaggcttggccggtgagcatcagtcatgagtaataactgccctgtgaaaccgagagagactcatcgtaaagctgcaagaagctggtaaggcatggtctgtctcggcggcaaggtgagctgaatattcgcacttctctctaaataggtgggaagaactgagatcagaaccctctacccacccccactccagccccaggcctttccttgaccggggaaggaagagatgcaggaggaggaagaagaggagaaggggaggaagaaaggaaagaagaaaagaaagaagaaagcaggaaggagatcagtaaatatccaaaatgctacattaaaatgggaatgtaacgcactttttttaagagttcgaaccttatagaccatctggcagaaggagaaattagaatacaaaatacccagagtgtcatcccaaggaataaaatgcctttgcaaggagtctaaaatctacagatggttcaggtccatgtgtaaattttgagatgggtcaaaatttctgtctctttcttggactttggtaccttgttctcctcttggagtgcccatggcagccctggagctggaatacaacatctagtaggggtagaggacagaagataggggtggggtgggaatggaaggagggatgggagtaaggatctggatcaagggatctagtccttcccttttcatttccctttctttgtaagatgggctagaagtaagacagcctctaagaagggctagaagaactaaggacagggtgggagtcgggagggtaaatgatgaatgagttacttggatctgatatgatactcaatacttcacaggatatggaattttagagctgggaggaacccctgaaacatcatctggtccagggttttatatcagaattgcctaaaagggggccttttgaaaaatacagattcccaaactgtattccagtccttatgataaatcagaatgtgtgcttatgagagcttgagaagctatatattttaaactttctcaggtaacttgggttacattaggaaacactgatataatctaatcctatcatgaccatcactgccaagcacttgtgttttacagaagatgataccaaggcccagagatgacacatccgtggtagattggacccatggcccagatgttctccctcctggtccactgtttcttccaccataccacatccacagatgggcacctctgagtgagtataatacagcaatgtctatggcagacgtgtccttttttgtttgtttgtttgtttttttgagatggagtctcactctgctgcccaggctggagcgcagtagcttgatcttggctcatggcaacttccgcctcctgggctcaaacgatgctcctgacttagcctcccaagtacctgggattacaggcacgcaccaacaagcccagctaattgctgtatttttagtagagacagggtttc

SEQ ID NO: 1244219 - DNA, 4001 bp, Homo sapiens
tgtttttttcttgtaaatttgtttgagttctttgtagattctggatattagccctttgtcagatgagtagattgcaaaaatttgggagaaaatattttcaaactatgcatctgaccaggggttaatatctagaatatataaggaacttgaacaactcaacagtgaataataataaaaaatccaattaaaaataggtaaaagacctgaatagatatttcacaaaagaaaacatacaaatttccaacacatatatgaagaagtgctcagcatcactaatcatcaggaaatgcaaatcaaaaccgcaatgagataccatatcaccacaattagaatggctattatcaaaaatacaaaaagataacaaatgctggtgtggatgtggaaaaaagggaactcatacaaggttagagggaatgtaaagtagtatagccattatggaaaacagtatggagggttccccaaaaattaaaaataggacgatcatgtgatccaggaatcccactactgagtatatacgcaaaggaaatgaaatcagtatgttgaggagatttctgcacttccatgtttattgcagcacgattcacaacagccaacatatgaaaacaatctaagtgttcatcaatggatgaatggataaagaaaatgtgacacacactcacacccaaacacacaatgaaatactatcagccatgaaaaagaatgaaatactgtcatgtgcagcaacatggatgaacctgggggacattatgttaagtgaaattaaccaggcacagaaagacaaatagcacattcactcactcctatgtgaaatctaaagaagttgatctcatagaagtagagagtagaatagtgactaccagaggctggggagggtgagaggaggggaggataggcagagattggtctacaggtacaaagttacaggtagataggagggataagttttggtattctaatgtacagtagggtgactgtggttagtaatattttatcatatatttcaaaatagcgatcagagaatattttaaatgatcttaccatgaagaaatgataaatgtatgaggtgacgaatatgctaaacaccctgacttgattattacacaacgtatacatgtatggaaacattacattgcaccccataaatatgtacaattatgtgtcagtttttttaattaaaaaattaatttaatacaaaatattagaatgagtaaataaaaccaaatctttttgcaaggccaaagaacagatatttattagaaaataaacatgccacgaaatcttaagaagaaggaaattgcttcttttacagacttcagaatggcccaggtcttaatagatgagcccagtgctcggttccctgcttggttgatgtggggttttgtgggctcagggcaggaggtttgttaaagtagagaaatgggagtgtgactttttcagaaggtgagttacgcgttccgggcagtcagtgcactgctcagcaggaggaggtcctgcaggtggtgctgcaaggggtcggctggccgcagggggactgcacagacacaggctggcagcaggtggtggctcagcaggaggaggtcctgcaggtggtgctgcaaggggtcggctggccgcaggggggccggcagcagggggactgcacagacacaggctggcagcaggtggtggcccagcagcagggcctgcacaccacagccgtgcacgacgaggggcagcaggtgatggggcggcagcagccttcctgcagggagcaggggtcgcagcacaccgggcggcggcagggctcgcagatggggcgcgtgcagcggggcacgcaggtcacggggcggcacacggtggtctggcaggtcacggggcggcagcagcaggggtcgcggcagcagcagggctggcagcagcctcccccgtagctcagggaggagaaggtggagccgcagcaggagccggtcatggtggtgtctgaggctggtgtgggttgggctgtggagaggagctggatgttctcaggtgtgaatgtcctcctccccctctgggccctttatataccctggccgggtgcaggtgacccttttcgtttaccttttggccaattaagtagaattttgttttgactaatggttgcttgtgacacactcattatctcactaaagagctcttgttttatctctaagtatggatgtactcacattgggtgaaaatctaagaactcatcgtcatttgaggtgatagtagctcttgatgcttattttgagtagataacactggatcaaatctggacaaaacggtctaaaaaaacttcagtttttaaaagaaattaaaaacatagagaagtacatagaacattgagtagagcctatcctgaccccaataggggactcaagtccttggaagcacctacatgtgaaacgtgaatcacacgagtgttagacaagccctcccacgtagtctgcttgggaatacgtttgattatcacttgatatagtgggatacataggccttgaataggatagcagctcatagagttgtacaggacagacaaaaatttttgcaaaccactaagtgttggaataaaacctccaagactgccttgcatgttttcttttctctagttcaggttctgtgcaactctggtctttctgtcataagatgctgatttttatctctgaaacatgtcattttttagcgttgcctttcttgtgcatgtaatgaagaattctgtaatgggaaatttttctgaatataccttgttggccgggcgcagtggctcatgcctgtaatcccaacacctggggaggccaaggcaggtggatcacctgagctcaggagttcaagaccaccctgggcaacatggtgaaacctcaactctaataaaatacaaaaaattagctgggtgtggtggcagtgcctgtagtcccagctgtgccggaggctggggaacgagaatcacttgagccccaaaggcggaggttgcagtgagccgagatcatgccattgcactccagcttgggctacagagtgagactccatctcaaaaaagaaatatgcatatatactttgacataggtgctctgattagcaagtgacaagaaaggggttttcaaccaacattgcacacatatccagaacactgttcaggggtagacgcattgggaggctgcccagtgttctgctgtggcactgctaaaagcgtgatggatgcgcttcttcaggaagtgttgccaggggcagttcaggaactacatgggggaaacagtcccattactttccagctttactcctcctgttagtcaccagacagggttttgaatcacttcgggatcattttctttatttgaaagaatgtgccttggggccggacatctaaagctccccaaatggaatttcaagcataatttcaaaactttaagaggaatgtaaattgactggacccggtagtcacaattagggaaacagaagagggagatatcaggcacaatctcatcgctagagacctttgactctcctgttttacattcttttctttgtttacggacgtgggatttttgtttttcaaagtggtaaccagaggtaactaggtaaaaagttgtatattctgctcttttcgagacatattatctcataatttattttcatgctgctgtggagtcttcatgataatcacattttatgcaatgggagcctctttggaagacttaaatcatcacattaacaagactcatttctctactgcagaaacttcaaacccaaggtcattctaaagagatctgtctctcccctttataaagatctgtctctcccctttataaggatctgtctcccctttataaaggtccaaaaagataatctgtgcatcactcagtaacctttctagtgtttattcactctaagacacttatccacaccccatagccaaacttcgttttcaggcagagaaaatatgggtcatgcttcagttattcatgcctcagagttgtaagagcacagacagctctgcggtttga

SEQ ID NO: 1244220 - DNA, 4001 bp, Homo sapiens
ctcctagggtttttaaagtttgaggtcttacatttaaatctttaatccatcttgagttaatttttctatatggtgaaagtcagggtctagtttcaatcatctgcataaagctagccagctatcccagcaccacttattgaatagggagtcctatcctcattgcttatttttgttaatgatatcaaagattagattgttgtatgagcatggctttatttctgggttctctattctgttccttttgtctatgccactttatattttacaactttctgtttttgtaccagtaccatgctgttttgtttactgtagtcttatagcatagtttgaagtcaggtaatgtgatgccttcagttttctttttatttacgattgctttggctatttgggctctttttggttccttatgaatttcagaatagtttttttctagttctgtgaaaaatgacattggtagcttgatagaaatagcattgaatctgtagattgctttgggcagtgtggtcattttaatgatactgattcttccaatccattggcatgggatgtttttccattcgtttgtgtcacctatcatttctttaagtcgtgttctgtagttttctctgtagagatttttcacttccttggctagatgtattcctaggaagtgtgtatatgtgtgtgtgtggctattgaaatgtaaaataaagttgtagaatgtacaaccattttgtgattaacatgtctctcaccatactaagaagtgtttgacctgaggtctaaatgcaggaaacttgtattctccagggtcttttctgaacttttgggattataattacattagtaagtaacttatttactcttacattattcatgtttctttaacttcaaaaacagaggtaattggccagaggttgcctaaggcttcttccacctctaacaccctgggcgttctatgatgttccaacaggtgtcggatcagtaaacacaccattaggctgggaatgtaagtttcaacccaggtgcggcctcctagcgtgtttcttgttgcagaacatttctcaggtgttcaatgcatgcctggaattttgggcacaagtgactctgtacacatgataaagtcatagttgtatccatcttcctgactcagctgtgctccataaatgccatttacaatgattataagaaaactactcagacttaagttatgagaactgtataagaggattattctgcatcttgctttgagtatctctagaaaaaaagagacaatctcccagaagaaaatatcacaaagaccatgatttctatggtaggagtattgagtttattagaaagcagacaacatgatataggagttagactggagtcctaggaaaagtatttctcatctgtggttggtctgaaaaggtgtcttcaatgcatagtgtgagctagtatgaagagatgagaaatgggcttctcaaggaaacgtgtattgctctgcggtgaagccctgaggggcagcgggatggacctggccatcttctgaggggcccttcgtgataacgggctgctcagcaggaggaggtcctgcaggtggtgctgcaaggggtcggctggccgcagggggactgcacagacacaggctggcagcaggtggtggctcagcaggaggaggtcctgcaggtggtgctgcaaggggtcggctggccgcagggggactgcacagacacaggctggcagcaggtggtggcccagcagcagggcctgcacaccacagccgtgcacgacgaggggcagcaggtgatggggcggcagcagccttcctgcagggagcaggggtcgcagcacaccgggcggcggcagggctcgcagatggggcgcgtgcagcggggcacgcaggtcacggggcggcacacggtggtctggcaggtcacggggcggcagcagcaggggtcgcggcagcagcagggctggcagcagcctcccccgtagctcagggaggagaaggtggagccgcagcaggagccggtcatggtggtgtctgaggctggtgtgggttgggctgtggagaggagctggatgttctcaggtgtgaatgtcctcctccccctctgggccctttatatacgctggctgggagctgatgacccccaggacacaaggtcatttccttgttttcacttattcttcctgaaataacaccagcagattagtaagttttgtagacattgtttagatgctcaggtacacataaaagtctattttccttatttagtgtagacccattatattttgctatttatggttcaaatatgaatttaatgaccctaacttcaaagtctccaattatcgttataattcaatgacgcttttgctagttgctgttttgatagctcaaagcagctgttgtgctctgcatgctctgagggttattacttgctagcagttgaagtaaagcgagcatctcaagttgttagtattctttgccactgctaagcttcctgggcaaaacaagttgaggataatactacagggatagtttaaaagtcaggatttctcagtaaaagaagaattttcctgtcccctttttggaggtacaagaatgcattttagtaggtttccatcatccagtggtttttgtcttagagatatgttcattgatttctatggttgtatctttccagaccaaggtaaatttcactgtaatcttcatgatagccagtatcattaagttgtaactatgttccaagcatcatattaaaaaatacatgcattaatctaatcttcataacattcttaggatgtggatattgtttatttctcatttcacacataaggaaccagataagtgacttacccaaggtcatgtacctagtaagtgttggagccaatactcattccagaaatatctgtgggaacattatttatcagcccaaaaagctgaagaactcactgtagctaaagaatggattgtaggtaccacattcccaggtattaaggaatgtctattttatttaggagcttttacagtgtatttactttgaaaacagttgttatttatgatatgtctaatttttagagtcggttgaaaggactctatgtcttaccaacagcctcaggagtgggaagaattaccttctattcagccttctgaaaatgtcgaaacataccctaaggagatagtgtcatagttgggcataactgaatgattatggggtattgtgaacaaagccaccaatatggtgaggaagtcaaacaagtctatgtagaggaaggttgcagtcttgcggtataacaaaacccttcagtagtgatcccacttgaacgtgttctcgggcctcatctggcccatacctcagtgtcttcaacatctccctgtgtgctatgctggggctcatttctgcttatggaaccaattgtcatttttaattgtttcaaactgtcatgacttgtaggcaaattatgtcactcaatcacttttgagtctttgcctcttaatttacttggttctgaccttttcctttacaactaagactgttctattaggttggtgcaaaaagtaattgtggtttttggcactttcaatggcagaagctacaattatttttgcaccagcctaatagatctgaagttgaaggttcaagtgtaagcattcttattgatcacaccacttgcatggtttcttataggcttacccagatctgcaccagccacttcagccaaccagagaatggggtgactgtgggaataaatgagatccaataataatgataggtttgaggggaaacaaggcattgtccatttgagaaaacacttttaaataaggaggtctctagaaggctaacaagaaaaactctgagaggagaaaaacagatgtacttaacgaattttgaaaacagtgatcaagaatatatagaaagaaattagacttgtgagcctatccattggttaattaccaaaccgttaaaaaagataaaactccattgtgcacgtactgcaaatgtaaagtttttgaatataacagtcttcttgtt

SEQ ID NO: 1244221 - DNA, 4001 bp, Homo sapiens
attctcctgattcagcctcctgagtagcttggattacaggcgcatgccaccatgcccagctactttttgtatttttagtagagacagggtttcaccatgttggccaggatggtcttgaattcctggcctcaagtgacctacccatctcagcctcccaaagtgctgggatttcaggcttgagccactgcacctggccatctgttactatgcttattacctgggtgatgaaataatctgtataccaaaaccctgtgacacacaatttacctatataacaaacgtgcacatgtacccctgaacttgaaataaatttaaattaaaaagactaaagacccctgccctcacaaagcttcccttgcctcacttctctcaatgggcaggtagatatgcccaggaatacatgctgaacaatcaaagaaatctcttttctatcacatgctaggaactaaaaagatatttatcaggaaaatgatagtggttagccttccttaccaacatacaagtatttaacaaaatcaaaaatatatgcagtatggattaatgttatcagcatttcaaccgcattgcagttgtttaaatggttaagatgtatgcggagctcaaaactaggatgattacaaccaaggcttcatttctccctgtcttctcagcagcagccactccactggaagtagaactggccatggtggtgctgacgggaaccatggagaagatgggatagtggttcctccagcataggatgttcagtggctagggattcccaggtcttgtttgacatcaattaccgtacagtttcctacattggtgaacaaatagggctataacttagcttagacttcctcccccttatcatgtgtgtgaattattcataagtcaagtttatgtttacagagacctactgtagtctcaccatttcgtcagcatcaccataaaacctgcgactcgaaatatgaaggtgaatcatgagatgatcagatttatttgaaatgctattaaaattatagaccttccacctgagttgttcctattctaaagctcaaaaatggcccttagaaaatctctcctttcgttcttctggttctgcatgctgtaatgtaagctaaatatgagcttttgaagagcaataaacaataaataaaaagaaatgtttgcttccccagaaatataattttatttttttttacagtgcaaaaatacagcatacaaatagtattatcctggaagaaaaaaatctcatctgagaaccttgaaacagtagaaaaaagggtgatgagtcagtgggacagagttctattcaagaggagctttgatttttatttactcgttttttttttcaagccaggaattcgaatgatgaaagctggaatttttctcaagattgtcagagagggccaggattagctgcataattatgtggggaaatagataggatgttattgttgaattcgtgcttgaggatcagctaggctgcaaaggtggagtctctcatctgatccagaaggggtagaagagtctgcacaagcttctgtgcacctgggaatgtttcgtgcgttgagaggagaggtggggtctcagcaggaggaggtcctgcaggtggtgctgcaaggggtcggctggccgcagggaggccggcagcagggggactgcacagacacaggctggcagcaggtggtggcccagcagcagggcctgcacaccacagccgtgcacgacgaggggcagcaggtgatggggcggcagcagccttcctgcagggagcaggggtcgcagcacaccgggcggcggcagggctcgcagatggggcgcgtgcagcggggcacgcaggtcacggggcggcacacggtggtctggcaggtcacggggcggcagcagcaggggtcgcggcagcagcagggctggcagcagcctcccccgtagctcagggaggacaaggtggagccgcagcaggagccggtcatggtggtgtctgaggctggtgtgggttgggctgttgagaggagctggatgttctcaggtgtgaatgtcctcgttccactctgggccctttatatatcctagctggatgctgatgacccccaggacatgaggtcatttcctggagttgtagctgcccgttgaaatgagaactctggatttaactgctgaggcagcgatccctaaatcactaaagaatgctttgttttctacctgtctactttttccctagaacggaatacctggtcatgtatatcatcagaacaattgctcatctatcagctagtccttccaggccatgccatgtgagaaggtgcaagtttgaagaatccagccaccatcacactttcctcttgttcgctgccatccgtgacttaagcatgggactggaatgttcatgagtcacaggctgggtttctgattggcattgagatcaagcaagaatttcttaaaaaccaaaatggctcataagagcagatgtgtattgattctgctatggaaagaatggcccagtgtttaatgacacagtgcctaaccttgtttataagaaaatcatcaccaaagctgctagactgattttattttagtaatctgagttggtttataactcattaacacttatgagacacttattatgtagatggtactgtactatttgggggtggagggggaaaggaaagaaaaatagctttcaaatagtttcctatcacatagtaatcataacttttagtaaggcaagacaaagataaatcaagcaattaaagggaaagaacttttctgggaacaataaggtcaaactaaatggggatttcattcattctgtgcctttctgaatgcccttccctgattattgacctagaaataaaattgaaattgggctatttcttgctttcttgctttgacatatgcactttgtattacatacttaaaaatctatggacaatatctacaaaggaatcaattatctttctgtcacagcttctttagtttgttggctgagggttttgtttgtttatgaggtgggaaggtggcattatgaaaaagacaaggggaattagtttagctggtgaccaataaaatagctttgtcttttccagccatagcaaagatgaataggaatacagaaaataaatttagagttggaaggtagattaaagataacattgtccaaggaatgctgatggtcttcagtgcaaatttacctctgaggtgtgttttgttttgttttctctttttaaaaatacaccctttggtctatcatatccctgatctttgaagtcctttgagtctatgatccatcatagtccatcacagtttttggaagaccagatttacaaaatgaattcctccaaagtcgtacggatcaaagagtggcaaatatttagcaataccacaggtcttctgtggagtagaaacactggtgatgtctcccagtctttttccaactcggagtcactcaaaatagataacatgtagcagtagttattaaaaagttttattccctttagtgaaataaaataagtactcacttgatacatggtttagcattctgttctttgttttggaatgtatacagagatgccaaactaaaaagagaaatatgtctgtaaatccactgcttttgttaacaaaagaacacagtactaagaaatactgttttctaaaattataggctgttagaaaccttgctcttccaagccacatcagtaagaaggaaacatttcactcttgcctagacaggatctaagtcatctggacagagaagcaacctcagtacccaacccaggtacagaatttcagacaagtgacttgcagacacaacattccccatttgtctcaactatacagtttccagtgaaagaggaccataagtctgtttcacagctcaggtctggtgttaattattttttatacacagccctgtttttcttgagcctatgaaaacactatgtcacgtaattttaccccaccattcctcaacattttataataacatttctcctcctttgtttgggaggatgccccat

SEQ ID NO: 1244222 - DNA, 4001 bp, Homo sapiens
ggtgatgaaggtgaagagaaagagtgtgtaaaagaacagataagtgaaagaacatgaggaaaagcgaaacatttggaactgcaaatgtttaataactataaggtcagtgttgcttgaagtgaatcttagtggggagcagtgagacatggatctatagagatgggcaaaggacaggcagcagaccacctgatgtgcacacacttcctagccacatgggtaatctgaggactggcctagctctcctgtaacatcttcaaataccaaatacttgtaccaggaatcctagtgcctgtctctgttcctcttctgtctttctcatcatctccatcatcttcctcttcactcttcctcctattcattgccttgcctcccctcttcactttttattcatcccttatctcttactttttgtctctctttttttgttgtcattttattccacctatgacaaactcaagatactgtttttttgcacattcatttacattcacttctctgccaaaccgattcttctgattacagtttagcaggtgctgtttcatacttattattatattacatttttttcttcactttgggtgtcttcattgtggcttgtccttgtgactattcttggaaggcttccaggccatgcttgttaagccctcaaggagctcaaatcctggtcttcctctgaaataatggtcctgaaattctaatgaattacatggaagtgatagaaaataaacagccttgggccccactcccagagattttgattcattaggtttggtttggggcctaagaatgtgcattttaataggcaattgcaagagattctattgtgtatgacgcatgggccacactttgaaaaatgctactctaggaactgtggtaagaagatgagatgcgctgtgctggtcagtttactaccagtggtcattctgggcttggcatatgctattcccacttctacccctcttcatgaacattgtctttccttttgtctattccattagaccataagcttcttggatacaaggcatgtagcttgttcatcactaatcaggcagcacctgtcaactggaggtcccttgataaacaattcctgaatgactgaatagatgagatttctatggataaggttttgcttaggttgagctttgtttcccttgtgcaggttccaaaatcttgcttatctgtgtacgctaataaacatgcactaacgaacaaatcagggagcagggcagtctgctatgccaggaaaaattagtttattgacaacagtgagcaacacattgcaaaagatgatggtgacagtttgagcagtaaaaaccatcaggttgtagaatgtgtttgcaaagtccaccccaggaattcttaaaggtcgatttactatccataatgactaaggctgatgtagacacctgaaaatgtgggtgagggtggtaatggacgtctgcttacaccaggctgtatccagatggtaaaaatcactattgtcaccttgtgaaaaaaaatctatttttcttttaactttttaaaaacaccagatagatgtttaggcttcagtgtattgctctgtgggggcattggggtctcagcaggaggaggtcctgcaggtggtgctgcaaggggtcggctggccgcaggggggccggcagcagggggactgcacagacacaggctggcagcaggtggtggcccagcagcagggcctgcacaccacagccgtgcacgacgaggggcagcaggtgatggggcggcagcagccttcctgcagggagcaggggtcgcagcacaccgggcggcggcagggctcgcagatggggcgcgtgcagcggggcacgcaggtcacggggcggcacacggtggtctggcaggtcacggggcggcagcagcaggggtcgcggcagcagcagggctggcagcagcctcccccgtagctcagggaggacaaggtggagccgcagcaggagccggtcatggtggtgtctgaggctggtgtgggttgggctattgagaggagctggatgttctcaggtgtgaatgtcctcctccccctctgggccctttatataccctggctgggagctgatgacccttcaacatatgatcattttcttgtgcatcttctggccaattaagtgaagatttagcattgactaatggtattttggtcactcttcacctcatacatattcatgtacatacaccacaaatattcgctcattttcttgtattgtttatcctcactaaatttagacattggattcacttctgattaattttcctttgaaatattcctaacccataagagagaaaagaatgtgttttctaaattagtgtctaatcgctctgccctttggcgctaaaattagcatgttcttccttgtcttcaaaggctcccatcaccggcacccaagcagtgacttgccttattaatgcacatgggcatgatggtagcaggttaattgcatcatcctagtgcagaccagtagtcatctgcttcacagatagctccttccatgactcacttaaagataggcttgtggtttttcatatgagcagggaccacacgaaatgcagatccctggccactggtgtggtcactctcccctgactaggacctgggctttcctgccttggttttgatgtgtcatcattcacctggaatgccctcctcatccttccaatccaaactcaacttctaccttgattgtaaaaccctcttcaaggatccattgcaattattatatttgtaatttgtttggaattagtcgttgcatctgtagagtccgggaagggattgcggagaatatgtaggcctatgccctcactctacagctgaggtcctgagagtgtaccaaggtcacacaatgaggtcaccatatgaggtctgagatccaggtctcctcagtctgcagtaagtagcctctactatgagttttatgctcattggattcagtaaaccatggtctttagacaggaaagaaaacatatattaaagtagaagcccagacttcatgccactatgcaatatatccatgtaacaatgctgcatttgaacctcttacatttatacatattaaacacagatttaaaaaaataagtaatgaactttcctttcagcagcaaggttagaagtggtactggaagagaattagggaaatgttttgcccagatgacacattgtcatcctggacccccattgactccactaagtatgacaatgtgtctgagagctagagaagggacctggagaaagctaacatgatgcagggtttattagtggaacttacatacaagggtggtccagtggtggtatctggacaggagaactgctattatttgtaaaaagcatgcagttcacacagtattttcattagaaccctccacctaacaacctccatttaatccaaaacaaagggcctcaatccccagtatgacctgtgttctaatggatgaggtggggattcaaatgtccttcatagataaggagtggatctccaagttggccactcccagatccttagctcagaactccaagcatacattcttctttgattgtaggatcattctcagggtatgcttaagttaagttattgctgccagatgtgtctgccataccctccacctcagcatacccttgaatagcccttacattctaatcacaccattcttctgagatttccctggggctaggatatgcagaggagcattgcaaccagatgtttcagcagcaacataaactactacaacaaaaaagaataatgaatgtaacaacaattgtactgtatagaaagtttttccaagcactcaggagttgattaaaccatgtggttacagggtcataagatagagattctatagcagaaatctgggtatctagggcccacatggcctgtgttacattgtgagagtaatcagggatatatacacaaaattcagttttaattaatgcacaggttctgccctgataagcggttaagatgtcctgggccatgcaattttgcaaagta

SEQ ID NO: 1244223 - DNA, 4001 bp, Homo sapiens
gtgaactatgaagatttgtttgctagttaccaaattattgctgctcacctacaggtacacccttcattgcctgctctatgataatacaaagggatcctatgaatatttctccttagccagctgacacaatgtcccaggcaggagaatcgcttgaacccaggaggcagaggttgcggtgggccgagatcacgctcttgcactccagcctgggcaacaagagtgaaactctgtgtcaaaaaaaaaaaaaaaaaaaaaagaatcttaaatgaattaaccctaagctattctctatggccaatacctcatgtttgttttcatctgtggctttccagaaccatttttgttgttggcttcctgtctactcactatagggaaaatgagcccactcagctcaaaagaactcttggtggtgaaaattttggaagccagtgaactgtttgcccttactctcgtccagctggagaatctataatcctagacactagctacccttgcagaccaatgcagacccactgacttagatgactcaggctcattgtgttcaaatgtgacctgaaggaaatctacatagaggtgtgtgtaggaatgaaagcactccaggagtcttatttattatacttaaccagtcacatttttattagcagctggcagcaacgaggtcttctgaaagaccaggcagcatcaagaaagagaaacaagagagggtttgctaaagtgaaatgaattgacatcatcaggaaatgcaagcagcagtgtggtagtccatggttgctgaaaggttattctcggttaagaaggatctcttcgtgcctggacaagttccctggtcagcacctggagagaatgtgaaggtggaatcagggtaaagttagaaagcaggcagcatttgtactcggtgggaggcaggcacccagggatggctatgcatttatagacagccgcagaccctcagaggaggtgtgaagagggctccattaacaaagtgttgccttgcagaagctggactcacagctgggttggcatgaagtcggcaagcaattggagccactactgggtgatgtgcctaaaccagtcacacagcaagctgatttgcagccactctggttataggaagggggtccatcacaagttggttggccagaaatcacagtgtcacaagaagctggtttgcaacagttctttgtggaacaaggggcctggcagttagccactggctggtagatgaagcatgtggaaggaaccagttggcagtgaggtggctggcaatgggaaggcacacagcaagtagtattgcaagaactgaacacacaagtcgatggctggcagggaacaggcatgtagagggctgattggcaaggcttgaaaatatagcagatgggttgataataagttgatttacagggctggccttcaccactgacgggttgacatgaacttccttggcaccaagttggttggcatggactagctgtacagatggttggtaggcaagaagtttccggacaggaggtcacttcagagcaggatggctggcaggatccagcatcacagcagactgattggccacaagctgcctgacatgatccagacatgcagacagattcctggcaggagctttgctggcagggactggcatcgcagcacttttcctgacaacaagtagattccgagcaggatggctgacatgagctaaccagacaaggagactgaccagtgccagactgatagcaggctgcgtgggagcacataggttggcaaacaaaacccacacaagacgttgctggaaggcgggtaggttgacacgaagcaggatcacagccacttggggcaccaatggatggctgacagctttcttggcatgtgaccagttgccacattctgctgtggcaggaactaggcaaacagagagcatgtcgaaatccacctttaactgggtatgtggtgatggtgggcacagctggaatggctgtggtgtttccaggacaacagccgtctgccatggtgctggtgctgaccttgctgggaagttgcaagctcagtatacctgcattggaaagacatccgatacagaggggcttttatagtccttcactaggggtgttggcacgccatgcagcatctttccttgttattgtttttactcatttgcatgcaaacatctgattagcaggcttcaggagcctgggagatgtttcaactttgaaaaggtgtctgttgagtcgggagttttctgcgctgcatttggattcgttgacactgctcctgctcttggatgagctgtctcttttacaggttgctctccagcctcactgaagcaggcctttcctggcactaacctttcatcaggaggcctctgccaagccagagtggccctgctgttcctccaggaatgcagctttgcaccattcaatcagaaatgaagccttgacccagtttggggagaggatgtcaagacgggaaatggaaaattagtccaaggaacccagggacacttaagtgcctctacctctttttaaaaccttcccatttatcattcctgaaacttgtttactagtactattactaataataacaatagaaatggctttcatttattgcatagttactagatcaagtccttggctgcatttttcactggatcctcacaatgacttcagtaagtataattgtcatcactatgttagaagtggcaaaactaaaaaaaagtaataaataaagaagaaaccaggtttaaaacaaagttaagattaaaatataaaacttcattggcccttttaggaagcttaaaatctcccccaaattggttcctctcaagatttttttagaacagaaaagaagaaaacagaagtggcaaaactcatagagtttaaatcatgttcccaaaattatgcaaatgaaaaggggtagaaacaaaattcaaacctagctttgtctgaccaccaaacccctgatcttaaccacctattagaccccctgactttggggaggcagggagaaggcgacactgatatagtggctgcaggctgacacccctatggcaacagactggctcgtgagcaggttgcccaggccccatcctggggatcctccgcccactccagtgactgtaatcagcagctagaccacactggtgtgagtacttacctctacttatcaatacactcaaacacagtcttttaattttggaaattttttaaactaccaaatatttcatcaggaagtatcaaacccaccctagggcatcaatagcatatgaattctatacaaataaaaacacgccagcagtgataataaaaaaaatcactgtaaagtggtgttaatgttaaaccaatcccttccaagaggaattcgtgagggactttcttggcccttctgcttttcctccgggcttgtcctggctccgcatcaccaaccaggtccggtgttctacaccagccaacgttctggccggttcacgctggaggcacatgacggagtggaaagatcacggtgtggggagccagatggggctggccttgatttctggctctgccactaactcattctgttgaatatgttagctaattacctaagtcttcaaagtatggcgatttcatcaactgcgttgtcatgtctcaggttagttttttgtgggtgtttgtttgctttggttgcttcacaaattattgaaaatactgaaaacgctgaagggtactttgcaaacccccagctacaaaatgccttctccttggcaccctcttcacctccattttaaaaagaagagaaacatttttgatcagaacaatgtctggaaaaccttctcccctgccattgaaatgcctttttccccacagttggtttctatgtcacaccatggatcacttcttttgccctccttcttgtctgtattcatgttggcatctttcaatctgcaggaatccatgcactgtgttttattgctgaatatttacccccaaagctcttcatcttcccagaggatgtatttaatactttcagtctta

SEQ ID NO: 1244224 - DNA, 4001 bp, Homo sapiens
gctaaactaagtatgcagatgcatatggagtgatataatggactttagagactcaaaaagtggagggtgggagggaggccagggataaaacactacacattagctaccatgtatactccttgggtacgggtgcactaaaatctcagaattcaccaccactatataattcatccatgtaaccaaaaaccacctgtaacccaaaagctacggaaataaataaataaataaataaataaatatttttaaaagatgtcttttggtgagaaagttgggaacttccatatggcagtaatggtgagagtctctcatgtgtaacaggttgatgctgtggacacggtggtttctacacttcagggcatctggtcctcacaataatcctgagacaaaagcagggcagagagtaataacaagctaactgagcctgtaggaaaccaagctataggtaggaaaccacgctataggtaggaaatcactttaataacagggaaattgagactgagagggaagcaattggcccaaaggccaaaggcaagtccaaaagtgtgtgtgtgtgtatatatatatatatatatataatcacaatacctttattttttgcaaagacctaattgcacctagatttttctaagataaataaggacatgaattagtggttatcgtagtagttttgttctaatagaaactgtgtgtttttgctctcagaattgtgtgactatttctggtgtatagaaaatactacactgtagtctgatattttaagcatatttcaatgtcatgatattatatgtcacttagactagcaaacttctaatcatagtcatgactaatgtaaaccaatgtaagccccatttgaggaatcaatgaatactcgataaatgctaacattaattaaaaatggattgttttggaagacagcatatatgaagaaatggatatatacacttctcaaaattgctttgcattttgagctcagaatttcagatgactgtgaggactaggataatcaaattatttatacacaccagcacagtgatcaattcatttagtcaattaaggaagaaagaaaaatcaatgtcagaatcaatggaaactaaaatcaagtatttttaaaacattctgttaatctctagactctagcatagtgcttgcacagtggatgtcttccaataatatctattaaataaatatctgttaaataaaaagcttctataaaatgaactaccacattttttactttttaacttatcacaaataaccagtatctattttttcgataaattccactatgagagctcttattctgttggggtaaatcttggatagtgtgataacctactgttcaggtttaggtaggcattccactttccctaatgggagacatgaaaataaataatcacaaggtcatatttgctaagccagaataaagtttattaacaaatggtcaaaatggttatttctcaaagagtgatgaaatagcctaaaagacagaagggaggtctccaatggtacccaaatgtgcaaataattaagaagattcatcaagacttggccccggggattgggatggccttagccttgatgtaggcagtagtgagtgctgaagcccagatggtgcagaggacattgggcagccacctcacggaacctgtgcagactcggctggttaacagcggggctcacagggactctcacagccaggctgaacataggtggtcaggttgatcccactcagtccgggagtcgggtgacagttgttgagcagccagcaagttggcacataggtatcaggcttgcagcagggtggggggcaggtgtcacagcagatgggctgaaggaggctgatctcatgtgggcaggtgctgggtaggcagactccacagcggcagcttttatcaaatgagcagaaggtggtggcagggccggtggggacgctgcaggagcggagagcacagcaatacatggcaatgggaggtgggtttttgttgagttgagagaagtctgttggtgtctcgatgctcctctcttctgctctggctcttatatacccatctccctgggcgtcagcctattactgagggtttttcccccatgtttcagtttatagttatttccataaaaaatgcctaattacttaagtgtttattacctaagatacactgctcacctcataaaagagatttaggttgttttgttgtcaaattaggactattcacattgccagtgtgtcactacacagaaatcttcattccagtcttcaaaggtaccgggccattatcttctaatcattataccctcactaataatggctcggtatgccaggcatctgcaaacgtttcccacttcttttgtttacttttcagatgaagaggacaagtaagctttttgtttgctgttctaccagtgactacaggttctatgtgatcctttaggccctcaggctgaaaaagtgatataacattttagatttattatttgtggctccaataaactgaatgaagatgaatggatagaatctatagagaaatagattttggttttgtgtaaagaggcactttcaaacagagctataacaaatcgtttgttctgcattcctttcaaatatgctctgaacaataacttggtaagaacatgcaggtgggaatgaagaccttcatgggtgacaaagatgggtgtcctttaagctccatccaactgtgttataaatggagattatttataaccaaaaggctggttgtattgggccattcagaagctaaatgatgcagtatttaccagactgagttccatgaacactggttccaagggacttgaaagtgttttctggtaagtaagtttgggaaatgctgaattcttcattgttgggcctctcggagcctttaatgtgctaaaatgctctatgacttttcaatacagagatatagcatatatttttctccaaacttacttgaccatggactgctttttgtttgttttcagagattagctctataggtcagtgctttatgaaacatacttggggagatttagcaacatcttacagcaagcttgttcaacctgtggcccagaaaggcattgaatgcagcacaacacaaattcataaactttcttaaaacattatgagatttttttgtgattttttttctttttttgctcatcagctgtcattagtgttagtgtattttatgtgtggcccaagacaattcttctttcaatgtggcccagggaagccaaaacattgaacacccctgtcttacttccaggctctgtggtccagaatagagacatttccgagtttcatctaaaccactaaaactctaaaaataaagttttaaaagtagataaaggtagaaaatttagtatgatgatttagaattactttagaatatgaaaaatactaaactggtaaaacctttagaaatggcttacttagaaaggcttaaaaacatgtacatattttcttgacccattttttcagataagatggctcaagttctaaagtagaaaattgcacaatgcagaggaatcagaagccaaatgagatgcaaatcaacaagatgttggattaaaaaaatgcttagcatgaaactgctttctttttagccattttcttattggaatgattttgcagttttggattcctatgctagaatttacatctctcttagatatttacatatcaaaattagaatttacatataaaatgctcattgattgaacacctgttgtatgttgggcatcatgcaaaaagtcgcaataggctcctgcccttacaggggtcatagagaagaagacagacacagagaagtaaaccagcaaacaataacaaaggattgtacatttagattttccaggttatgatatgagaatttagaggtagaagccacagacttctcctagaaaacttaggaagcccttcacaaaaagagaacatctgtttggatcttgaagggtgaaaaggagctgagcagatagaaataaataggaaggagatttcagccatt

SEQ ID NO: 1244225 - DNA, 4001 bp, Homo sapiens
tttatctttttactcctggcatcaatatgatgcctgacatagggcaaacactcaggaaatatggacaaatgaatgagtgaatggactagatctcttgttgacaatatcctctgtagtgtcccatagactccatggctgctaagttctgttcatttaaggttgagctgtaaaaagcctatggaatcccgtgagaaatttctctctcaagacactaacaggtacattgaggacattttaaaacaagtttgttaaaaagcatttgcttctccccttccttgtcctactctgtttcttgcatgtcttcttgtggttttatttcaatgcattttcagattttgacttgtgtctttatatatgtattgtgtatagatatacatacacacatatatttatatgtgttacataaatgtattggatgtattatatatataatatatacttgttctctctaggcttggaaaagaaaaatcttcatgagataaaattaagtaggttgataaaattaagtaacgaattaaagcatacgtaatcagagttttagctctcaacctgagacacctgaaaagtattggcattctattgattactgtggtagaacatctgtgctgagtatggtggcaaataaaggtatgtccctggtgccttgttactagagttgaccactttgagttctctctaagagaaaatgaagttgaaataggtacaccttcaaaatgcccagattttagaattgaatacttgccaattttaatctatgaaccaatgtactctttttctattataatccgatgtggattttgttaaagaatcttacatgttttatttctcttgcatattttgggtttatttcataactgtgctcattaagcttctggtttcattagtattgaaggttctatgatgtggtaggaaaaattgggctttagagtcagacatacaagaggctgaattctgattttctaagtaattaactttatgactttcagaatgttgaataacgcttaaaacttcattttttcttatccattagtgctgttttaaggactaaatcaataatttactggtgaagagtagataaataaatgttggttcacaccaaaattgcacttgtctgaggaagaagagagaagagaaggcaaacatgaaagagaacctgttaaaagttagcaagccatgttagtagtagcaagaatgttagtcattctgccaatagagtcttctttaaaagattaaaataatcatcctgtttttacctttttaaaatggaagaaatatacccaaaactaacataaacaaatgacacatcttgccagagaaatatagtttattggaaaacccaccaagaaattttcttctatgaaaatacccagtacaagaaacaagagccaggaagcaatatgatcaagaacatgtaatctgaggtcttaaagattgaaacagtattttgctaataaaactcattcacctgcccacaggaaccaaatggtttttcagctaaataaccataaaaaatacttttctttttttcccccattaaaaccaaaggtaagttcttcatatctgggtcatctggtctaccttaacatctggcaaactactgaggcaagtgaatactgaagggacagcttctggattcttcgttgtcgggcactgagcaaagtagccatccatcagcagcctcttgggaggcagggctcacagcagggctgagtgaaggtggtgaggttgagggtctccaggcccggagttggctggcaggagttgagcaggaagcaggtgggcacgcagggctgaggaatgtggcagggtgggggacagttgtcacagcagatgggctccagtaaccaaactgtgtgtgggcaggtgctgggcaggcagactccacagcggcaggatttgtcggaggagcagatggtggtggcaggcccagtggggacactgcagctgcgagaggcacagcaatccatggcaatgggcgtctggttagctttcagtttcttagatgaggattctgaggtacaaatgtctcctcttttgttagggctcttatataccctcccaagtgggcattggtccaactggaagccttcctgttttgtttatggcaccctttttcactgagattctctaatcagtttgtcatttacatgtccattaagagttcccgctcttattaagttaatcatatttttgactcattgacttgtcatttttgtcacaagatcatcacattttgtcttcacaggtttctggcatgccaaaccttatatgacttttatgggtaatcaatccaagtgacaattcagctgtaattttggaggccaaactcttcttgtttttccctcttaatttaaaatactatggataatgtgatttctaatgactaatttcagaatgagtaactcaaatgatgaactggaccattttcaactcaataaagtcaacaagaatatggctatttacagatgaatgtttcatgtgactacaggcatctcggacatgtttgcattatttagtgatattataattcaggttctattgagcaagcaaagtggtagaatggtacaggatgaagaaactcctttttattatttttattaaatctgtagtgaatttctcaatgttgtattattctatggattttttttttctaaaatagtctctattctcaaagttatgccaatcttgtggtgaatcaaagtataaattcattggaaggaaggatccacacagtggccattctttgttgaatataccactaaaagaaaaccacctcagccttgattcattttcacatgaatggtgtacatactttaaaataagatgaaataagaattaaaaggagaaaccacaagagtcacagaacaatcatggattttggcagggaatctgactcaatgcaatttagaactatggcattcataaaaatcactttttcactgacttactccctactttgcatgtttatttgttttcataccttggatcttgaactagattgaaattcctttgaggtatgccttaaacaacattatttacttaagtcagccagagattgaactagataatatcaaatgtgtaatattctagattccaacatcttcctacacctgtccatgatcagcacaaatcctttcagataatattgtataatttaaattacatactcgttatgtggcaatttgttgacttaacagaaagcaaagattccgggtaggttgtttctgaggggacattaccaaaaaccagtacgatctacttaaaagagaagaaagctggctaaaatcagtggaaaatatcaaatgtcattggtaggtaagccttatacgttatacgttaaaacaaccagtttatctttttctttaacaacaaaaatatgtggtacatatatgccatagaatactatgcagccataaaaaataaggagctcctatcctttgaagaaacatggatggagctggaggctattatctttagtaactaatgcagaaacagaaaaccgaatactgcatgttctcacttataagtggtagctaaatgatgagaacgcatggacacatagaggggaataacagatgctagaacctatcagagggtggaaggtgggaggagggacaggatcaggaaaaataactggtaggtactaggcttaatacgtgggtgatgagataatctgtacaacaaacccccatgacaccagcttacctatgtaacaaacctgcacaggtacccctgaacttaaaagttaaaaacaaaaaaacagaaaacagcttcaaatcatttttattagcaggaatttacaacaaatgccaagggtgtcgaacatcatactgttaccagatggtgccatgcagttccaggcttttggtgtcccaaagaattggacgagacacccacagcaaaacaaagaaacaaaagtgtattaagcacagtattacactctaagagggggagagcaaaccagcctctgtgagatgagatcagcccccagcttggtgcag

SEQ ID NO: 1244226 - DNA, 4001 bp, Homo sapiens
tgtaggtggtgtgtgtgtgtgtgtgtgtattgcaattatcctgctaagtgtttattgagactcttgaatatatgggttaataaaatgtcaccaaatttcgaaaatttttgcttttattccctcccaaatttttatttcctattctttaactcctctcattctgagactccaatttcatcctcatttcaccacttggtactttcccacaggcttcttagtttcttcaatttctttttcaatccttttttctaccctggctaggctggaacctcaaagtctgttaatagtgaatgacctctggtatctccactcagcttctaatcacccagcagccactctttgctatgcctgatggaatttcagccagcgtatttgcaactgtgccttctgtaagtacttgagaacttttacacagtcttctttacttacctacgtatatcttcttcctctccagaataactttccaaaccccatttagatatagctactcgtgttgcaaacatgacctgtgtagagcaagaagaacagagtatttccatcttgaactctcttctccttctcggctcctaggctcaattggtgacataactccactgtctagtctttctttgatattttcttttcctccatatccctttgatgactagctgcagtcaattcctctttgactatgtctttcccactttacccccatgacaacagtcttcattgttctcaattttatgatcccacagcactttactaatactgctggtagaacacatctttttttattataacacagcaactggcattcgataattattaaccgtaggaagaaacaaatggatgttgtgtttgtatttgcttcacctgccagatggttagcttattttcagcagagacaataaaacacaggacacacaatagacatttaataaatcttagttgaataaataatgacattattatatttttttcataaatagatcatgtcacctggattagtttatatattttgtcatatttggtgtttgggtaatgttcagtatttctcaacctgtctgaaaccattttttgggaggacaagtcaggaaaagtctactttcaaatatgccgatgtactagaccatcttacatgcaaggatgtttaattttcttaaaacagcaagaacagcaaaattaagaaatttttgtccatactgccaccattttcagtttcactaatgtttccagtttttctttaaatgccaatgttcagagttaagaaacgcatttaatgaatgaacagaaataaacagaagtaattgtagacacttgtgctatgccagagatgtaaaatttattaggataatcatgaagaacttccttaattttcagaaagataccacccaagactgaaaacagaattcccaaaccacccacagaaagagacactttaatatgaaggaatcgaacagcttcaggaagctataggcatccactgattcaaactgcagttggttatagctgaatggtcattgaaagtttcttggtctctttttttttgcagggggtgattgtggtagtaccatccttgttccaatttctaaagcagagtacattagttgtaggtactgagataggtgaatgctaaagcttctatgttgactttttcaatctcaggcactgagcaaagtagccatccattagcagcctcttgggaggcagggctcacagcagggctgagtgaaggtggtgaggttgagggtctccaggcctggagttggctggcaggagttgagcaggaagcaggtgggcacgcagggctgaggaatgtggcagggtgggggacagttgtcacagcaggtgggctccagtaaccaaactgtgtgtgggcaggtgctgggcaggcagactccacagcggcaggatttgtcagaggagcagatggtggtggcaggcccggtggggacactgcagcctcgagaggcacagcaatccatggctattagagtctgtggtatttatgggtttgattgaaaagaaggataaggcttctgaggtgtgaatatctctcctttctctggggctcttatgtaccctctccactgggagttggtccagccaagaggcttctttcctggttcttgtttatgttagtgtacccattattctttaatttgtttgacatttagactctgtaaagagtccccattttcctaattaacttttatttgagttcgttgctaaatctgaactgattacccttgctatttgtcactggaacacaagctttatgaggtatcaccaaagccttctgttattatattttcaacaccagccctgctggggaatattgcatgacagtgagtctgtaatatgtgggcctgctctccagtgctgctttatttttaatctgtcactttatctataccaatttgtctgataaagtattcttgttttaaagagttgaacttaattttactttcttttagctttgaggcttttgaagatcaaaattacattaacatgaagaaatatgccattaagaaatatggaaaaactttaaaaaacgcttattattctagttttttactacaaaatattttgtatacattgtttatcattacattacattactggaatcatattgtgcataggttctgaaacttgcctttgtgtgtgtgcatatatattatatatatatataattatcttatattttaaaggatatttgatagtgttacttttaatatttcttagcatttattatataattgcacttctatgttactttaaaattttatattattatgcattgaggttattttccacttttctctacaataattttggcaacagagcacctctgtatgtaaatctttgtgcatatttttgattatttcagaaacagaattaattatttggtagaattataggggcaaatgttaatttccagtatttttaaggcctttcatatcattgccatactgtttttcagaatggttctatttacctactttttttttcaaattatctatttccaccagatgtgtttgattaagaattcccatttcgtatacctttgacagatactttattttaaaggtgttttccaatttcattggtgaaaaacacaattttatgattgttgtgtctgtatttcttttataaccagctaggttgaaatattccttcatatgcatattggccatctgtcttctattgagagttggcttgctttgtttccttcactgctaattgtgggcaaattgaatttttagcttctgtctatatagactaaataaaataataacttaagaatacaaaactaaaattcaagtaaaattattaccaaaggaaacttatgagcctgagctagattaatctgttgacatttgatttcattctctctctctcttttttttctttttttttttgcaaggtattgcattttttcctgaaatcaaatgtagctgtggtaggaaagacctggttctagtaccagtacgctatttagactgcaggcatagttcagtgtttaagagggagcacaaggtgggcttgtggccaatatcatttatacacctcgaaccatttccgctcagcttggtctcatgcttcttgcaagccatggttcttctcacattcttcatacctcctcttttaggcacacctgttgagtggtgcattgtggtgtgcatgtttgtatgttttgggaatggggacgtgtagtcaagaggaccacctgaggagtcagaatagctcttgactgttcccggtgctgctggttatcttcctcgttatggtaagtaattcacttttaggagcttcatcctttttctctgcgaaatcagggtaatagcatgcatattcctccacttagaagattattgtgaggttcacatgtgataaaaagggtgaaagctcatggacaaccatataatgctatgcaaaaataaattattatcatgattgaaacaaattacagatgaaattcaaggcaaggtaaagataaaagaaacatagtcaaaagaaga

SEQ ID NO: 1244227 - DNA, 4001 bp, Homo sapiens
ccatcagctgagtggcacccccatcatttgcaatgaccttccactgcatctgtgcttcaccttgacagccttggcattactgcttactgcactcctgcccatattttctgatccttcatgattattatcattattgaaaagaatattatttccccattttagaacatctataatttttttggtcctttcctgaggataatttttattctattaaatcctgtattttgctcaagtatatttttttttcatgtggaagtgacatcaggcagaataagcaaagccatgtggctacaggagacatatggtttgcttgtctgaatatgaccaagtttacctgagatacaagaaagctgtagagtctaagcatatcccgagagtgcattcttagctcacagcttaaaattacagcctgagtccttctcttttacaactctatcattgcctaccattcaaacccttacccaactcctccctgactcttccccaaagaggatattcccttgtccttgtgtggctccatctttgactaagagctttctcatttgcctatgacttttagtatagtaccattaacatagaggtgatgggatgaggccagtgaggtttaacttccaccaaatttggtcaacaccaactgtttcttagctcatctcagtcttgtcctcataagaatgtaaacattttcctatattttcctcctcttcatttcatgggtctgtgacctgcacatcttccctgtaccaacttaactcattctattattaaatgtgtgtatatgtatattcctaatgtcttactcttccccaagacagaaagttctcctctgatcagtactacccagcacaatctatctactttgctctttcctcttatttccaagattagacggtgagctccttttaggaagctcctgtgcctcacatatcttgatgtgatctccagagcccaacagtgcaatgaacatgacagatgatcaataatttcattgactgaataagaaacttttgttagttaaatacagcgagttatcttattttgaaaaatttatgaagtcctttctataatataagcattacattatatttacaaaatcagttttctttcctggtcgtggtaacccaaatttgtctttatcttgagagaagtaatgctaaaaaataaactgacaactaattctcaaaaaaattgaaaaaagagaaaagaattactgatattaagataatatttattgaagaacagttaatatgtaattttgaaggtcaaatcaagcataacagtcagaaacttagaggcttagtctaactgcatcatgcatctgaggtctgaatgctgctgggaagagatccatgggaaaaatgagtggtattaaatgtagatggatgccctttcaccagttacttagtggaataacaggataataaagctgatggccatttaacacatggacaagttgatataaatgacactttcatatcatgggatggtgactggctcatggttgatagtccaatatgaggttcaacaagaggatccacagcagctggggcggcagcaagttgcacggcagcaggtggtctgacagcagagtggacggcagcagctggacacaccacagctggggcggcaggtggtctgacaacagagtggacggcagcagctggacataccacagctggggtggcaggtggtctgacagcagagtgggcggcagcagctggacacaccacagctggggcggcaggtggtctgacaacagactgggtggcagcagctggggcgacagcaagtggtctggcagcaggtagtctgagagcaggatgggcggcagcagctggatacaacacagctggggcagcaacaggtggtctggcagcagctggggcggcagcaggtctcttggcagaggccttgatcacagccctggtcagagcagacagagccacaacaagagttaaccatggtgtcagagggtggaggttctaggtaggtttccaagacagtgagtttttcgaatgtgggaatctccttatcccatgtccacttttatactcagctgaggagctgttgtcaccacataaaagctatttccttgttattgtttatcttaatagataggcaattatcaagttagctaattgtgggaaaatatctgtataaaaggtggaatgcacttttattctttctctgtgttagagtttagccaatccagtctttcctcctcctcttgtcttcagttaatttagtgtgtcatttaatttcaaagacttgtaatcttactcatccagtcgattgtcaggtgacagatcacttggaactcagcattctgtgtgtcatcctgaaaactgtgtgtctcacagcagtcctcaaatgggatgatgtttcttgttttctgaagattcttctgagaaaaataaactgtgaaacaactagaagaaaacagcagaaattgtcttaaaatattagaagtggagtggattttctaatacagaaaaacttaacaacaatgaagaaaaagattgaaaaaaatttacaacagaaaaaaactcaaatgcctgattgaaaaacaagaaggctaaagagtaagctgaaaataaataataataccttaaccaatctacaaataaatgagctaattttcttaatccatgaatacctcttacaacccaatgagaaaaacaacaacaacaacaaccaaacagaaaattgagtaaaggatattaacagtgatttcactaaaaaaagaaatttaagtgccttttgagcttctgaaagatgtttagtctcactcataatttaaggtattttaattgaacaacttattcactcatcaaaccatctaccgaatacctactgtgtgccaggttctactgcatgctctcgggatatggcagtgaatacttgctatttgtaatgacaaatgtaaaatatttaagtttaaaaactttaataaattggtgaaattataaagacattgacattttaatacacagttggcagggatctaaattgaggcaacttctttagatggtaattaacagaatctgaaatttaacagtatcttaaattaatttagcatattttgaaatgtgcgtgtgttttgattgagccttttcacttctagaaatgtattcaacagatgcacctatacataccttccaagatgtaagttcaagggtattctttgcaacattgtttgcaagaataaagcctgattttaaattctattgtgtttacggaggggaaagcccttgatgtaggcaacacacactagtgctcagaggcagtgaagcatcactttctttttatcaccaaagaaacctctttgacctattcttgcaatttttctataagtgcaagacgacattaatttttaaaaaaagaaattaagaatgttatctctttaggccatccctatcccatgcagacacctactttctatttagactgagttattcaggaaggagggaagaggggatggaaggaaggatacaagaacatatttagaatatatttttatggacatattttatgactatttggggtatatataaaaattatgaaaattcagttcgttaggcataaaatggcataaaaatatccattgtgtctaagttgataatgattttactcaaattctccatatctttgtttacttttcttcttcaaatgaccgtttttgaaatagtatgtttaaagcctctgctatgattgcagttttatcaccttcctgtctatttataacaggtttttttctttgcacttagtttgaatgtagcccaacttcttatgacaacaagaatattaatatttttgcagacataattaatgtatcataaggaagtcactatcaaggtcaaagcaagtgcaggtatcataggcttgggattctggtctaactgagccacagttctatggtcacttgtttgtttagaaatagccctctctgtctgaaggcaggggagacagcttagagataacccttctccttaaaacaagtatgt

SEQ ID NO: 1244228 - DNA, 4001 bp, Homo sapiens
gggacttctctggggtcctgcatgcacagctaggatcaaggttcagcttatagtaaccatttcctcattttaatagtaaaaacaaccacaacaagaaaaacaccccaaggcggagatttcatatgctaatgatacatgcgatgggtgttagaccacgtggatcctgagcacatgtgccaaccgcaggtctgcctttgcatacttgacctcaccagtattttatgattatgtacgtatagctcccataaaaggaattcctcttacagcactagctgctgtctctcccactgagcaccccactctgcctctcaaagagtacttttgctttgcaacaaatttcttcgcttactcttactttggatttgctctcaaattcttttgcacagcaaattcaagaacctgaactggtccaccgacaacaaaataacaaaattcccttatataacatttggagtctgccttaactgatttgaatcaagatggaatgcagtaggatgagatgtgccttttaaatttgacacagaagagtgaggagtattaccatgatatcataagttctaaaatcatggatgaacttacaaacaacaatactggggctttacctatcccaaagcattccatatatcaaattgaaacaatcaaaagcttctattttattttagtttatgcgtgacattggagcagtttggcactatgagttcatccctgaagtcttactttggaatcatgctttgagaatccccttctactgcattcccacctcacccccatgaatcagtaaactcagtgaaaattatcacaaaaaaatgcaaaaaacaataaaagatttctaaatgaaaagtttaatacaatatattttgtgaacacaataaagataaagaaccaataaaatagaaaaattctggcaaacttgaacaaacagagacaaagagagaacagggagaaagcaggagagcatgggaggggcagcctcctacctttccaagagaaaagaatgactgaaaggctgacagacaaataatatgtttgaaatggagataatgtgtacctcactgggaaggatattctgtaggctcaaaacgatttaaaaaatgaggaatttagaggattggaataatttcttagctagtggattacaaattatttcatatttggtgccatgactggaagagaaagaaagcaagggagggagtttaaaatgaaccagaatgttctcacagagtcagtgggatggtgatgggctcattggaaacatgaagtccaccctgctgaatgacatcaatcccactccatgtgtcctaatagtcagcacagaagaatggtctacaactgtgggcctgcagtgaagggagagatgagccagggcagtgggctcagcagcaagaggaggcacagcacaaggggcgggggcagctggagatgacacaggttgggcgatagcaagtggtgtggcaggagactcggccacagactggacgcaggcagcagcaggggcggcagcagctggattcacagcaagaggggcggcagcagctggagatgctgcagctggggtggcagcaggtgggctggcagcacacagactggcagcactggggtctgcagcagctggacacacagcagctggggcgacagcagctggagatgcagcatctggggcggcagcaagtgggctggcagcacatagactggcagcactggggcttgcagcagctggacacacagcagctggggcgacagcagctggagatgcagcatctggggcggcagcaggtgggctggcagcacacagactggcagcactggggcctgcagcagctggacacacagcagctggggcgacagtaggtggtcctgcagcaggtggtctcacagcagctggggcggcagcaggtctcctggcagaggtctcggccacagccttggtgagagcacacggagccacaacaggagtttaccatggtgtcagagggtgaaggatctagttgggtttctaggagagtgaagttcttgtgtttggaagtctcctgggcctgtagtccctttataccctcctgaaggcccattgccaccacatcattatttccttgttattatttacctactggaaaaattaatcatgtaattacatcattgtgtttccagttaaatactccaaaacagagaaaataacccatttccttttcctgctgtgctcctgtgtttccattggaaatgcatgtcatatttcttcattagtggggagtcacctttgtccctggtctatgcagtgtcttttacaaagcactggtcacaggactctctgacattttgtttttaaatgtgactctccctcctacctgcagattgctgtctgcaaatcatgggggatgatttttataatgtgaatgtatcttttgttgtcaaagaatgtcctggtcaggtgaaatgttgggaaggaattagaaggaagcactcatttggggaaggatgtcccatctgtaatgaggatgactctgatcccatgtgtgcatctcggatggtcgggcagatggtcagatcccaagaagttctaaactctgtcagatcttattccacagcctccagcgaaagtacttacccatgactcactgcctttaaagggtaaaaacacattttgctgtatgtcttacagtatatgcattatgagtaggaagttttgatttatctttttttttttttttgacagattctcaatctgtcgccaggctggagtacagtggcatgatctctgctcactgcaacctccacctcctgggttcaaacgattcttttgcctcagcctcccgagtaaggtggtttgcgccatcacacccagcttacttttgtatttttagtagagacagggtttcaccatgttggccaagatggtctcgatctcttgaccccgtgatccacctgccttggcttcccaaagtgttgggattgcaggcatgagcccccaacacccagcctgattaatctttgatcatcaaaattgcatgatggatttttcatttacaaaagcatttgttatatataaagaatatttagaattattaagccttcaataacatgcatccaagatgttctattgggtactctgggtgtagaacagataaaccctcaactttttcttgcaggtacttgcataagacacatggataggaaacagtttggcagaaatgaaaagaattacaattattttcattaaacaactaaaataagaaatgtataatatgtggataagttccatacaccctcatggtatgtatattacttgtgaagtattgactatgtagcaggcattgtaccaaatatcttacatttgtttcattttcacgctttaatagaaccttatgaactagtttatattcttattagtcttttaggggaatactcaaaagaagcattaaaaacttaaaacaaacaaacaaacaacttgtccaaggttaaagagaaagtaagcctaatatgtcttagtgtagccaagaaagccgtaaagaatacaatttgctaagcttgctgaaactgcttcatcttcttggaatgtttcatctttttttgtccactctgcaaactcctactcatgtgtcaagacccagttaaaatatttcctcctcaataatatctttcctgctaagctaccccattcatgtatcatgatttcctgccttgtgctcataatttatacattctcctgtatcatagtcatttacttctgtctttccaccacgtgcaatgcaaataccctgaaggcttgcgctatggcatttattctcgttaccatgatactcagcacagagaacactggtggtaaatgtttgttgagtgaatgaaggtttttttgatgacatagaggcatgtaaggtcctttaaaaaatgtatatatcttttgacttctggataaaagggaggaaaacatcccaaacaaagaaatcataatttcatttcaggaagactaaactcatttgtgtgataggtaacatgtcacccgataaata

SEQ ID NO: 1244229 - DNA, 4001 bp, Homo sapiens
gccctctctacatggcagcatgaactccccattgaaactctgccagtcagaatgaaggagatccactgtgtttgtgttgaggattcattacacatgactcagtagaaaatacatggactttgctaaaccacctaatagctgcttttactggaaaaaaaaagaaattgaaatacagtgttttaaaagatcacagctctgtgcacaatagtaaagacatggaatcagtctaggtgcccatcaacagtgcattggataaagaacatgtgacattttcacaccatggaatactacacagccataaaaaagaatgaaattttgtcctttgcagcaacatggatgtggctggaggacattatcttaagcaaatttttccaggaacagaaaaccaaatattgcatgttgtcacttacaaatgggagctaaacattggatacacatggacacaaagatgagaacaattggggactccaaaaaggggggagagagggagagaggaagggctaaaaatgacccactgctcagtacctggtgacagaatcatttgtagcccaaacctcagcatcacacaacatgtaacaaatacgaatatgtactctttgattctaaaataaaagttgaaattattttttaaaagatgatgagttgtgatcaatctttcaaaacgtttcccctgttgttatattcatggatatttcatgacttcagcttcactctttttgtctaaagaatacaaaatgactaattgatttgcctaagcctgaaaagacttttctagaaaaaaactaggcagtgatcgatgtcagttgacctctgttagaaggttgactaatctgtgctgtgagccctacaggtgtagttaaatgtaatcacccaggacctaaatataaaaccctttttaaaaagagaataagaatcatattcaattttcagtgccaatagaatagaggtttattttggtacatggaaataacaaggtacaaaaatgtttgcaaaagactttaagagagagacttcactggacttcaaggttggaggctttaagatctgtggccctacaaatgatggaggcaatcttcaaattccttaggcatgatgaataaatgtcctgaagtcaaagaggtgggaggatgttggaggacaatttgtcaatttattaggagattgtcaatgaattcctttggaaggaagggagtttggacaaaaggtagaatgcaaatacagaatttctaaggatgaggtttgcttatgggacccagatcaattctcttgaacagtccgcatgtttgcaatgagagccttcatctgtaggaaaggacgtaataaggaagtggtgtgttcacagcagagatttagcagcaagaggaggcacagcacaaggggcgggggcaggtggagatgacacaggttgggcgatagcaagtggtgtggcaggagactcggccacagactggacgcaggcagcagcaggggcggcagcagctggattcacagcaagaggggcagcagctgctggagatgcagcagctggggcggcagcaggtgggctggcagcacacagactggcagcactggggtctgcagcagctggacacacagcagctggggcggcagcaagtggtcctgcagcaggtggtctgacagcagctggggcggcagcaggtgggctggcagcacacagactggcagcactggggtctgcagcagctggacacacagcagctggggcggcagcaggtggtcctacagcaggtggtctgacagcagctggggcggcagcaggtgggctgacagcacacagactggcagcactggggcctgcagcagctggacacacagcagctggggcggcagcaggtggtcctgcagcaggtggtctggcagcagctggggcggcagcagttctccaggccacagccctggtcagagcacacagagccacaacaggagttgaccatggtgtcagagggtggaggttctcggtgggtttccaggagagtgagtgttctgagtttgatctctccttgttctctcttttgctttttataccctgctgagaaccactatgacaatgtgaataatcttgtggtttgcacattactaatagagaatcagttgttttttagtaaattagatagttgtccttatctggtaaatatttctataaatagaaaaggcaacatttccttttcctgttgtattctgagctatccaatttggttaagccaagtgaatcagctctcattctccttccttcatctgatgtgtcttctgatgtgtagacccattacatgacattgtttgattggatttcataagttaattctttatttatttgactcctggataataagttgaaaatagattttatgatgactaaatctcctctgctctcaaagaggttaaaaataaattacatagaatgctggtaggaaaatgtgatgaaagattcatctttggggggtgataggaggtaacttgtgtataataaggaacactgtgattcctttgaattttgtggctggtcagtgagatataaaagatcccactgaaattcctgtttcatgttattgactctatttagcttgaaacagatataatgcaatgattcattgctttacaagtaaaaatacattggcatgataggtccctttataaattattgttggcatgttcttcagagatggggatcataaggaacatttttgttctattttgttggtaagtcaagatacccactgaatgtgtttaactgaagtgttattgaaagtagattttctcatactcgaaagctgctttttctcacaatgtatgttggagatattttgcttgatacatggagaaaagaaacaaaggatcaagtttaatttctgtcctacagaagcttaaacaagacaaataagaaacatgtataggaaagaatttagcaactatttagagaatggtgtgattagtgaacaaaataacaattatgtatttaatctgtacacttccaatgaaagatgaaacaatactaatagttataattttttgagtgcttactatgtgtcaggaattttctgagtcctctataattgttatcttgtttatacttcacaaggattctgctatgtagacacaatttttctaaattctttacatccaaggtacttgaggcccagatagattgaagtcacacagtctgtaacagggaaagggcgtctctcctagagtgttcaaggaacattttgcgcatgaacattttgcaattaaatccctcctgatatttaaaaacaattatttataattaaaaagatgcaaggtatgttctcactcctaagtgggagttgaacaatgagatcacatggacacagggaggggaacatcacacactggagcctgtcgggggtgagggacaaggggagggagagcattaggacaaatacctgatgcatgtcgggcttaaaacccagatgacggattgataggtgcagcaaaccatcatggcatatgtataactatgtaacagacctgcatgttctgcacatgtatcccaaaacttaaagtaaaatttaaaaaaaaaaaatgtatggtaagaaaccatcataaacaaagtaaaaacacaaatgactaaataataaaaaaagaactagcaattaatatcacggacaaagggttaatagtatataaaagacttctgagactggacacggtggctcacacctgtaatcccagcactttgggatgccaaggcaggcggattgtttgaggttaggaatttgagaccaacttggttaacttggcaaaaccccatctctaccaaaaaaacaaaaaaaagcaaaaaaaaaaaaaaaaatggcgaggtggcatgcatctgtggtctgtggtcccagctactcaggaagctaaggtgggaggattgcctgagcccaggaggcggaggttgcagtgagccaagattgcaccactgcactccagcctgggtgacagaagaagaagaaaaaaaggcttctggaaatagatag

SEQ ID NO: 1244230 - DNA, 4001 bp, Homo sapiens
acaggagccacctcatctggaggattccgccctcttcgcatcctcttcctctcccacagggtgggccatagctagtggtaactgatgtaggattgtaaagttccaacgaccttacctctcagaaagatgggtctgtaataccattcacactctagagcttcctgtggggtcaaatgacaataaaatccttttgggcttagcctcttctacaatcctattctgtttccgacatttccttactgatttctcctgagagcattttcttataaaagtcacttgtgcaaacatcctgttttagatctttctttggtgcctccaacttagcagcatggctcagggtgaaacctttttcaatatagccttttttaggatgagaatcaccaacacggtggttgtgtcctatccctcagataaaacgatgtgaagaaaaaaacaatcaaagacaactagtttaaaagcaaacatgcatattgaaataaaaactttaaaaattaaaattcttaaaagaagaccaaaaaagtaaatgaacaaataatagaaaaaaattgtaatgcgcaaaaattgaaaagaaaaaaaacagcaaaatgttcagaggtgtccattcaggtgacagtaaactcaagagttgatcaaaatctatggtaaccattcatattgtacaaaaacattttgaaggacactaatactgagattaggaatgctgctgttttagattgtgtgctctctggggcaaacccacaaaagaggatctgagaacatgtggtatatttggacgattaacccaagaaacactggaggaaacttgaagaatgaccctgggaaggagggaaagtcattatagagtgagttcatgatcagaatgttcctgcaggcatctggtataaatcccgctgaagacctctggaagactggtttgacataccccccactggagggaaacaagccagggcatatattaccaactcccactcattctctgagtgctgttcctagaggctttaagtctccagcccagagtttgctcctttatccagagaaagtcctcaggtagagagttccaggtgcctgctctaaggaaccattttcctatgtttgaatggagagtgctgataggatagaggtggagcccctgatatcatctgctgtggtcttctccctctgcagggaagaacatcagaaaatttgacaggtaaggatgagaattcaagaaggaaaaatgagacacaatgcccgtatattatttgtatgcctcaaaaattaaaatttatttaagatagaggaatagctccatgtgataaattatggtagagagcaaatatttcaattcagggaacatggggttgacatatttcagagaaaattcaaacttgtattcatttggtagagggtagcaacatagtgtttggtgagcatatttggaggccaaactcaatccaagaattggttggaactgaggttgtccaattggccttgcatgattcagttcacaggtggatcatatcaagaatgctggttaataaaggcaggtgagtataggtgagggcatcagcagcaagagccactagagcaggttgggcggcagcaggtggacacacagcagctggggcggtagcaggtggtcctgcagcaggtggtctggccacagctggggcggcagcaggtgggctggcagtacacagactggcagcactggggtctgaagcagctggacacacagcagctgggacggcagcaggtggtcctgcagcaagtggtctggcagcagctggggctgcagcaggtgggctggcagcacacagactggcagcactgcggtctgcagcagctggacacacagcagctggggcggcagcaggtggtcctgcagcaggtggtctggcagcagctgggacggcagcagttctctaggccacagccctggtcagagcacacagagccacaacaggagttgaccatggtgtcagagggtggaggttctgggtggatttccaggaaggtgggtttggaaggtttggaagtttccttgccccagatcctcttttataccctgctaaggcctgatgtcatcagatgcaacactctttccttgttattatttgtcctgatatgtaggcaattatcaaattaggcaagtttgttgttctggttaacttatccacatagatggaaacactgtctcctttccctaatgtgttaggactccttagctcagctcttcctgaaccacctcctgtgtctctcttactatagcttcctcctagagcagccatgtgacatctgcctgtaagcacatactatgtgcttcagtctcatttgcttaacacatcatgactactcttgggtgattactattcttacaggcccttgactctttctggtgactcaggaggataaagctgcatttcagtctgatggctccttcattatgggtcagatggcctgtgaaggtttcagtgtgaaacagatttcagtgtgaaacagatgaccactggtgtgagaacgagaacaccgtaggacctatcgcttttttatcttccgcactctgaattgtgacccattttctagaccttctgatgagaaatacagagctgttttaaggtggaaaactaagctgtgaaagtttgatgtttccttttctacagaaacaaccctccaaaattcagattcagggcctcttggggaatgttggcttcagagaacagctatacttaaaggtccaagtccctcatttttttgctccctggggcagattttccttgtgactttgcctttctgccttcctagctctaacagggcacatgagctcatctctccaggttccaaaattttctggccaacccaaattagatgactcagtatcctttgcttgctctaattcgctcccagccctcttgctttctctgctgaattgctgggccttgaagatgtcctatactctgctgcttccttatagaagttgttgatccaatttcacactttacatctttgttttcaaaaaataaatcaataaagagagaaagaaagcagaaaacaggtatcaagaacaaaggatatcagcctatattttttcatgtagggatggctgactattgtttcaaaaatgtgctatgttgtcaattcattaactcatcagttaataaatatatatgtatttccccacccctgaggagtcaaggaacccagggaagggggtggaaaaatgtctgacttaccatgatagaaatgttttatgaactgggcagcctctgcagataatcaggggaggagtttcagtgtaagctggtgtttctgagggagatccaagaaccagatggaggggattggatgaatgagggagattccctttcttctctcaggtgcttataagtctaataaatcaaattgtggtgttcttatgatgctgctatgttccaagccagttcctactcctgccctggccctaatttccaggtgattcaagcagaatgaaaacaacttgggctcccaagtgaacccctgcttggtgcgctggctggtgttctgagcctgcactgttctctggctctgatgtacccagacatcatattttattgagggatgaaagtgggttccatgatgctgtggaattaagaccctgtgagccccatggtggtgtacgagaacaactctaagatttccaggagaccttgtattctggaaaagaatcgtgcccttgagaagccgtgacgattggtgcctgctgatgattcagtagagatcactttatattaactatttttcttcatgatgtgagtgtgtgtgagtgtgtgtgtgtgtgtgtgtgttttccttaagataaatttacattatatttaggaatctctcacgatttcttctagtactttaacaatttcattttttctacctctactcagctataattgaaatataaaattgtatgtatataaggtgtacaccctgatgctctgatatgtatatattgtgaaattattgtcatgatcaaattagttcacctccaccac

SEQ ID NO: 1244231 - DNA, 4001 bp, Homo sapiens
tgcagtgtttggttttttgttcttgcgatagtttactgagaatgatgatttccaatttcatccatgtccctacaaaggacatgaactcatcattttttatggccgcatagtattccatggtgtatatgtgccacattttcttaatccagtctatcattgttggacatttgggttggttccaagtctttgctattgtgaatagtgccacaataaacatgagtgtgcatgtgtctttatagcaacatgatttatactcctttgggtatatacccagtaatgggatggctgggtcaaatggtatttccagttctagatccctgaggaatcgccacactgacttccacaatggttgaactagtttacagtcccaccaacagtgtaaaagtgttcctatttctccacatcctctccagcacctgttgtttcctgactttttaatgattgccattctaactggtgtgagatggcatctcattgtggttttgatttgcatttctctgatggccagtgatgatgagagagcatgcttttatttgtcaaccaggcacctttatctcattgacattttatgattaccttcatgtgtttttgagttattatgatcccttcttaagagaaaagtaatcctaggttgacagagtttaaatgccatgtctaagatcataggtggcatgcagtacagtcagaattcagcctcaactctgtataattctcaagtccacagaatatactctacattgagctgcttctgtttaaattagtttaaatcacatcatgggatgcagcttattgaagacagtttttttgtgctggcagttatattccacagctttcatgttatatgtgttaggttcaaaaatgtctcttaaattcttctcctgtttctactatgagactgaattctggcttggataaaatctaattggagaatgccaatttaatgttttaattattagggtgtttgacaacatgtactcttcttgtgttgtgcagaaaatagacagaaatatacatataccattatattataacaaatgaaaagagatgagcatttttggtgcttttgaacactatgaagttttattgaggaacatcaaacaattccacatgaaaattgataccacagaaaacattaggaagaaacatctagaaggataccatttgaagatttatgtatattgaattagaataaagaattctaaaacatgtgatgtggaatttgactgtaaattcagattcaataggaataaaaacttctataaaagagaatacatactaataaaatattttccaaatcagtccatgcctctgttttcacgacatcaggaagtccacatgttctctgaatagatactctgtgcctgaactgaaggttgagagcaagaaggtgcacaaatccagagcagcttcactcagcagcaagaactgccgcagcagatggggtggaagcaggttgttctacagcaggtggtcgggcagctgaaagggcagcggcagctggacacacagcagctgggatgacagcaactagaaatgcagcaagccgggcggcagcaggagggctggcagcactggggcctgtagcagctggagatacagcagctggggcggcagcaggtggtctggcagcagctgggtttgcaacagctagagatacagcaggaaggcctgcagcaactagaaatgcagcagctggggcggcagcaggtggtcctgcagcagctgggtttgcagcagctggagatacagcaggaaggcctgcagcaactggaaatgcagcagctggggcggcagcaggtggtcctgcagcagctgggtttgcagcagctggagatacagcaggaaggcctgcagcaactggaaatgcagcagctggggcggcagcaggtggtcctgcagcaggtggtctggcagcagctggggcggcagcagctctcctggccgagaccttgaccacagctctggtcagagcagacagagccacagcaggagctgaccatggcgtcagagggtggaggttctgggtgggttcccaggagaatgaggttctggagtttagaagtctccttgagcctcttatatactgccccagtttcctgttgtcactatatttttcttgtttttgtttatttaattgctaaataattatcagattacacaataatgtttgtccatttaatggcttaaaatcattgggaagaaaatattcttgtccagatgtaataagatctataccatctacttttccttgattctcaccttgatggcatcttctagaccaaattatcttcctcttcctctacacagggctatcaggtgatactctgcatttgaaattacatttctcactctcttttcctgtacccagtaccagaatgagatttagtcagttacattaccaattattcatttattccattgaccaagggagaggaaagcccttctactcagtgtggcctctggcctgggacaagaagaaaatgtcctattttgagtgtcatttttgagcaatgaggaaaggtttaatggccacacacagacacctcctgctttattctgttcattcaagctttacagaagcacctggctcaaggtcctgccttgcttataaaacagaggcattaaatggataatctgagagacccaagttgccagccattgggattacaaatttgatgtagattctccttcaggggagttcacagcttgctagaaggaacacacacacacatacacacacacacacacagtattatactgtgataaagtaacatcaaaggagctcattatagtttaattaaaagaatcatacttaaaacaaattagcaaacatgacaatttggtggattaattcataaataaatattttaatttagtttgtgtctatttttatgatattgtaaaatttacatacactgaaatgaacaaatcccaaatgtactatttgatgagtttttataaatgggtacatccatgtaacctccacacctattaagatagagaatgatgtaatttggctgtgtccccacccaaatctcatcttgaattgtagctcccgtactccccatgtgtcatggtgtcgtggtgtcgtggtgtcatgggagggacccggtgggaggtaattgaatcaagggggctgatttttcccatgctgttctcataatagtgaataagcctcatgagatctgatggttttataaagaccagttcccctgcacatgctcttttgccttctgccatgtaagagatgcctttgctcctccttcaccttctgccatgattgtgaggcctcccctgccatgtggaactgcaagtcttttttagagactcacaattaaacctccttttctttataaattacccagtctctggtatttcttcatgcagtatgaaaatggatgaatacagagaacattttcattatactagaaagttcccaaatgtcacttcagtaaactcatcacttcatagaggcagccatatggggaaattattagcaatgttctaataatttttccaccataggttagttttgatttgaacattcaaacaaattatatatagcataattgttttttctgtctgtcatctttgccttgatatgtggctgtgagagtcacaatgttgatgcatgcatcactagttcattcagagctatactaataactgccagggcttcattttaactataccaaccaatgtcatggtagggtgaccagctgtttctgattgcccagtctgagggcattccctgaactcagggctctcattgctagaactaggaagtcccaagaagaaagagacaggttgttcactctatgatagcatccttaaatgtcttaattaagatcattaaagaccaaacaccttgcaatatttctgtcacattaacttgtttagcaaacacttgatttacaagtctttactttatgggctgtgtttgcaaagctggagaacatgaaagattgaaacaattgtattgtgaagccacatggtgtcct

SEQ ID NO: 1244232 - DNA, 4001 bp, Homo sapiens
attatgttacgtgaaataggccaagcacagaaagacaaattgctaatggaatggaactcatgaagataaagaatagattgctggttatcagagtcagaggagggtgcctgtgggaaatgaagaggtggattgacgtgtacaaatataagttagagataaaaatatgacctagtattcaatataactgtaggatgactatagttaacaatgatctattaaacattccaaagtagctacaaaagaataattcagatgttcctagcataaagaaaagataaactgtgatggataatccaattaccctgattggatctttacaaattatatggatgtatcaaaattttatatgcgcatctgctacatatcaataaaaaaggaaaaatgttttgaagggcactaatactgaggttaggaacactggtgtcttagattgggtccccactggagccgacccaggagtatatttgggaggtggtcccaagaagtgctgtatggaacacgaaaaatgctccaggaaagggagggaagtgaatacaagatgagttaatgatcagaatagccctgtaggtagctggaatttggtgtctctgaggaccactgacatgctggtacaacatgctcccaactggaggagaaataactaaagcatgtgttcaccaactctcactcatttgttgaatactattccaagaggctttaactctacagtccagagcttgctccttggctagagaaactcttcaagaagagagttccaggtgcttgctctaagaaaccaccattgtatattagaataaagtgtgctgaggaaatagaggtggtgcccctgaaattacattctgcagagaagaacaacagaaaaattgactggtaattgaccacactcaaaaaagaaaaataatgagacacagtatctgtatatttctatgcctgaaaatttatttaagatttatttagataaatatttgtttaaaatggaatagctccatatgagaaattatggcagagagcaaatatttcaattaagatagttgacagatttcagagcaaattacaacttatgttcatttggtagagaggtaaaatgtggggggagcatatatttggaggccagattcaatctaagaattggttggaactgaagttttccaactagcttcccataactcagctcatagatgagctacatcaagaatgctggttgatgagaatctggtgagtccagatgacagcctcagcagcaagaagcactagagcaggttgggcggcagcacatggtctggcagcagttggggcggcagcaactggagatgcagcaggagagcctgcagcagctgaagccacagcaggaggagctactgctgctagagatactgcaggaaggctggcagcagctggaaatgcaatagctggggtggcagcaggtggtcctgtagcaggtggtttgccagcagatgggctagcagcatagagactggccacaatggggcctgtagcacctggacacacagcagctggggcggcagcaggtggttctgcagcaggtggtctggcagcactggggtctgcagcagctggacacacagtagctggggcagcagcaggtgggctggcagcacacagactggcagcactggggcctgcagcagctggggcggcagcaggtggtcctacagcaggtagtctggcagcattggggtctgcagcaggtgggctggcagcacacagactggcagcactggggtctgcagcagctggacacacagcagctggggtggcagcaggtggtcctgcagcaggtggtctggcagcactggggtctgcagcagctggacacacagcagctggggcggcagcaggtggtcctgcagcaggtggtctggcagtagctgggacggcagcagttctctaggccacagccctggtcagagcacacagagccacaacaggagttgaccatggtgtcagagggtggaggttctgggtgggtttccaggaaggagggtttggaaggcttggaagtctccttgccccagatcctcttttataccctgctcagggctgatgtcatcggatgcagcactctttccttgtcattgtttgttctgatgagcaggcaattatcaaattaggcaagtttgtttttctgcttaaatttgtcaacatggagaaaagcattatttccttcccctggtgtgttaggattcttcaggtcagctcttcttgaacaacctcttgtgtgcctcttgctgcagcttcctccttgagctgccatgtgacatctgcctgcaggtaccatgtgctgcagcctcattttccttaatacattatgtctgaccttgggtgattttaattcttctaggcccgtaattttcttttggtgactcaggaggagaaagctgtgctttaatctcatggcatgtttgttatagatcaagtgagcaatgaaggtttgaatgtgaaacaggtgaccagtggcatgaaaacaaatactattaggatatattccttgccaccttccatacaatgaatcatgacccattttctagatgttctactggggaaagcagaattgttttaaggtggacatctaagtcatgaattatcgatgcttctttttcttgagaaacaacactccaaaactcagtttcagggcctttaggggaaattggctacagagatcagctatactaaaaggttcaggtccctccgctctctgctctgaggggctgattttccttctgacttttccttcctgtctctctggctttaacaatcacattgagtcatctcctctatttctaaggtttacttgccaacctaaggtaaaggacccagtgtccttgctatatatatataatatatatatatatatataatatatattatatatatacatatatatactatatatagtatacacacacacgtatatacacactatatataaatatacacactatatataaatatgcacactatatataaatatacacacatacacacacatatatgtgtgtgtatgtatgtgtgtgtatgtgtgcgtgtgtgtgtgtatatatatatatatatatatatatacacacacacacgcacacatacacacacattatgtctgaccttgggtgattttaattcttctaggcccataattttcttttgatgtatatgtatatatatatatacactcacacacacacaggtttgggggaatatatatattctgccaaaggaccttaggaatatatatatatattatacatatatagatgggtagatagagaaccttatatataggtaatataggaatatatatatttacatatttatgaatatataatatatattcttcatatatgtttgtatttaatagtatgtataaatatatatataatatatacaataacatatttagaaatatatatatttatatatatatgtatttacctttatctcctaaggccctttaccttaggaatattatgcacacacacacacacacacactcaaacacacacacacacacactcccccaaacctggatgttaaagaaacccaaggaagaaggcagaaacttcctgtctttgtgccaccctccactttgggatgctcttgggttagcaatttctgtttggactggtctctctgaggatactatggacaccccaactctgctgagggtctttccataaaacatgctcatctaaatatttgggggccatgaaggtaagaaaaagtgaatatgccaaatggcagaaccatgtttccaaaactacagaaatactctcacaaggaatcaaacctaacaagatgaaatatcagaaccaattgtagatcaaatgagtggttattaatgcagcatggcaaacgagattggggaggagtgaatatatctaaatttactgggagtatttatttaactatacacacaccctaaggttgtgtcccctcttagcatcccttcaccagatagaatattacaagttgaggacatcttatct

SEQ ID NO: 1244233 - DNA, 4001 bp, Homo sapiens
ggaaggagtgagggaggaaggaaggaaggaaggaaggaaggaaggaaggaaggaaggaaagaaggaaggaaggaaggaaggcaggtaggcaggcaaggggaggggaggtggagggaaggtaaagggattagaaggggagggagggggaagtaaggaaacaagaaaaaagtacttgagctagggaaaacactcaaaatttccacaacaaataatggaacatactggaagtagaaatacagtcagacaaaatgtagatgacttcatgatgttcaacttgctggagtttttaagggacacttgaggcatataccaaaacttaattttgagttgtagaagacagcgcaacaatgatacaaattttcttgctgttctgtcaaaaagaaaattatgctaagatattattctagcccagggtattgtttcaatcatagtaacagcagaaattgtatttatttatttatttatttatttatttatttatttatttattgagacagagttgctctgtcacccaggctggagtgcagtgacatgatctcggctcactgcaacctcctcctcctgggttcaagtgattcacctgcttcagcctcccaagtagctgggactacaggtgtgcaccaacacgcccaactaatttttgtactttcagtagagaagggatttcactatgttgcccacactggtctcgaattcctggcctcaagtgttccacccactcagcctcccaaagtgctgggattgcaaatgtgagccaccacgctcggccagaaactgtatccattaagagcctatactgcattatgtaccaggccctgtggtgagtatattacatgggttatgtctcttaacatttaaagaatgtaatgcattatctctattcacagagaaagaaaactgaggcctgaggaggttaaaaaacttgccccatgccacgcaacaaatacctaggggagtcgtgattccaatgcagggaacatgaatcaagagcccaggctcttaaacatgctctcctgcatttgaagagagatggcccttgatgtgaactgacaggtaaagacacacacacacacacacacacacgcacaatgagatcactaacaaatcagaagatttcaatattagggaagtggctgtttattaatacatgaaaacaatattatatgagatcatcacagttagtgtccccttcgaatgaagacactgctcatctaaaaataactgcattggggcctggcataacatattttaatgaatgtgattgtctgtcatttcctagaagagctgaatgtccactctgaatgccacatgagacaaactggcagggaagtgttcatttttccagtgactggctggctacagtgcattttaaatgactaatgaagacattcatagtatgacaaatatcacaaggagacattagcagcaagaggaggcacagcacaaggggcgggggcaggtggagatgacacaggttgggcgatagcaagtggtgtggcaggagactcggccacagactggacgcacgcagcagcaggggcggcagcagctggattcacagcaagaggggtggcagcagctggagatgcagcagctgggacggcagcaagtgggctggcagcacacagactggcagcactggggtctgcagcagctggacacacagcagctggggcagcagcaggtggtcctgcagcaggtggtcctgcagcaggtggtctggcagcagcaggggcggcagcagctggattcacagcaataggggcggcagcagctggagatgcagcagctagggtggcagcaggtgggctggtagcacacagactggcagcactggggcttgcagcagctggggcggcagcaggtggtcctgcagcaggtggtctggcagcagctggggcggcagcagttctccaggccacagctctgctcagagctgacagagccacaacaggagctgaccatggtgtcagagggtggaggttctgggtggatttctagaagaatgaggttctcaagtttggaagtgtccttgggccacagcctcttatatactgcccagctgtcttgttggtactacattttccttgtttttgtttacttaataactaagtgattatcagattacacaataatgtttgcccatttaatggtttaaacttgttgaaaacaaaattttcttgtccggatgtaataagatctatcatgtctgccttctctcatgattcacacctcggtagcatcttctagaccacgttctcttcctcttcctccacagagggctgttcatgtgattccctgcatttggaattgcatttcttactctcgcttcaggtaccctctaccaaaatgggatttggtcagtcacacttccagttatgcattccctctagtgaccaatagcgaggaaaacccatctgctcagtgtggcattcctagtctgtgggtcattattaagcaataagcaaagggatagcaatacctgcatgtggccttggtgacctctacactattgaaatgggtttccctgaatgtttcaaattttgggtcatattccatatccttaaatttttatacttggtgttactaatgggtcagtttcttaaattgatactttgctctcctatattttgtgtcatgtctctccagttaatctattagattccggaagacatagtcccatttttattccataactcattgttttttttaaatgcctctaactgtctgttaacataatgcaggtgtgtgttttcactttttaaaaaagaaatttgagataattgtagatttacatacagctgtaacaaacagtcccaggagaggctgtctgtacttcacccaggctccctaacactgtgtaacacctgtataatacttttaagaatctatctacccccactactgtgtcttgcatgatgtgcttaatatagaaagaactcaagctcagtgaaattaaaaacaattagttatttttcagattgacgtataatattgtatttaccacatacaacataatattttgaagtatatatacattgtggaaggattaaatctagctaataaatgcattacctctcatacctatcatttttttgtggtgagaacgcttaatatccattcttagaatttttcaagaatacagtatgtacaatatatcatcattaactatagtcactatgctatacagtagacctcttgaactgattcttcctgtctagctacaattatatgtcttttgaccagtatctcctcaagcccctgactccctagccacccctagcctctgattatcttcattctctgctctacttctatgatatcaacttttttgagtgcgatcatgtgagtgagatcatgtgctatctgtctttctatgactgatttacttcacttagcataatttccttgagatgtatccatgttgtcacaaatgacagaacttccgtctttttacggccaaatagtattgcactgagtatatactgcattttctttatccccttactcattggtggacacttgcactgtgtgcatatcttggcaattgtgaatagtgctgcaataaatctggacatgcagttatttcttcaacatactaagttcatttcctgtagatatataaggtacccagaagtggattgctggataatacggtaattccagttttaattttttgaggaacccttatattgttttccataatggctgaactaatttatattcccaccaacagtgtacgagggagtttttttcacatccttgccaatacttgtcatcttttgtctttttgatgataaccattctaacaggaataaggtgatatctcaatgtggtttcgatttgtatttccctaatgattagtaatgttgagtactttttcacaaacctgttagccatttgtatgtcttcttttgagaaatgtctagtcaggtcttttgcccatttttaatcaggtttttgttttcttgcttgtgagctgtttgagctccttttgtatt

SEQ ID NO: 1244234 - DNA, 4001 bp, Homo sapiens
aaggaataatgcccctacacagtctaaattattgttcgttcatgtagtagaacctatggaagttaaagattcatgattcaataccactacattatttactggacctttaactcctagaatatgtatttagtacagaactttctaaatgtttctcctgcttttactagcttgaattgacataaaatttattttcaccattttccccctaggatggagtttataggccatattctgggtttaactaagaaccaaactattccgttagttggtttcttctaagtccccatatttctctatgaaaattcatttttgtagaatttattgaccaagaccatgtgccccaagaccatgctattaaatacacaccacagaaaagtcattaaggtaggaaaaatactaaaatttgagtattttacattttctgcaattccccaacttctcagaagattgattttccctaaaggtaattattttgttgttaatggatggagatgaaattaaagcagctgagagtgtgataaattgaattacacgagagatggataaaccttaaagagtagcctctggttttacaagaatgggataaaagagataagggcagaacaagatgacaggatcgggggccatgggtggaggagggaaacggaaaaataaagcaaataagagaggagtgagattgtagggaaagatacactttcaaaaatatttaagaaaatttagctgtgggatataacccttctccatattcataaaaaaacttaacttaaaatctttatttttttcaatacttttggaaacatccatgtattgccttttttttaggtcattacatgttgcaattttcttgaaggtgagagcaagaataggattcgttcagttgtgttttgggtggaatttctcaggaactaaggacaatcattacaaagcaacacaaaaagaacattgtatttctatgcgacaaaagtggagttttattcagaagcagcaaaaataagatacagaaacattgctgtaaaaggaaatacagggtgaaacaatcagactttcaaatctgagagtgagacaaccttgccccgagttaccctgcaagaatttccatgtttgggacagaagaacttggtatccataaatacaaatataaggtataaaatttggtaaattctattaatttctttctgtaaataatatctaatttcacacttgggtcaacatggggaacatatattctagatgtatagccaggacatatatcctagatatatgtccaggatatggaaacacagttggtgggaatggcctcttctgagttgtttatgagatgcacaaggtctgcttctgtgaggagtgagctgaaggggaggagatagtttcaggcaaggagctcagcagcaagaggaggcacagcacaagggacgggggcaggtggaaatgacacaggttgggcgatagcaagtggtgtggcaggagactcggccacagactggacgcaggcagcagcaggggcggcagcagcacgggcggcagcagctggattcacagcaagaggggcggcagcagctggagatgcagcagctgggacggcagcaggttggctggcagcacacagactggcagcactgggacctgcagcacctggacacacagcagctggggcgacagcagctggagatgctgcagctgggacggcagcaagtgggctggcagcacacagactggcagcactggggtctgcagcagctggatacacagcagctagggcggcagcaggtggtcctgcagcaggtggtctgacagcagctgggacagcagctgggacggcagcaggtgggctggcagcacacagactggcagcactggggtctgcagcagctggacacacagcagctggggcggcagcaggtggtcctgcagcaggtggtctgacagcagctggggcggcagcaggtctccaggccacagccctggtcagagcagacggaaccacaacaggagctgaccatggtgtcagagggtaaaggttctgggtgggtttccaagagagtgagtttcgtgagtttgggagtctccttgctgcatgtccccttttatacccagctgaggagcctttgtgattatgagaagattgtttccttgtttttgtttatatgacacaaatgcaattactaaattatattgtgtttttctagtaaaaaatcccaatatatagaaaatgattatttcccttttctcaccctggtgttcccacatgagtcacctcttgttttcctttccttggtttcagtgtcacatgacttcagtctctgggtatcatgtgacatgggagggccactgtcacttgtctgtttctcatcatgatatcgttttgggagagcttctgattgggctaagatctctagtggagaaatgcatgtgtcaatcagctggaatgctgacaggaaaaaaagaaaatatgctcctgtttttgagtgtgagaaataaggaagcttatgattcattgtatgtattctgggtggccattgagctaactaaattcctaggtcattgcaagctgtgttaattctcatcactctggtgcaccttgaaacagttagtagtgactcactgtttctaaggaacaaagcatcatctgggcttgagctgcgtctgtcttcaaaagtgtcctacaggctgaagtagagtaatgtggatcatagtttttgatctgccttttgaaatatcaaatgtgtaatggttatgctttattgacattttgttaaaatctttttcatacattttgagctaaaacatctagcagggtttttttttagtatcacttatttctaagattttttaagaagcattgagaggaatataaaagatatattctttaacttacaggtacttatgtaactgtggacctcaattttaaaaatcacccactttctcttcctttcctcccctctcacctcttcattccttccctctgcacactcccttctggcaatactatctaatatcttatctaattatattcttgcttaagaaattccagaggctaatcttgaaacaaaccaggcacagagccctgaggaatcctctcacttagggggaatcttgaacaattaatccaccaccattgggctgaagtcaaaataatgcctcccaaacctctggacacccaagatagccattggaacaagacatgcagactcagcaccctgcaccacccctgcatgtctcccatgccaagtttccctttcaaaaccctatggcaaattttaaaatttaagatggcactttagaatgctagttcactagctaaaggatgtcagtgagatatatcttggggtgaaatgtttttatttccttcacttagcattcttctagttattcattaccagttagttcaaatgccatttttctccaatatctttcttggcctcacacaaagcaaggttatcctctggtttactggctctccaactagaactaactttcctttcaccagcccttgcctcttatgtgttggctttccagcagcaagcagctgaacctgggtccagttacatttacacagaaattgcattcataacaagtttttattttatttatttatgtatttattttttgagatggagtttcactcttattgcccaggctggagtgcagtggcaccatctcagctcactgcaacctctgctttccaggttcaagtaattcttccgcctcagcctcccaagtagctgggattacagccatgtgtcaccacgcccgtctaattttgtatttttagtagagatggggtttcaccatgttgtccaggctgatttcaaactcctgacctcaggtgatccacccaccttggcctcccaaagtgctgggattataggagagagccactgtgcccggcccataaagagtttttaaataaaatcctcacatgatcatggttctaaataaagggtcttctttagtgccgtggacattcagggaaaagcaattattcaaggaaagaacaaatt

SEQ ID NO: 1244235 - DNA, 4001 bp, Homo sapiens
ttgacaaacctgacaaaaacaagaaatggggaaaggatcccctatttaataaatggtgctgtgaaaactggctagtcatatgtagaaagctgaaactggatcccttccttacactttatacaaaaattaattcaggatggattaaagacttacatattagacctaaaaccataaaaaccctagaagaaaacctaggcaataccattcaggacataggcatgggcatggacttcatgtctaaaacaccaaaagcaatggcaacaaaagccaaaattgacaaatgggatctaattaaactaaagagcttctgcacagcaaaagaaactaccttcagggtgaacaggcaacctacagaatgggagaaaatttttgcaatctactcatctgacaaagggctaatatcgagaatctacaatgaactcaaacaaatctacaagaaaataattcttaaaaagaaaagtgagccttgaaattttcagcctttctgggtttatatatagtaaaatgttaagtgtggagatgtttaaattataacgtaaacccatagagaccactgtcagaaatataccatgctatccagataaaatacagctcaacatgctttttttttctcagcagaactcactgggaaataaagcccgctttttggttataaattccaaaatgttgtttattgagtgaaatgactcgagtacattaaattctttatagaagatttcccttatttcattggtgtctacttttctgaaatttggttttatgttttttgtcaaaatagggacaatagtattgtgagatataatgtgttcatgataaaatgtgtttcaagagctaaggcatgaattaaatgtcttaatttagaatattaagacacatgtgcacatacacacacatatacacacagcacttttattccaataccttaaattatctatatttgatatagaatgtatcttcaaaatgatttcaagacgggttgctcctcctgtgtctttgtgtaaaatataattgccagggaatcagtaaaataattatgaaagcaatagagaatgataccaatgaattcttaagtgcagaaaagtttattagaaagcagagatacaacaaagcataagaaattcaccctaggagaaacacagaatacaattgggtggctggatctgagggtgcaacatcagtgacaaaactggtcctgcagataatatctacctcactgagaaggagaatctgtaccttaaagtgataaagaaaataaggaaatcagaagattggaataatttcttagctagtgtattacaaattaattcacatttggtgccaccaccagaagaaaaagaaagcaaaggagggagtttaaaatgaaccagaatgttctcacagagtcagtgaaatggtggtgggctctttggaagcataaggtccatcctattgaatgacatcaaccccacttcatgtatcctaatggtcagcacagtagaagggtctacatctgtgggccagtggtgaagggggacgtgagccagggcagtgggctcagcagcaagaggaggcacagcacaaggggcggggacaggtggagatgacacaggttgggcgatagcaagtggtgtggcaggagactcggccacagactggacgcaggcagcagcaggggcggcagcagctggggcggcagcaggtgggctggcagcacacagactggcagcactggggcttgcagcagctggacatacagcagctggggcggcagcagctggagatgcagcacctagggtggcagcaggtcgtctcacagcaggtggggcgacagcaggtgggttggcagcacacagactggcagcactggggcctgcagcagctggacacacaacagctggggcggtagcaggtggtcctgcaacaggtggtctgacagcagctggggcggcagcaggtctcctgacagaggtcttggctgcagccctggtcagagcacacggagccacaacaggagctgaccatggtgtcagaacggggaggatctgggtgggtttccaagagagtgaagttcttgggtttggaagtcttctgggtccatagcctcctttataccctgctgaaggcccattgccaccacgtcattatttccttattatttacctcgtggaaaacttaatcatgtaattacataattgtgtgtttctacttaaatactccaaaagagagaaaataacccatttccttttcctgctgtgctcctgtgtttctattggaaacacttgtcatatttcttccttagtgggggtcacctttgtccctggtctctgcagtgtcttttacaaagcactggtcacatgactctgacactttatttctaaatgtgattctccctcctacctgtagattgctctctgcaaatcatgggggacaacttttataatgttaatgtgtcttttgttgtcaaataatgtcctggtcagatgaaatgttggaaaggaattagaaggaaggactcattcgggagaaggatgtcccatctataatgaagatgactctgattccgtgtatgcttcttgaatggttggggagatggtcagatcttaaggaagttataaactctgtgtcagatctcattccaccactccaagtgaaagtacttagccatgactcattgcctttaatgagtaaaaacacatttttctgtatgtcttacagtataggcatttggagtaggaagttttgatttacctttgatcatcaaaactgcatgatggattattcattgacaaaagcatttgttatatgtaaacaatatttagaattattaagccttcaataatatgcatccaagacattctattgggtactctgggtatagaacagataaaccctcctctttttcctgcaggtacttgtataagacacatgcataagaaacagaatttggcaaaaatgaaaagaattacaattatgttcattaaacaactaaaataaaaatgtatagtatgtggataagttccatacatcctcagggtatgtatattacttgtgaagtattgactatgtaccagacattgtgctaaatatctttttcattttcactctttattacaaccttataaagtagtgtacattcttattgctcttttagcagaatactcaaaagaagcattaaaaagctaaaacaaacaaacaaaatgcttgtccaagattaaagagaaagtaagcctaatatgtcttagtgtagccaagaaagtggtaaagaacaaaatttgctaagcttgctgaaactgcttcatcttcttggaatgtgtcgtctttttttgtccactctgcaaactcctactcatttgtcaaaacccagttaaatatttcctcctcagtaatatctttcctgataaactaccccattcatttatcattatttcctgccttgtgctcataatgtgatacattctactgtatcatagacgtttacttctttcattcccccatatgcaatgcaaatagcctgaaggcatgggctatgacgtttctttttgttaccatgatactcagcacagagaacaccggaaataaatgtttgttgaatgaatgaaggctttttgatgacatagaagcatgtaaggtcctttaaaaatgtatatatcgtttgacttctggataaaagagaggaaaacattccaaacaaggagatcagagtttcatttcaggaaaactacaattatttatgtggtaagcaacatgtcccctgataaatagcatatgtggaaccttgtggaattaggattccgtttatagaatgagacttggttatagataaccaggaataccatgttatcccattgtggaagggagagagggtgagacagagaaagaaggagtcaaactcatccttttataaggaacccactcttgtgataacaacattaatccactcatgagggtggtgtcaccatgacccaaacatctcctgttaggccccacctcccaacactgctgcattgaggatcaagtttcca

SEQ ID NO: 1244236 - DNA, 4001 bp, Homo sapiens
ttttcctcattttaatagtaaaaacagccacaacaagaaaaacacccctaggcggagatttcatatgctaatgatacatgcaatgggtgttacaccatgttgatcctgagcacatgtgccaaccgcaggtctgcctttgcatacttgacctcaccggtactttttgattatgtacgtatagctctcatgagaggaattccttttacagcactagctgctgtctctcccattgagcagcccactctgcctctcaaagggtacttttgctttgcaacaaacttcttcgcttactcttactttggatttgctctcaaattctttcgcgcagcaaattcaagaatctgaactggtccaccaacaacaaaataacaaaattcccttatataacatttggagtctgccttaactgatttgaatcaagatggaatgcagtaggatgagatgtactttttaaatttcacacagaagagtgaggagtattaccatgatatcataatttctaaaataatggatgaacttacaaacaacaatactgggggctttacctatcccaaagcattccgtatatcaaattgaaacaatgaaaagcttctattttattttagtttatctgtgacattactaggggttttacgtatcccaaaccattccgtatatcaaattgaaacaatcaaaagcttctattttattttagtttatgtgtgacattggagcagtttggcactatgatttcatccctgaagtcttactttggaatcatgctttgagaatccccttctactgcattcccacctcacccccatgaatcagtaaactcagtgaaaattatcacaaaaaatgcaaaaaacaataaaagatttctaaatgaaaagtttaatacaatatattttgtgaacacaataaagataaagaactaataaaatagaaaaattctgacaaacttgaacagtgagagaaagagagagcagggagaaagcgggagagcacgggaggggcagcctcctacctttccaaaagaaaagaatgactgaaaggctgacagacaaatagtatgtttgaaagggagataatgtgtacctaattgggaaggatattctgtaggctcaaaatgattttaaaaaatgaggaatttagaggattggaataatttcttagctagtggattacaaattaattcgtatttggtgccatgactggaagaaaaagaaagcaagggagggagtttaaaatgaaccagaatgttctcacagagtcagcgggatggtgatgggctcattggatacatgaggtccaccctgctgaatgacataaatcccactccatgtgtcctaatattcagcacagaagaatggtctacatttgtggaccagcggtgaagggagagatgagccagggcagtgggctcagcagcaagaggaggcgcagcacacggggcgggggcaggtggagatgacacaggctgggcgatagcaagtggtgtggcaggagactcggccacagactggacgcaggcagcagcaggggcggcagcagctggattcacagcaagaggggcggcagcagctggagatgctgcagctggggcggcagcagttgggctggcagcacacagactggcagcactggggcttgcagcagctggacacacagcagctggggcggcagcagctggagatgcagcagctagggtggcagcaggtgggctggcagcacacagactggcagcactggggcttgcagcagctggacacacagcagctggggcgacagcaggtgggctggcagcacacagactggcagcactggggtctgcagcagcaggacacactgtagctggggcggtagcaggtggtcctgcagcaggtggtctgacagcagctggggcagcagcaggtctcctggcagaggtcttggccacagccttggtcagagcacacggagccacaacaggagttgaccatggtgtcagagggtgaaggatctatttgggtttccaagagagtaaagttcttgagtttggaagtttcctgggtccatagcccctttatacccgcctgaaggcccgttgtcaccacgtcattatttccttgttattatttacctactgaaaaaattaatcatgtaattacatcattgtgtgtttctagttaaatactccaaaacagagaaaataactcatttccttttcctgctgtgctcctgtgtttccattggaaatgcttgtcatatttcttccttggtgggggtcacctttgtccctggtctatgcagtgtcttttacaaagcactggtcacaggactctctgacattttgtttttaaatatgactctccctcctacctgtagattgctgtctgcaaataatgggggacgatttttataatgtgaatgtatctttcattgtcaaagaacgtcctggtcaggtgaaatgttgggaaggaattagaaggaaggactcatttgtggaaggatctcccatctgtaatgaggatgactctgatcccgtgtgtgcatctcggatggtcgggcagatggtcagatcccaacaagttctaaactctttgtcagatcttattccacagcctccagcaaaagtacttacccatgactcactgcctttaaagggtaaaaacacattttgctgtatttcttacagtataggcattaagagtaggaagttttgatttatctttttttttttttttttttctgacggagtctccctctgtcaccaggctggagtacagtggcatgatctcggctcactgcaacttccacctcctgggttcaagcagttccttttcctcagccttccgagtagctgggactacaggtgtgtgccaccacacccagcttacttttgtatttttagtagagacagggtttcaccatgttggccaagatggtattgatctcttgacctcatgatccacccgcctttgcttcccaaagtgttgggattgcaggcgtgagcccccaacacccagcctgattaatctttgatcatcaaaattgcgtgatgcatttttcatttacaaaagcatttgttatatatgaagaatatttagaattattaagccttcaataacatgcatccaagatgttctattgggtactctgggtgtagaacagataaaccctcatctttttcttgcaggtacttgcataagacacatggataggaaacagtttggcagaaatgaaaagaattacaattattttcattaaacaactaaaataaaaaatgtataatatgtggataagttccatacaccctcatggtatgtatattacttgtgaagtattgactatgtagcaggcattgtaccaaatatcttacatttgtttcattttcacactttaatacaaccttatgaactagtttatattcttattagtcttttaggggaatactcaaaagaagcattaaaaacttaaaacaaacaaacaacttgtccaaggttaaagagaaagtaagcctaatatgtcttagtgtagccaagaaagccctaaagaatacaatttgctaagcttgctgaaactgcttcatcttcttggaatgtttcatctttttttgtccactctgcaaactcctactcatgtgtcaagacccagttaaaatatttcctcctcaataatatctttcctgctaagctaccccattcatgtatcatgatttcctgccttgtgctcataatttgttacattctcctgtatcatagtcatttacttctgtcattccaccacgtgcaatgcaaataccctgaaggcatgggctatggcatttattcttgttaccatgatactcagcacagagaacactggtggtaaatgtttgttgagtgaaggaaggcttttgatgacatagaggcatgtaaggtcctttaaaaatgtatatatcttttgacttctggataaaagagaggaaaacattccaaacaaagagatcataatttcatttcaggaagactaaactaatttacgtggtaggtaacatgtca

SEQ ID NO: 1244237 - DNA, 4001 bp, Homo sapiens
aaatatgaagcttatttttcatatttgaacatatctgaacaaatcatcttaaacttgattggctcaatagcttaaggccatttcagagctgataatagtcaaataaaagtaaaaacatcaagagcaggtgctcctactagaatgccaagttatagtcacttaccatattctttcagattcaaatgaaggcacctctcttggaaattctaattaggatatgcaccccagctgcgacctactcaagactgaactaattccaataaaataattcttaaaaagaaaagcgagccttgaaattttcatcctttctgggtttatatatattaaaatgttaagtgtggagttgtttaaattataatgtaaacccgtagagaccacagtcagcaatataccatgctatccagatgaactacagctcaatatgcttttttgtctcagcagaactcactgggaaataaagcccactttttgattataaattccaaaatgttgttattgagtaaaatgaattcagtacatgaaattctttatagaagatttcccttctttcattggtgtctaattttcagaaatttggttttatcttttttgtcaaaacagggacgatagtattatgagatataatgtgttaaagataaaatgtgtttcaagagctaaggtatgaattaaaactgtcttaatttaggatattaagacacatgtgcacacacacacacacacatacacacacatatacacacagcacttctattccaataccgtaaattatctatattcgatatagcatgtattttcaaagtgatttcaacacgggttgcttttcctgcgtctttgtgtaaaatataattgtcagggaatcagtaaaataattatgaaagcaatagagaatgataccaatgaattcttatgtacagaaattttattaaaaagcagagatgcaacaaagcataagaaattcacactaggagaaacacagaatataactgggcggctggatctgagggtgcaacctcagtgacaaaactggtcctgcagataatgtctgcctcactgagaagaagatctgtacctcaaagtgataaagaaaatgaggaaattagaggattggaataatttctagctagtggattacaaattaattcacatttggtgccaccaccggaagaaaaagaaagcaagggagggagtttaaaatgaatcagaatgttctcaaagagtcagtgaaatggtgatgggctcattggaaacatgagttccattctattgaatgacatcaaccccacttcctgtatcctaatggtcagcacagtagaagggtctacatctgtgggccagtggtgaagggggagataagccagggcagtgggctcagcagcaagaggaggcacagcacaaggggcgggggcagctggagatgacacaggttgggcgatagcaagtggtgtggcaggagactcggccacagactggacgcacgcagcagcaggggcggcagcagctggattcacagcaagaggggcggcagcagctggagatgctgcagctggggcggcagcagttgggctggcagcacacagactggcagcactggggcttgcagcagctggacacacagcagctggggcgacagcagctggagatgcagcacctagggtggcagcaggtcgtctcacagcagctggggcgacagcaagtgggttggcagcacgcaggctggcagcactggggcctgcagcagctggacacacaacagctggggcggtagcaggtggtcctgcaacaggtggtctgacagcagctggggcgggaacaagtgggttggcagcacacagactggcagcactggggcctgcagcagctggatacacaacagctggggcggcagcaggtggtcctgcagcaggtggtctcacagcagctggggcggcagcaggtctcctgacagaggtcttggccgcagccctggtcagagcacacggagccacaacaggagctgaccatggtgtcagaacggggaggatctgggtgggcttccaagagagtgaagttcttgggtttggaagtcttctgggtccatagccacctttataccctgctgaaggcccattgccaccacgtcattatttccttattatttacctcgtggaaaacttaatcatgtaattacataattgtgtgcttctacttaaatactccaaaagagagaaaataacccatttccttttcctgctgtgctcctgtgtttctattggaaacacttgtcatatttcttccttagtgggggtcacctttgtccctggtctctgcagtgtcttttacaaagcactggtcacatgactctgacactttatttctaaatgtgattctcccccctacctgtagattgctctctgcaaatcatgggggacaatttttataatgtgaatgtgtcttttgttgtcaaataatgtcctggtcagatgaaatgttggaaaggaattagaaggaaggactcattcgggagaaggatgtcccatctataatgaagatgactctgattccgtgtatgcttcttgaatagttggggagatggtcagatctcaaggaagttataaactctgtgtcagatctcattccaccactccaagtgaaagtacttagccatgactcattgcctttaatgagtaaaaacacatttttctgtatgtcttacagtataggcatttggagtaggaagttttgatttacctttgatcatcaaaactgcatgatggattttcattgacaaaagcatttgttatatgtaaacaatatttagaattattaagccttcaataatatgcatccaagacattctattgggtactctgggtatagaacagataaaccctcctcattttcctgcaggtacttgtataagacacatgcataagaaacagaatttggcaaaaatgaaaagaattacaattatgttcattaaacaactaaaataaaaatgtatagtatgtggataatttccacacaccctcagtgtatatatatattacttgtgaagtattgactatgtaccagacattgtgctaaatatctttttcattttcactctttaatacaaccttaaaaagtaggtacattcttattactcttttagcagaatactcaaaagaagcattaaaaagctaaaacaaacaaacaaaatacttgtccaagattaaagagaaagtaagcctaatatgtcttagtgtagccaagaaagcgataaagaatacaatttgctaagcttgctgagactgcttcatcttcttggaatgtttcatctttttttgtccactctgcaaactcctactcatgtgtcaaaacccagttaaaatatttccttctcaataatatatttcctaataagctaccccattcatctattattatttcctgtcttgtgctcataatttgatacattctactgtatcatagacatttacttctttcattcccccatatacagtgcaaataccctgaatgcatgggctatgatgtttctttttgttaccatgatactcaggacagagaacactggtgataaatgtttcttgagtgaatgaaggctttttgatgacatagaagcatgtaaggtcctttaaaagtgtatatatcttttgacttctggataaaagagaggaaaacattccaaacaaggggatcagagtttcatttcaggaaaactacacttatttctatggtaagtaacatgtcccctgataaataacatatgtggaaagttgtggaagttaggattctgtttatagaatgagacttggttatagataaccaggaataccgtgtcttcccactgtggaaggaaaaagagagggtgagacagagaaagagggagtcaaactcatccttttataaggaaccctcttttgtgataacagcattaatccactcatgagggtggtgtcaccatgacccaaacatctcctgttaggcccaacctcccaacactgcggcattgaggatcaagt

SEQ ID NO: 1244238 - DNA, 4001 bp, Homo sapiens
tttctatgttagtttgctgaaatgatggcttccagcttcatccatgtctctgcaaaggacataatctcaatctttttatggctgcatagtattccatggtgtatatgtgacacattttctttatccagtctatcactgacagacatttaggttggttccaagtctttgctattgtaaataatgctgcaataaacatacatgtgcaggtgtctttatagtagaatgatttataatcctttgggtatatacccagtaatgggattgcttggtcaaatggcatttctggttctagatccttgaggaatagccacactgttgtccacaatggttgaactaattcacactcccaccaagagtgtaaaagcattcctagaactcttaaagatggtctctagtggtcatagaggtggggagagtatttgggaagtgctttgtagatagaaaagtgtttgcttgagatgtgacttaaaatgtacatcttccctgcactcaatcaccactgttgcatctacccggagaaaaatgtttttaaaaaagtgtccttaacctggattcaaagtacctggtcattgaaccttcccttgtcaattgctagttgtatggcaaatcattttctcatcactaaaatgtttgctctgtccaacttgtaggtcattgtgagacttgaacaagataataaatataaaccacaactcaaaagtaaggcttcacaaagcaactgctgcaaacaaacaaacaaatggaacaaaaatcataccataggatgcaggataatataaattttattaggaaagaccaggtagggagacaattaaaagtgatcatgaaagagtttagtaatctggcagaggctactaaataaaatgtatatatctaaaaagatgatcagtattgatcattatagagagttagatatgcagtcttaagaatttttttttaagttccataggggcaaaagctgatgaccactttctgtggctgagtccatgtatccatgtcaattaggtggagttgactgaccaccatctggtacattaacacagagggaatgaagaagaatgaaagtgaggtagactgcaaaccttcagcagaatcccaagcatggtaggaagaagatgatcacaaagttcagtgtcagaatgttgtttctcagaaaagcttagcgaatgtttcttggtggaataggaactttgacaaaatgtttcaggaaatatgtctctggtgggtggtgggtctgcagcaagtggattagcagcaggaaggctggcagcagctggagacacagcaaggactgcagcaacagctggggcggcaacaggtggtcctgtagcaggtggtctggcagcaggtgggacggcagcaaggcagacaatagctggactcattgcaggtttggctacagcagctggacccaccacaggttggctggcaacagggtgtgctgcagcatctggtcacacaggatggttggcagcaggtggatctacaaatggtttgacagcatgttgggtggcagcaaggctggcagcagctggacccacagcaggtgggctggcaagaggtgttcctgcagcaggtgggctggcagcaggtaggctggcagcaggtggtcctgaagcagatagtttgatagcaagtcgggtgacagcaaggctgacagcaactggacccacaaataggctgacagcagctggacccacagctggtttggccacagcagctggacccacagcaggtgggctggcagcagggtgtgctgcagcaggaaggctggcagcagctggccacacaagtgggctggcagcaggtggtcctgcagcaggtgttttgacagcaagttgggtggcagcaaggctggcagcagctgggcacacagcaggagggctggcaacagggtgtgctgctgcaggtggtcacagtggtgggcttccagcaggttgtcctgcagcaggtggtcctgcagcatgtaggctgacagcaaggggaacagcagtgggtcatggtgtcaggggtgaagggtgggctcctgttcagaggtgagtttccaagaatctgatgacccccttctagtatctggaccttttatacactggttcccaaatctggaaccaatgagcagaattttcctggttattatttatgacattatttttcataacctatagggaattgcccagggacgaagtgttccttaagtgttatgaatcttctgaaaataaatgattgttctacttaacaatagataacccataaaaacttatatccagaagtgagagaggtgatcaacatcaatagcatcatttaactataaagtatatatttttatttattattttactgctattattatcttagagacaaggtttcacctgtcactcaggctagtgtgcagtggcgcgatcatagctcattgtggccttgaacttctggacttaagcgatcctcctacctcagcctcccagagtgatgggattacgggcatgagccactgtgcctcgcctgaattatcattctttaagacagagtacattgactgatcccctgacaactgaaactaacttgaagaggccagaactattgtcaccacctacattttcccctccagcactagaacatggtgattaactcaaggtgacaaatgtaaaccatattttaaaatattttccgttaaaatgtattttttatcaaacttttcatctgtgtcacacaaacacagattcaatgacagtaattctaatagtaatagcaactccacttgggtatctcaattcctgaaacaggggactgggctcaattgtaattgtcgtaatcttttccatgctgagctccacatctgttgatggccctaagtacaaacatccctgggtacatgatgtttacgcttagtggtgcaaagaaaagtttaaaagcagttagtcagacaactaaaatattttgctttgaattgcagtttgaaaatacaaacaccgttgtgtgtgtttttttttttttttttgagacggagtttcgctctgtcgcccaggctggagtgcagtggcgcgatctcgactcactgcaagctccgcctcccgggttcacgccattctcctgcctcagcctcccgtgtagctgggactacaggcgcgcgccaccatgcccggctaatttttgtatttttagtagagacggggtttcaccgtgttagccaggatggtctcgatctcctgacctcgtgatccgcccgtctcggcctcccaaagtgctgggattacaggcgtgagccaccgcgcccggccgtgtgttttaaatgaaggaacaaacgggacgagaatgactccatcatgtgtattaatggggaaaacacagaataagttgcataatattttggatgcttagcaatttccatatctggctaatctattcaaataaagagtttcttattttcactggcaacaaaatggtcttttgatacagcttgacttgctctgacttaaactgtggctaaaaatttctgccatctctgctgctgaggcatcctgaccttagctgtgaaggtggacacagcctctgtttgctggtccagcatatgggtaatggcattgccagttcatcccataaaatgatctggtgcagttcatttagtcagaatgaagttatagtgaaggagaggatggggtggagtattcttcacttgtgtctccaccctgagaatgggtttggcacatagcgggaaccaaaacatgattattgaatgaagaactttacatttactagcttgattttttttttttggagatagagtcttactctgttgcccaggctggagtgcaggggcgtgatcttggctcaatgcaacccccgcttcatgggttcaaatgatcctcctgcctcagcctcctgagtagctgggactacaggcacgtgccaccactcccggctaattttttgtatttttagtagagatggactttcaccacgttgaccaggctggtcttgaactcccgacctcaggtgattcaccc

SEQ ID NO: 1244239 - DNA, 4001 bp, Homo sapiens
atcaatctatctttccctgagtgaatgcttagcttgcaccagttcagaaccaaaagcaccaacctctgtctatcatgacttctatgaatgcacacgttctactttgctcctttcttacattcttctgatttccctgcaaacaccgttttcagtttctttagatgcctcatattggtcttacaaaattcagaaggttctttcattcccttccttggtttagagattatggattgtgccacgtcttacatacccattgcgtactttctcaattcccagcttaattccttacttaattttcctcataacatttcgattaggggacaaattgtcttaatgtggcataaggtgtggtctgtattttacaaggaataacttagtttcattgactttgtcaacaggtattcaggagggggaggctgtgtaagaattttatttacatcatactgagaataagtcacttcagatgagactctctcttatgatgatataatgaattctcaagcatctttttgatgcggatgaattgaatgattggctggtcagaggctgagacaaaaagatccctgcattcagggcagccattaaatgcaatccctgctgccatgtcatgcagctgttgctcactgaggtgtgggaaaaaataatttgggatttttttgtgaataaaaatattatttgcaaatatgagagattatttctctcattgttaaataaactcaagtgcatgtcttgctagtgctgacttccaatgtcatttctactatgttgagagttaaatgtaagtgtccttgggcagaaagagaggacctcagcttggatcagaatctgtcctttattagctacataacatcacatattaattttttttcaggtgaaaaatgaaggtaataatgcatgaccacctgttttgagaatcaaattggataataactatggtatgtgatatgtgtgtaaatcccatatcaggagtgctttcaaataaaacaaaacactatatgagatgaggatggttcagaatttattcagaaacatataggtaaggatttctgctaccagggacacaacacaaatttatcatgaaaagaagaaagaaggatacaagaacgatgaggaggatattgaaaacaaaaaaaagattgcaaagatcatcgatcagttgcagaaacctaaattccttagaagcagggaatgaagctcttgactttagagtcaaagctgagaccatgactcaaacttgagaacagatgaagctggcacatgatccacaaggtgtaaggaaaaagagaatcaggatgaagtattctgccctccctcaagcagatttccaagattttaaacatgtagagaattcataaaaatttgggtgagagcatggtggctgtcagcagcaaattaaattagtcccccaaaagatgagtcagttgagcagaaatttgttgtgtgaggatggtggttctcttggaacgtgatcagcagcaagaaggctggcagcagctggacacacaggtgggctggaagcaagtggtcctgcagcaggtggtctcacagcaggctgggcggcagcagggctggcagcagttggagccacagctctggtttaggcaaccaggcaggcagacagtcgtggggtagtagcaggttcttctgcagtacacaggtgcacaggagctgctctggccacagctggacccacagctggtttggccacagcagctggacccacagcaggtgggctggcagcagggtgtgctgcagcaggaaggctggcagcagctggtcacacaggtgggctggcagcaggtggtcctacagcaggtgttttgacagcaagttgggcggcagcaaggctggcagcagctggacacacagcaggcgggctggcagcagggtgtgctgctgcaggtggtcacagtggtgggcttccagcaggtggtcctgcagcaggtggtcctgcagcaggtaggctgacagcaaggggagcaacagtgggtcatggtgtcaggggtggagggtgggcttctgttcagaggtgagtttcccagaatctgatgaccccttgcaatctggaccttttatacatctggcctccaaagtttccaccaatcagcaggacttttccttgttgttgtttacactgttttccatactccctttgcgattgtcaaaggggaagttgtttctgaaatcttatgaatcttttgaaagtaagggtttaatctgtttcttaattgagaattactcataaaaactttgtttcagataaaaggaaggcagtctcatcaccagcatcattcctgctctgaccatcatctggtcatgtgatagttcctggtgatccgggaagcagatagttctctctgtccagcctcatggttgactgtatgtagactgggaaatgtctgtgggcagtcgcgtgatgctgttatgttcacagtgatgcattgaatccgtgcccggcaccaagcctatttacccacaaaagtctgattcaagagtaacaagcatctttctcgctacaaactattccacctgtgtcttccagttctattacactcactagggaaagggtgtttggcacaatgtattccaaaatgcagagctagaccaaagcaggtgggtagaaaaaggagtccactgggattcagaaagcatcgagtgtctctgtgatggtgttgccatttaccctgatttgcctgggactgaagggtttaccagcatgggactctctgtgacgtaagtgctctagattcgggcaaatcaagctgagttctggtcctagcttgttaattctaatactttttgtatttttttttggtgtgacagaaaattgcacatgtgcagtcatgactcataaaaaatagtaatagttttcttcgctttataagagtatttttaatcttgctttttttttggcccttgtccaggggtagaccctccagggcaatgtctaatagaatggtgtagtgtatatctttttatattcgttggatagaaaggagaactctcagtatttcacaattaattacgatgctttctgtcttttttgtagattcatttcatcatagcaacaggtcttgttctattccttattttctgagagacagaaaactgaaaatgtactgaaatttacaaaatgctttttctttataagctgaaataatgttatgattattctaccttttcagtaagtgttgttttattctatgttttttgagacagagtcttgcttcgtcacccaggctggagtgcagtggtacaatcttggctcactgcaatctccacctcccgggttcaagagattctcttgcctcagcctcctgagtagctgggactatgggagcacaccaccatgcccagctaacttttgtatttttaatagagacagagtttcaccatgttggccagctgatcgcaaactcctgacctcaagagatccacctgcctcggcttcccaaaatgtgttattttaaaagttgattaatgttcaaatattagcccagtcttgcatttctgaaaacaattcatgtggttacgatcatatgtatatgccattggattttatttacttatattttgtttaggatatttactatcattgcattccaaaaatatattctcctattcttactctatttcctctaccttctctaagtaaagaaattccgaatatagcaaaattcctacccttctgtgcccaatttgaccttgatgtgaccccctgtattggtttttctaaaggcaatttcatgccccatgaaatactctagcagttctattgcagagtgtgggcttggggatcaacagttcttttttcaacaggggcactagactatcccatgggtccctttcaaacacacacaccccatggggggaactcccaggagatacttgtagcccagttgtagtctttcttatctactttgacagaaacaatgaagtctagcccaattatctgaaatctgtacttagtcatttctacaacaatattgtgttaatctaga

SEQ ID NO: 1244240 - DNA, 4001 bp, Homo sapiens
tttcaatttctctcagagccagcatcaatcaatcctttcatgagtgaatggttatcttacatcagttcaggacccgaagcaccaacctctgtctattatgtcttctatgaatgcacaagttctaccttgctcctttcttacattcttctgatttccgtggaaaaagaagtttttcatttctttagattcttcatattggcctcacaaaatgtggaaggttgtttttattcccttccttagctcagagattatgggttgtgccaagtcttacatgcccattgcatagtttctcaattcccagctttgttcttacataattttactcataacacttcaagtaggggacaaattgtcttaacgtggcataacgtatggtctgtattttacaatgaataacttagtttcatttactttgtcaattggtattcaggagaccgatgctgtataagaattttatttacatcacactgagaataagtttcttcagatgaggctccgtctcctgagtccacaataaattctcaagcattttttgatgcagatgaattgaatgaatggctggtcagaggctcagacaaaaagatctctgcattcagggcagccattaaatgcatatcatgcagcctttgctcactgaggtgtggggaactactttgggatttttttgtgtgtgaacaaaagtgttatctgcaaatatgtcagattattcctctcattgttaaataaactcaagtacatgtcttgctagtgctgacttccagtgtcttttctactatattgggagttaaacgtaagtgtccttgggcagaaagagaggacctcacctttgaccagagtctgccctttactagctacataacatcacacattaaattgttctcagctgaaaaaatggagttaataatacacgaccatctgttttgagaatcaaattggataatacctatggtatgtgatatgtgtgtaaatcccatatcaggaatgctttcaaataaaacaaaacactatatgagatgaagatggttcagagtttattcagaaacatataggtaagaatctctgctaccagagacataacccaaagttatcgtgaaaagaagaaagaaggatacaagaaccatgagaaggatatttaaaatgaaaatataattgcaaagatgattgatcagttgcagaaacctaaattccttagaagcaaagaatgaagctcttgatttttgagacaaagctgagatcatgactccaaattaagaacagacgaagctggcacatgatccacaaggtgtaaggaaagagggaatgaggatgaagtattctgccctccctcaagcagattcccaagattttaaacatgtagagaattcataaaaatttgggtgagagcatggtggctgtcagcagcaaagtaaattagtccctcaaaagacaagtcagttgagctgaaggttgttgtgtgaggatggtagttctcttgggagttgattagcagcaagaaggctggcagcagctgtacacacaggtgggctggaaacaagtggtcctgcagcaggtggtctcacagcaggctgggcggcagcagggctggcagcagttggagccacagctctggtttaggcaaccaggcagacaaacacttgtggggtggtagcaggttcttctgcagtacacaggtgcacaggagctgctctgaccacagctggacccacagcatgtgggctggcagcagggtgtgctacagcaggaaggctggcagcagctggtcacacagatgggctggcagcaggtggtcctacagcaggtgttttgacagcaagttgggtggcagcaaggctggcagcagctggaaacacagcaggagggctgacagcagggtgtgctgctgcaggtggtcacagtggtgggctgccagcaggtggtcctgcagcaggtaggctgacagcaaggggagcaacagtgggtcatggtgtcagggatggagggtgggcttctgttaagaggtgagtttcccaaaatctgatgaccccttgcaatctggaccttttatacacctggcctccaaagtttccaccaatcagcaggacttttccttgttgctgtttacattgttttccacagtccatttgggattgtcaaaggggaagttgttactgaaatcttatgaaccttttaaactaagggtttaatctgtttcttaattgtgagttactcatagaaagtttgtttcagataaaaggaagcccgtctcatcatcagcatcattcctgctctgaccatcatctggtcatgtgacagttcctgttgatccggggggctcaggaagttctctctggccagcctcatgtttggctgtatatagacttggaagtgtctgtggggagaagcatgatgctgatatatttacagtgacaaaatgaatccatgcctgggcccaagactattcacccaccaaattctgactcaagactaacaggcatctctttgtgccacccacatcatctgtgtctttcagttctttgaatgtcacttgggaagacggtgactgcacagtgtgttccatgcgacagagcagatcgagaacaggtggatgcagagaaatctgctgagatttagacagcatcaagcaatgtatgccctaggacgaccattcattctgacttgtctgggagtgtggggatttccgggatgagaatggaggactttctatcacgtaacttcttgagattcaggccaaccagcatgtgctctggctctagccctaaacctagttactagcagtaactagaagtaagcgttgaaattcaggccaaccagcatgtgctgtggctctagccctaaacctagttactagcagtaactagaagaagaagtaagtagaagtaatttcttctatttcttttcaatgaagggattagatgagttgagatgacacctgattcatcgtggagttctaacatgttgaaaacattgtctaggtatatcattcacttgagaagaatgcaaattattaatttccaacctgatatagtattacattgtaaatacatctatgtccccattaccaggttaggaaatagaaattaatgccattctctcccaattatatccgcttactcatttccaaacagctaatcactctatcaagttataatccagtagatgactttggctttttaaaatttccatgtgaataaaaattatagtatttgcttctctgtttctttgttataatcaaaaggaatcgttatcgcctagtcattttggactcttcccgtcagcagagcagcagacagagaaaggagttactatttggtgaggggtaattatctttaagccatatagtgtagcagaatatatctatagctcaggatacttagtaagtgtattaacttaccagcactgccataataaattactgtaaaccaagtggcttaaatttatcttttcacagttcagaaattaaggttttggcaatgttgttttcatctgaagcctgtgagggaagtacatgttccaggtctctctccttgacttgttgatgtctatcatttccatgtgtgtttgatataatttttctgttatatgcatgctgtctctgaatttcccccttttatatagacatcagtcatatttaatcagaggcctaattgtttccaatatgaccttgccttatcacataacactttaaatgattctatttgaatatgagttttgggggacacaaattaacccataacactggagaatctcatagtgtgtccatgtccagtgataactacaaatcggtaagaacagcaatcacagtggacagtggtatagtaactagaggctcagacaatttaggaaggaagttatcaaggcagttatcaggcagttatccagaccaagaagagtgctggccagcggtgaagggagaatagaactggtggtaataaacggagactgtgaatctcaggtgcactgtactatagcagcagtaagtgtagcttatttcattggccttc

SEQ ID NO: 1244241 - DNA, 4001 bp, Homo sapiens
cccaggtccccaacttttatatttctctcagagcctgtatcaatcaatctttccatgggtgaatgcttagcttacatcggttcaggacccaaagcactaacctctgtctattatgacttctatgaatgcacaagttctactttgctcctttcttacattcttctgatttccctggaaacacaagtttttcatttctttgaatgcttcctattggcctcacaaaatgcagaaggctgtttcattcccttacttggctcagagattatggattgtgccaagtcttacatgcccattgtgtagtttctcaattctcagctttgttcttacataatttccctcataacattacaattaggggacaaattgtcttaatgtggcaaaatgtatggtctgcattttacaagaaataacttagtttcatttacttcatcaataggtattcaggagatgaaggctgtataagtattttatttacatgatattgacaacaagtttcttcagatgagactctctctcatgagtccacaataaattcccaagctttttttgatgtagatgaattgaatgagtggctggtcagaggctgagacaaaaagagctccctgcattcagggcagccattaaatgcagtccctgctgccatatcacgcagctgtttctcactgaggtgtgggaaattgggaattttttgtaaacaaaaacgttatctgcaaatataagagattatttgtcctattgttaaaaaaactcaagtatatgacttgctaatacttacttccaatgtcatttctactatattgagagttaaatgtaagtgtccttgggcagaaagagaggacctcagcttggacaagagtctgccctttactagctacataacatcacacattaaattgttctcagctgaaaaaatggaggtaataacacacgaccatctgttttgagaatcaaattggataatacctatggtatgtgatatgtgtgtaaatctcatatcaggaatgctttcatataaaacaaaacaccatatgagatgaggatggttcagagtttattcagaaacatatagctaagaatctctgctggtagcagaaacataacccaaagttatgaaaagaagaaagaaggatacaagaaccatgaggaggatattgaaaacaaaaatatgattgcaaagattattgatcagttgcagaaacctaaattccttagaagcagagaatgaagctcttgacttttgagtcaaagctgagaccatgactcaaaattgagaacacacgaagctggcacatgatccacaaagtgtaaggaaaaagagaatcaggatgaagtattctgccctccctcaagtagattcccaagattttaaacaggtagagaattcataaaaatttgggtgagagcatggtggctgtcagcagcaaattaaattagtcccccaaaagataagtcagttgagcagaaagttgttgtgtgaggatggtggttctcttgggacttgatcagcagcaaaaaggctgacagcagctggacacacaggtgggctggaagcaagtggtctcacagcaggctgggcggcagcagggctggcagcagttggagccacagctctggtttaggcaaccaggcaggcagacagttgtggggtagtagcaggttcttctgcagtacacaggtgcacaggagctgctctggtcacagctggacccacagcaggtgggctggcagcagggtgtgctgcagcaggaaggctggcagcagctggtcacacaggtgggctggcagcaggtgttttgacagcaagttgggcggcagcaaggctggcagcagctggaaacacagcaggagggctggcagcagggtgtgctgctgcaggtggtcacagtggtgggcttccagcaggtggtcctgcagcaggtggtcctgcagcatgtaggctgacagcaaggggagcaacagtgggtcatggtgtcaggggtagagggtgggcttctgttcagaggtgagtttcccagaatctgatgaccccttgcaatctggaccttttatacacctggcctccaaagtttccaccaatcagcaggacttttccttgtttccgtttacattgttttcccagtccgtttgtgattctcaaagggtagttgtttccttaaggttaaacagattaaggtttaatctgtttcttaattgtgaattactcatagacactttgtttcagataaaaggaaggcaatctcatcatcagcatcattcctgttctgaccatcatctggtcatgtgatagttcctgttgatctgggaggctcaggaagttctctctggccagcctcatgtttggctgtatgtagactgggaagtgtctgtggggagaagcatgatgctgatatatttacagtgacaaaatgaatccatgcctgggcccaagactagtcacccaccaaattctgactcaagactagcaggcatctctctgtgcaacccacaccacctgtctttcagttctttgaacatcacttgggaagagggtgtttgtcacagtgtgttccatgtggcagagcagatcgagagcaggtggatgcagataaatccactgggatttagacagcatcaagtaatctatgccctgagtgaccattcattctgacttgtctgtgagcgtggcgattccagaatgagaatgtaggactctctatggcataaatgcttgagattcaggccaaccagcatgtgctgtggctctagtcgcaacccggttactagcacagtaagcagcatgtcttctctctctctctctatttctttttaatgaaggaattagatgagttgagatgatgcctgattcatcatggagttctaacatgtttaaaacattttctaggtataccattcatttgagaagaatgcaaattattaattttcaacttgatatagtattatattgtaaatacatctgtgtccccattacatctatgttaggaaatagaaattaattccattctctcccaattatatgctcttactcattcccaaagacagctaatcactctatcagttgtaatcctgtaggtaatttttggttttttaaagttttcatgtgaataaaaagtatagtatttgcttctctatttctttggcataaacaaaagtaatctttatcgcctagtcattttggactcttcatataagcaaagcagcagacagagaaagtagttactatttggtgagggataattaccctcaagccatatagtgtagcagaatatatctatagctcaggagatttactgagtatattaatttactagcactgccctgatgaattactgaaaaaaagtggcttaaatttatttatcaaagttctgaaggcctcttttctgaaattaaggtgttggcaatgttgttttcatctgaagactgcgagggaagtatctgttccacgtctctctccctgacgtgtcaaagtctatcatctccaagtgtgtttgacataatttttctattatatccatactgtctctgaatttctcccttgtgaatagacacagtcatatttaatcagaggcctaattgtttccaatatgaccttgtcttatcagataacactttagatgattctatttgaatatgaattttgagggacgcaaatgaacccataacactgcagaatctcacagtgtgtccatgcctagtgataaccacaaatgagtaaaaacaacaatcacggtggacaatggtatagtaaccaggggctcagacccttcaggaaggatgctctgagctactctatcagcagttatctagaccaacaagagtgctggccaggggtgaagggagaatagaactcttggtaattaacggagtttatgaaacttaggtgcactgtattatagcagaagtaagtgtagattatttaattggccttcgttttatatctcacttcctctcctttcttttcctttccttcctctttcttctttctttctttctttcttttcttt

SEQ ID NO: 1244242 - DNA, 4001 bp, Homo sapiens
ttgcatagtccctcaatccccaaatttgtttcacttaattttcctaataacattttgatttgagggacaatttgacttaatgtggcttaatgtatggtccatattttagaaggaataacttaaattctttttgctttgtcaacaggtattcaggagaaggaagccatataagaatattatttacgtgataccaggaaaaaaatccccaaatgagatcctctctcatgaggacacaatgcattctcaaaattttctgatgcagattaattgaataaatagctggtcaaagactgagacaaaaagggatcctcactcagggcagctattaaatgccgtccctgttgtcatcccatgtagctattactcactgaggtgtggaaaactaatttgggaagacctttgtgaacagaaatgtcgtctgcaaatatgagagattatacctcccacattaaataaactcaagtgcatgtcttgctattgctgagtctcaatatcatttctactttaccgagagttaaatgtaagtgttcttgggcagaaagagaagctctcaccttggactagagtctgtcctttattagctacataaaatcacacactaaattgttctcagctgaaaaattgaggtaataatacataataataactctgttttcagaatcaaattggataatacatatagcatgcaatatgtgtgtaaatctcatatcagcaattctgtaaaataaaacaccatatgagatgaaggatggttcagaatttattcagaaatatataggtaagaatccctgctactagggacatagcccaaagttacaatgaaaagaagaaagaagggtaaaagaaacatgaggacaaaattgaaaacaaaaatatgattgcaaagattattgatcagttgcagaaacctaagtttcttagaaggagagaatgaagctcttgactttagagtcgaatggagaccatgtctccacattgagaacacatgaagctggcacatgatccacaaagtgtaaggaaaaaagaatcaggatgaagtattctgccctccctcaagctgattcccaagattttaaacaggcaaagaaataaaaaaaattggtgaaagcatactgtgtatcagtaaagtttgaaagtaaatctgtcttctgaaagataagtgagttgggtctgggtgtggtagctcacacctgtaatcccagcactttgggaggctgaggcaggtggatcacctgagggcaggagttccagacaagtctgatcaacatggtgaaaactactaaaaatactaaaaatacaaaaaattagccaggcgtggtggcacaggcatgtaatcccagctactcaggaggctgaggcaggagaatcacttgaacccagaagatggaggttgcagcgagccgagagcgtgctactgcactccagcctgggtgacagtgaggctccgtctcaaaagaaaaaaaaggtcagttgagcagaaggttgttgtgtgaggatgatggtcctctgtggtgctgctcagcaacaagaatgctggcagcagctggacacacagcaggctgggcagtagcagggctggcagcagctggatccacagctctggttgaggcaaccaggcaggcagacagtcgtggggtggtagcaggttcttctgcagtacacaggtgcacaggagctgctctggccacagctggacccacagctggtttggccacagcagctggacccacagcagatgggctggtagcagggtgtgctgcagcaggaaggctggcagcagctggtcacacaggtgggctggcagcaggtggtcctgcagcaggtgttttgacagcaagttgggtggcagtaaggctggcagcagctggacacacagcaggagggctggcagcagggtgtgctgctgcaggtggtcacaatggtgggctgccagcaggtagtcctgcagcaagtggtcctgcagcaggtaggctgacagccaggggagcaacagtgggtcatgttgtcaggggtggagggtgggcttctgttcagaggtgagtttcccaggatttgatgaccccttgcaatctggaccttttatacatgtggcctccaaagtttccaccaatcagcaggatttttctttcttgctgtttacagttgttttccatagtcagtttggcattgtcaaagaggaagtcatttcctaaatgttatgaatctttggaaagtaagggtttaatctgtttcttaattgtaaattactcgtagaaactttgtttcagataaaaggaaggcagtctcatcatcagcttcgttcctgctctgaccagcatctcgtcatgtgatagttcctggtgactggggaggctcaggaagttctctctgcccagtctcatcctttggctgtatgtagactgggaagtgtctgtggggagaagcatgatgttgatatattcacagtggtgaattgaatccatgcttgggaccaagactgttcacccaccaaagtctgattcaagactgataggcatctctctatgtacaacctactttacctgtctcttccagttctataaaagcctcttgggaagagggtgttcagcacaatgtgtgctatgtggcagagcagagccaaagcaaacacgtagaaagaggaggggttcactggaattcacaaagcatcaagcaatctacgtgctgcggtgaccattcaccctgatttgtctgggactgaggggcttaccagcatgagaatgtgggactgggaattactgtgacattactgcttgaggtccaggcaaagcaatatgagctgtggctctagccctaatccaggttactggcacaatcattgccatttctctgtctctgtctctgtctctgtctctgtctctgtctctctctctctctctctctctgtctctctgttttcagtgagggaattaggtgagttgagatgatatctgattcctctttgaggtttaccattgtttaaaactttttaaattataccattcatttcagaagagtgcaaattatgaattccaacttgatataatattacattataaatacatctaagtccccattaccagtttacaaaatagaaattaattccattccctccaaattatatctttttacttatctccaaaggtagctagtcactctatcaagttttaatcctgtaggtcagttttgtttttttctttgacttttatgtaaataaaaattatagaatttgcttcactgtgtttttggcataatcaaaagcagcaattataacctggtcatttcattttggatccttcatgttagcagaccagcaggtagataaaggagttaatattccatgagggataattttcgtgaagccatagagcgtagggagaatatatctgaaactcaagaaatttactatatatattaaagcattacactgccattaaaaactatggcaaatcaagtggctgaagtttattttctcacagttctgaaggctaaaataaaggtgttggcaatgttgttttcatctgagggctgtgagggaaatatctgtttcaggtctctctccttgacctgtagatgtctatcttctccatgtgtctcttacatcatcttccctctatatgcatcctgtttgaatttcccctgtttatacagacaccagtcacattgaatcagaagcacaatttattccaatatgaccttatcttaccatcttgcatttaagtgaccctatttgaatatgagttcttggggacacaattcgacccataaccttggaatatctcgtagtgtatccatgcccattgataaacacaaatgagtaacaaaagcaaccacagttggacaatggtgtagtaagtaactagagggtaagacccatcaggcaggaagttctgagctacttcatcaggcaattatctaaactaacaggagtgctggccagtgatgaagggagtatagaactggcggaaactgatggagattatgaatctcagaagcaccctatt

SEQ ID NO: 1244243 - DNA, 4001 bp, Homo sapiens
taatcccttagctaataattattattgtagtttagctatttggctatgacaaactaatactagttgcacctcacttgaaaatatatgatagcaacttagtacatggtattgtacatatcttcacttggttaaacaacttttagaggatatgcttagtgatttatatttcaactctaaattgttagttttctttttttttattatactttaagttttagggtacatgtgcacattgtgcaggttagttacatatgtatacatgtgccatgctggtgcgctgcacccactaactcgtcatctagcgttaggtatatctcccaatgctatccctcccccctccccccaccccacaacagtccccaggtgtgatattcccctacctgtgtccatgtgatctcattgttcaattcccacctatgagtgagaacatgcagtgtttggttttttgttcttgcgatagtttactgagaatgatgatttccaatttcatccatgtccctacaaaggacatgaactcatcattttttatggccgcatagtattccatggtgtatatgtgccacattttcttaatccagtctatcattgttggacatttgggttggttccaagtctttgctattgtgaatagtgccacaataaacatgagtgtgcatgtgtctttatagcaacatgatttatactcctttgggtatatacccagtaatgggatggctgggtcaaatggtatttccagttctagatccctgaggaatcgccacactgacttccacaatggttgaactagtttacagtcccaccaacagtgtaaaagtgttcctatttctccacatcctctccagcacctgttgtttcctgactttttaatgattgccattctaactggtgtgagatggcatctcattgtggttttgatttgcatttctctgatggccagtgatgatgagagagcatgcttttatttgtcaaccaggcacctttatctcattgacattttatgattaccttcatgtgtttttgagttattatgatcccttcttaagagaaaagtaatcctaggttgacagagtttaaatgccatgtctaagatcataggtggcatgcagtacagtcagaattcagcctcaactctgtataattctcaagtccacagaatatactctacattgagctgcttctgtttaaattagtttaaatcacatcatgggatgcagcttattgaagacagtttttttgtgctggcagttatattccacagctttcatgttatatgtgttaggttcaaaaatgtctcttaaattcttctcctgtttctactatgagactgaattctggcttggataaaatctaattggagaatgccaatttaatgttttaattattagggtgtttgacaacatgtactcttcttgtgttgtgcagaaaatagacagaaatatacatataccattatattataacaaatgaaaagagatgagcatttttggtgcttttgaacactatgaagttttattgaggaacatcaaacaattccacatgaaaattgataccacagaaaacattaggaagaaacatctagaaggataccatttgaagatttatgtatattgaattagaataaagaattctaaaacatgtgatgtggaatttgactgtaaattcagattcaataggaataaaaacttctataaaagagaatacatactaataaaatattttccaaatcagtccatgcctctgttttcacgacatcaggaagtccacatgttctctgaatagatactctgtgcctgaactgaaggttgagagcaagaaggtgcacaaatccagagcagcttcactcagcagcaagaactgccgcagcagatggggtggaagcaggttgttctacagcaggtggtcgggcagctgaaagggcagcggcagctggacacacagcagctgggatgacagcaactagaaatgcagcaagccgggcggcagcaggagggctggcagcactggggcctgtagcagctggagatacagcagctggggcggcagcaggtggtctggcagcagctgggtttgcaacagctagagatacagcaggaaggcctgcagcaactagaaatgcagcagctggggcggcagcaggtggtcctgcagcagctgggtttgcagcagctggagatacagcaggaaggcctgcagcaactggaaatgcagcagctggggcggcagcaggtggtcctgcagcagctgggtttgcagcagctggagatacagcaggaaggcctgcagcaactggaaatgcagcagctggggcggcagcaggtggtcctgcagcaggtggtctggcagcagctggggcggcagcagctctcctggccgagaccttgaccacagctctggtcagagcagacagagccacagcaggagctgaccatggcgtcagagggtggaggttctgggtgggttcccaggagaatgaggttctggagtttagaagtctccttgagcctcttatatactgccccagtttcctgttgtcactatatttttcttgtttttgtttatttaattgctaaataattatcagattacacaataatgtttgtccatttaatggcttaaaatcattgggaagaaaatattcttgtccagatgtaataagatctataccatctacttttccttgattctcaccttgatggcatcttctagaccaaattatcttcctcttcctctacacagggctatcaggtgatactctgcatttgaaattacatttctcactctcttttcctgtacccagtaccagaatgagatttagtcagttacattaccaattattcatttattccattgaccaagggagaggaaagcccttctactcagtgtggcctctggcctgggacaagaagaaaatgtcctattttgagtgtcatttttgagcaatgaggaaaggtttaatggccacacacagacacctcctgctttattctgttcattcaagctttacagaagcacctggctcaaggtcctgccttgcttataaaacagaggcattaaatggataatctgagagacccaagttgccagccattgggattacaaatttgatgtagattctccttcaggggagttcacagcttgctagaaggaacacacacacacatacacacacacacacacagtattatactgtgataaagtaacatcaaaggagctcattatagtttaattaaaagaatcatacttaaaacaaattagcaaacatgacaatttggtggattaattcataaataaatattttaatttagtttgtgtctatttttatgatattgtaaaatttacatacactgaaatgaacaaatcccaaatgtactatttgatgagtttttataaatgggtacatccatgtaacctccacacctattaagatagagaatgatgtaatttggctgtgtccccacccaaatctcatcttgaattgtagctcccgtactccccatgtgtcatggtgtcgtggtgtcgtggtgtcatgggagggacccggtgggaggtaattgaatcaagggggctgatttttcccatgctgttctcataatagtgaataagcctcatgagatctgatggttttataaagaccagttcccctgcacatgctcttttgccttctgccatgtaagagatgcctttgctcctccttcaccttctgccatgattgtgaggcctcccctgccatgtggaactgcaagtcttttttagagactcacaattaaacctccttttctttataaattacccagtctctggtatttcttcatgcagtatgaaaatggatgaatacagagaacattttcattatactagaaagttcccaaatgtcacttcagtaaactcatcacttcatagaggcagccatatggggaaattattagcaatgttctaataatttttccaccataggttagttttgatttgaacattcaaacaaattatatatagcataattg

SEQ ID NO: 1244244 - DNA, 4001 bp, Homo sapiens
tactttgaacatttcctcaagaataaatattaatgaacataaagcatgtagtcactatctatcaaatagtaggcaacctagaacatattagttctttttttgtccagaaaacttaaaaaataattttaatattgaatataagaatatatttaaaataactaactagatcaactaaattctttctttactagttttattgaggtataattaacaaataaaaattgtgtatatgtaaggtataaaaggttatgttttgaggtatatatatatatacagtgtgaaataataatatatttattagctcacatagtcaccatttcctttttattgttgtggtgtgaacatttaagatccactttctcagcaaatttcaggtatacaataaagtattttaaactatgtccacattagagtgcaccagatctgcagaacatattcgtcttatataactgatgttggtcatgagaatgtgctagttctcctttaccccaccacccaacgactatcccagtcagcggcttttctctctttctggaatcttcagagcattccagatatacagtctcaaaagatggcatctgtattttttaaggaataacttaagttcattttgccttgccaatatgtattcaggagaagaaggaagccatataagaatggaaatgttatctgcaaatgttacctgcaaatacaggagattactcctccattgttgagtcaacttaagtgcatgtcttgcgaatgtagagtcccaatgtaatttttactttaatgagagttaaatataagtgctcttggacagaaagagaagacccaaccttaaatctgagtctgcatttttagctaaataacatcacacattaaaattttcctcagctggaaagtagaggtaataaaacatgaccatctgtttttataatcaaattaggtaacatgtatggtatggaatatgtgtgtaaatcccatatcaggaatgctgtaaaataaaaaaaaacaccatgtgagatgaaggacagctttgagtttattaagaaacatataggtaagagtccctgtttctagggagataacccaaaatgatcatgaaaggaataaggataaaagaaccacgaggaggacactgaaaatgaaaacatgattgtgaagattattgatcagttgcaaaacctaagtttcttagagaaagggaatgaagctcttgactttagagtcaagctgagaccatgactccaaattgaaaatacatgaaggtggcacatgatccacaaggtgtaaggaaaaaagaatcaggatgaagtactctaccctcactcaagctgattcacaaaatgttaaacatgcagagaagtcataaaaattagggtgagcaaagttcaccctaagttcactttgttggttttcatcacagtttgaaagtaaatttgtcccccagaaggtaaatcttttgccagagggttactgtatggggatgatggtcctctgcggaactgatcagcagcaagcaggctgacagcagctggtcacacaggtgggctggaagcaagtggtcctgcagcaggtagtctcacagcaggctgggcggcagcacggctggcagcagctggagccacagctctggtttaggcaaccaggcaggtagacactcgtggggtggtagcaggttctcctgcagtagatgggtgcacaggagctgggctggcagcagctggacccacagctggtttggccacagcagctggacccacagcagatgggctggcagcagggtgtgctgcagcaggaaggctggcagcagctggtcacacaggtgggctggcagcaggtggtcctgcagcaggtgttttgacagcaagttgggtggcagcaaggctggcagcagctggacacacagcaggagggctggcagcagggtgtgctgctgcaggtggtcacagtggtgggcttccagcaggtggtcctgcagcaggtaggctgacagcaaggggagcaacagtgggtcatggtgtcaggggtggagggtggacttctgttcagaggtgaatttcccaggatctgatgaccccttgccctctggaccttttatacaactggcctccaaagtttccaccaatcagcaggacttttccttgttgctgtttatgttgttttccacagtcattttggtattgtcaaaggggaagttgttttctaaaggttataaatcttttgaaagtaagggtttaatctgttgcttaattgtggattactcatagaaactatttcagataaaaggaagcccgtctcatcatcagcattgttcctgctctgaccatcttctggtgatgtgatagttcctggtgaccagggaggctcaggaagttctctctacccagcctcattctttggttgtatgtaggttggcaagtgtctgtggggagaatcatgattctgatatggtcacaaagacaaaatgaatccatgcctatgttcaagactgttcacccaccaaaatctgtttcaagactaacaggcatctctctctgtacaacccacaccacctgtgtctttcacctccatcaaagtcacttgggaaaagggtgattggtacagtgtgttctatgtgtcagagcagaaccagagcaggtgggtacgaggagaagtccagtgggatttagatagcatcaggcaatctttgccctgggttgaccattcattctgatttgtctgggagagaggggcttaccataatgaaaatgtgggactttgtgtaacataagtgctttagactcaggcaagccagcatgagctgtggctctagccctaactctggtagtagcatagtcagtgccatttcttttctctatctttctccatttctttttaatgaagaaattagatgagttgagatgatagctgattcgtcttggagttctaacatattaaaacattttttaggtataccattcatttcagaagaatgcaaattattaatttccaacttgttataactttgtaaataaagctatgtccccattaccaggttaggaaatagaaattaatcccattccctttaaattatattcctttactcatcccaaaaaaccactaatcactctatcaagttgcaaccctgtaggtcaatttggctattccttttttacttcgtgtgaataaaaattataatatttgcttctctatttcttttgcataatcagaggtaataattattgcctagtcattttgcactcttcatgtcagcagatcagaaggcagagaaaagagttcctttttggtgaggggtaattatcctgttttcatggcatgtaggagaatgtatctgtagctcaggagatttactgaacatactaatttactagcactgctgtgataaaccactacaaaccaagtggcttaaatttatattcttgcagttctgaaggctagcagtctggatttaaggtgttgccaaggttgttttcacctgaggactgttaggaaagcatctgttccaggtctctctccttgaagtgtggatgtctgtcttctccatgtgtctctaacatgaccatccttctagatgcacactgcctctgaacttacccattctatacaggcatcagtaatattgaatcagaagcctgattccaatatgactggatcttaagtaattacagtttcaatatccctatttgaatatgaattttgggggacacaagtcaagccataatattggagaatctcatagtgtgtccatgcccagtgataaccacaaatgagtgaaaacagcaatcgcagtggacaatggtacagtaactagcagctcagacctttctgtccattttcttcctctcctcccctccctccttttcctagaatttctggctatccatcacagttaagaagcaaagaataaatctgagtagagcaaatggcagatcatagataacgttttcattatcccatccatatattttggattttagtgtgctcaggccagtttctatcttccagaatctgcatct

SEQ ID NO: 1244245 - DNA, 4001 bp, Homo sapiens
aatgcagaaatcaaccatcttctgcgtcactcatgctgggagctgtagactggagctgttcccattcagccaccttggaacttccccctatcatgacttctatgaatgcagaagttctactttgctcctttcttacattatgttgatttccctgaaaacacaagtttttcgtttctttagatggttcatattatcctcaaaaactgcagaaggttgtttcattcccttccttctcatagagataatggattgtgccaagtcttacatgcccattgcacactttctcaattcccagctttgttcttacttaattttcctcataacgtctcaattatgggacaaattttcttaatgtggcataaggtacagtctgtgttttacaaggaataacttagtttcatttacttcgtcaataggtgttcaggagatggaggccatataacaattttatttacatgatatcgagaataagttccttcagatgagactctctcatgagtccacaatgaattctcaagcattttttgatgcagatgaattgaatgaatgactggtcagaggatgagacaaaaagagatccctgctttcagggcagccattaaatgcagtccctgctgccatatcatgcagctgttgctcactgaggtgtgggaaacttatttgggaaaacttttttgtgaacaaaaatgttatctgcaaatataagagatcattcctctcattgttaaataaactcaagtgcatgtcttgctagtgctgacttccaatgtcatttctactatgttgagagttaaatgtaagtgtccttgggcagaaagagaggacctcagcttggatcagaatctgtcctttattagctacataacatcacatattaattttttttcaggtgaaaaatgaaggtaataatgcatgaccacctgttttgagaatcaaattggataataactatggtatgtgatatgtgtgtaaatcccatatcaggagtgctttcaaataaaacaaaacactatatgagatgaggatggttcagaatttattcagaaacatataggtaaggatttctgctaccagggacacaacacaaatttatcatgaaaagaagaaagaaggatacaagaacgatgaggaggatattgaaaacaaaaaaaagattgcaaagatcatcgatcagttgcagaaacctaaattccttagaagcagggaatgaagctcttgactttagagtcaaagctgagaccatgactcaaacttgagaacagatgaagctggcacatgatccacaaggtgtaaggaaaaagagaatcaggatgaagtattctgccctccctcaagcagatttccaagattttaaacatgtagagaattcataaaaatttgggtgagagcatggtggctgtcagcagcaaattaaattagtcccccaaaagatgagtcagttgagcagaaatttgttgtgtgaggatggtggttctcttggaacgtgatcagcagcaagaaggctggcagcagctggacacacaggtgggctggaagcaagtggtcctgcagcaggtggtctcacagcaggctgggcggcagcagggctggcagcagttggagccacagctctggtttaggcaaccaggcaggcagacagtcgtggggtggtagcaggttcttctgcagtacacaggtgcacaggagctgctctgaccacagctggacccacagctggtttggccacagcaggtgggctgacagcagggtgtgctgcagcaggaaggctggcagcagctggtcacacagatgggctggcagcaggtgttttgacagcaagttgggcggcagcaaggctggcagcagctggacacacagcaggagggctggcagcagggtgtgctgctgcaggtggtcacagtggtgggcttccagcaggtggtcctgcagcacgtaggctgacagcaaggggaacaacagtgggtcatggtgtcaggggtagagggtggagttctgttcagaggtgagtttcccagaatctgatgaccccttgcattctggaccttttatacacctggcctccaaagtttccaccaatcagcaggacttttccttgttgctgtttatcttgttttccacagtccgtttgtgattctcaaagggtagttgtttccttaaggttaaacagattaaggtttaatctgtttcttaattgtgaattactcatagacactttgtttgagataaaaggaagcccgtctcatcatcagcatcattcctattctgaccatcatctagtcatgtgatagttcctgttgatctgggaggctcaggaagctctctggccagcctcatgtttggctgtatatagactgggaagtgtctgtggggagaagcatgatgctgatatatttacagtgacaaaatgaatccatgcctgggcccaaggctagtcacccaccaaattctgactcaagactaacaggcatctctctgtaccaccctcaccacctgtgcctttccgttatttgaacgtcacttgggaagagggtgtctgtcacagtgtgttccatgtggcagagcagatcgagagcagggggatgcagagaaattcactgggatttagacaacatcaagcaaactatgccctgagtgaccattcattctgacttgtctgtgagtgtggcgattccaggacgagaatgtaggactctctatgacataactgcttgagattcaggccaaccagcatgtgctctggctctagctgcaacccagttaccagcacagtaagcatcatgtcttctctctctatttctttttaatgaaggaattagatgagttgagatgatgcctgattcatcatggagttctaacatgtttaaaacattttctaggtataccattcatttgagaaaatgcaaactattaattttcaacttgatatagtattatattgtaaatacatttatgtcccattacatctatgttaggaaatagaaattaattccattctctcccaattatatgctcttactctttcccaaagacagctaatcactctatcagttgtaatcctgtaggtaacttttggctttttaaaattttcatgtgaataaaaagtatagtatttgcttctctatttctttggcataaacaaaagtaatctttatcgcctagtcattttggactcttcatataagcaaagcagcagacagagaaagtagttactatttggtgagggataattaccctcaagccatatagtgtagcagaatatatctatagctcaggagatttactgagtatattaatttactagcactgccctgatgaattactgaaaaaaagtggcttaaatttatttatcaaagttctgaaggcctcttttctgaaattaaggtgttggcaatgttgttttcatctgaagactgcgagggaagtatctgttccaggtctccctccctgacgtgtcgaagtctatcatctccaagtgtgtttgacataatttttctattatatccatactgtctctgaatttctcccttgtgaatagacacagtcatatttaatcagaggcctaattgtttccaatatgaccttgtcttatcagataacattttagatggttctatttgtatatggattttgagggacgcaaatgaacccataacactgcagaatctcatagtgtgtccatgcccagtgataaccacaaatgaataaaaacagcaatcacggtggacaatggtatagtaaccaggggctcagacccttcaggaaggatgctctgagctactctatcagcagttatctagaccaaaaagagtgctggccaggggtgaagggagaatagaactcttggtaattaacggagtttatgaaacttaggtgcactgtattatagcagaagtaagtgtagattatttaattggccttcattttatatctcacttcctctcctttcttttcctttccttcttctttctttctttcttttccttccttccttcctttttctc

SEQ ID NO: 1244246 - DNA, 4001 bp, Homo sapiens
ttgggtatatacccaaatgcatataaattgttctaccataaagacacatgcatgcgtatgttcattgcagcactactcacaatagcaaagacatagagtcaacttaaaatgtacatcaaaagtagactggataaagaaaatgtgtttcatatacaccatggaatactatacagaaaaaaaaggaaaaaaagaacaagatgatgtcctttgcagcaacacagatggagccggaggccattatcccaagggaactaacacaggaacagaaaaccaaataacacatgttctcacataagagtgggggccaaacattgaatacatatgaacacaaagaagggaacaacagacactggaacttacctgtgggtggactgtgggaggagaatgagaatcaaaaaactgcctatcaggtattatgcttattacctgggtgaagaactaatctgtacaccaaaccctgcaacacacaatttaactataaaataacccggcacacgtacccctgaaccttaaaaaaaggttaaaaaatttctttgatgcacgtgaattgaatgattggctggtataggccaataggatccctgcattcatgacagctgctaaatgcagaccctgctgctgtatcatgtagctgttgctcactgacggctgggcaattaatttgggaagacttttgtgaactgaaatgttatctcttgccaaatactagagattattatttccattgttaaataaactcaagtgcataacttgctagtgctgaatcccaatgtcattactactttattgagagttaaatgtaagtgtctttggacagaaagagaagacgcaaccttgcatcagagtctgtccactattagctacataacatcacacattaaaactttcccagttggaaaatggaggcaataatacatgactgtctgttttgagaatcaaattgggtaatacatatggtatgtgatatatgtgtaaatcccatatcaggaatgttttcaaataaaacaaatcaccatatggtatgaataatagttccaaatttatttattaagaaatatataggtaagatccctggttatagggagataacccaaagtgatcattaaaagaaggaagcaggatacaagaatcatgagtatattgaaaagaaaacatagttgtgaagattcttaatcatttgcagcaacttaagtttcttaagtgaagagaatgaagctcttgacttttgagtcaaagctgagaccatgactcaaaattgagaacacatgaagctggcacatgattcacaaggtataagaaaaagagaatcaggatgaagtattctgccctccctcaagctgattcacaagattttaaatatgcagagaattcataaaaatttgggtgagaacatggttgctgtcagcagtaaggtaaattagtcctccaaaagataagtcagttgagcagaaggttgttgtgtgaagatggttgttctcttgggacttgatcagcagcaagaaggctggcagcagctggacacacaggtgggctggaagcaagtggtcctgcagcaggtggtctcacagcaggcggggcggcagcagggctggcagcagctggatccacagctctggttgaggcaaccaggcaggcagacagtcgtcgggtagtagcaggttcttctgcagtacacaggtgcacaggagctgctctggccacagctggacccacagctggtttggccacagcagctggacccacagcagatgggctggcagcaggttgtgctgcagcaggaaggctggcagcagctggtcagacaggtgggctggcagcaggtggtcctgcagcaggtgttttgacagcaagctgggcggcagcaaggctggcagcagctagacacacagcaggagggctggcagcagggtgtgctgctgcaggtggtcacagtggtgggcttccagcaggtggtcctgcagcaggtaggctgacagcaaggggagcaacagtgggtcatggtgtcaggggtggagggtgggtttctgttcagaggtgagtttcccagaatctgatgaccccttgcaatctggaccttttatacacctggcttccaaagtttccaccaatcagcaggacttttccttgtttctgtttacactgttttccacagtccctttgggattgtcaaaggggaaattgtttctgaaaacttatgaatcttttgaaagtaagggtttaatctgtttcttaattgtgaattactcatagaaacttcctttcagataaaaggaagcccatctcatcatcagcatcattcctgctctgaccatcatctagtcatgtgatagttcttggtgatctgggaagctcaggaaattctctctgcccagcctcacagttggctgtatgtagactgggaagtgtctgtggggagaagcatgatgctgatatatttacggtgacaaaatgaatccatgcctgggcccaagacaattcacccaccaaattctgactcaagactaacaggcatctctgtgcaatcctcaccacctgtgtctttcagttatttgaacgtcacttgggaagagggtgtctgtcacagtgtgttccatgtggcagagccgatcgagagcaggtggatgcagagaaatccactgggatttagacagcatcaagcaatctacgcccaggggtgagcattcattctcacttgtctgcgagtgtggggattaccgggatgagaatgtagaactttctatgacataactgcttgagattcaggccaacgtgcataagctgtggctctagccataaccctggttactagcacagtcagtatcatttcttctctttctttcttagacggagtctttctctgtcgcctagactggagtgcagtggcgtgatctcggctcactgcaacgtctgattcctcgattcaggggattcacctgcctcagcctcccgagtagctgccactacagatgccggccaccatgcccggctaatttttgtatttttagtagagagagggtttcaccatatttgtcaggctggtctcgaactcctgaccttgtgagctgcctgcctcggcctcccaaagtgctgatattacaggcatgagccaccatccacagcctctccttctatttaatgaattaattagatgagttgagatgacacctgattcatcgtggagttctaacatgtttaaaacattttctaggaattaccattcatttcagaggaatgcaaattattaatttccaacttgatacattattatattgtaaatacatctatgtccccattacatctatgttagaaaatagaaattaatcccattctctcccaattatatcctcttactcattcccaaagacagctaatcactctgtcaagttgtaatcctatagctaacttttggctttaaaaaatattcatgtaaataaaaattacagtatttgcttctctatttctttagcataatcaaaagtaatcgttattgcatagtcactttggactcttcatgtcaggagagcagcagacagagaaaggagttactatttggtgaggggtaattatcctcaagccacatagtgtaggagaatgtatctatagctcaggtgatttactgagtatattaacttactagcagtgccatggtaaattactgcaaaccaagtggcttaaatttattttttcacagttccaaaggcctctagtctggaattaagctgttggcaatgttgttttcatctgaagcctgcgagggaagtatctgttccaggtctctctccttgacttgtagatgtctatcatttccatgtgtgtttgacataagttttctactatatgcatactgtctctgaatttcccccttgtgtatagatatcagtcatatttaatcagaagcctaattgtttccaatatgaccttttcttatcacataacattttaaatgattctatttgaacatgaattttggaggacacaaattaacccataacactgcagaa

SEQ ID NO: 1244247 - DNA, 4001 bp, Homo sapiens
ggctgtacacaggtattgtgagtaaacgaggtctttggcttttggtttctctttttctttttttaactacttcctaaaactctcaaaattgtcaaagatgcagctggaagagtggcctggggttttgtctcaaatgttcacctctcctcataagccaccaggccaaccacacaaaaaaagcttcctgtcccctaaaaagacaagtttccattcgttgatggattcttccttgttctgttctgtcccctgtgccacggtgagtcatggccaccacagggactctccccagggactcgtcaccttctttctcctaaaatgtaccaccagtatttaaaataccgctgtgcctatcaccatcacacccaagcactacctgctatgttgcctttgtagctagaacccttccaagcagaggcaaaattatttgaggtgatcagataaagtcctctgcctgcctgctgcccaaaccccagccctacaggctgctcctcacaaggatgcccctctcccaccttcctgctcagccagaagcccccacctcttgctttgcagcctcctttctgcgaatggccacctgttaatccagatccccacgctctgttacttcatcctgtctccaactgtgagggactcccattccaatgatgcgaaaaacgagactgccaaatccatttccacccagcattacttcttctaaaatgctaagcatcaccaaagccttgtattatctctttctgccctgaacaagacccaagatcaagcaaatttctaaagagggcaatgaaatgaacacaaatggaaattcagacaattcagctccaccagttactgtgtgactttgggccttatttcatcacctacatgggctcataaagttatcattactgagaaattaactgagagaactgctgtcagaatcttgctgccttaaacctgggtactagctgggcatggtggcatacacctgtggtcccagctatctgggaggctgaaggtgagccagagaggtagacagaggctgcagtgagccatgatggtgccatggaactccagcctaggaaacactgcgagaccctgtctcaaaaaacctgggcaggtccacttcacattagccataactgtgggaggaagggatagggccctgagttattactgatacattcccaggattctggccttccattccattttttttttattttcattttgagatggagtctcgctctgttgcctaggctagagtgcagtgacatgatctcagctcactgcaacctccgtctcccaggttcaagcaattctcctgcctcagcctcctgagtagctgggattacaggcacccaccgccatgcccggctaatttttgtacttttagtagagacggggtttgaccatgttggccaggctggtcacctgacctcaggtaatcggcccacctcggcctcccaaagtgctgggattacaggcatgagccacggggcccagcccacttcccatttatttaatagcaacaagcttacatgcaaggaacccaaggtgctggttaaccctggtcaaaggaggcccctaattcaatgacatcagagccccccggggcttatgagtcattcagcctcctccaaacgaaatggtgccaacatcttccaccaggctatttccaggcactctcatgaggtccacacctcgctatgtgagtacactctagactcccagaagcatctgctcaatctcataaccccttctttgccccatcctacgggaagaaacccatgaggagcacaatgtccccaaatctacattcccaaccagagccacaaatcagagtccgcagtcaggggagaaagggtcagggcaggcagctcagtaagaagggggtttcccatggctgtctcttggtcttgtttcccataactgggagcctagacactcatacctagtatcagcagccccacatctgagctggcaacctcaagtctgaggaccccttccctggcaggggtccaggtgcccccaagcaggccgggactgccaggctttacatcagagaactgagtttcagttaccacggtgaaggctgacagcacagagcacagttccgtgcaaatcaagacacatttcccaagtccctacacacctcagtacagagatgagtcagctgcgcggcctgatgagccttcattcacacctcaccagcaccttctatgagtttactcatccacaaactcccccactaagctggctttctggagcacaatacatctctcattcactcttatattccagaacagtgcctggcacgaaacccggccaggagggcggagggggaagtaggaggacacctgtttgctgagttggtgcattaattctctcctgcggcccagcactgaaaaaacagccccatgcccctgcttacctccttgaccccaaggccaaccatcctcccctgacactgtgttccaggcacaccagcctcctcctggcccttgaccacaccaagctcgattctgcctcagggctcttgcacaagccagtccctctgccgggaacactcctccaggctacagtggccttctcatctttcaagactcagctcaaaagtcaccctctctgggaaggcctttcccgatcaccccatctaaagaagtcacctcttccatacccccacctctctctaacccacttccagttttcttctgagagcacgtctgtctgtttggcatgtgtattatctttctctttccactgaaggaagccctctattttcttccttgctccttcctcagtgcctaaaacagtgcctaaaacaaacctgatattgagcagatgctcaataaatcgtcactggagtgggcccggcacggtggctcacgcctttacagcactttgggaggccaaggtagggagatcacttgaggccaggagtttgagaccagcctggccaacatggcaaaacctgtctttactaaaagtacaataattagctgggtgtagtgtgcgtgcctgtgctcccagctactcaggaggctgaggcacaagaatcgcttgaacccgggaggcagaggttgcagtgacccaagattgtgccactgcactccagcctgggggacagggtgagtctctgtctgaaatttaaaaaaaaaaaagtcactgaatgaatgcacagaagagagaaatagcaaattcaagataaggaatatctaacaaggtcaaaaaatggggagaataaaggagagaagaagaaaggtacaaaggtcagaaagaattgtaaaaaatatgagatacttacccaggagtacaatttttaaaacagctatcattcaacaggagttaaatggaggggctaggtgtggtggctcacgcctgtactcccagtactttgggaggctgtggtgggcagatcacctgaggtcaggaatttgagatcagcctggccaatatggtgaaaccctgtctctactaaaaatacaaaacttaggcctggcgcagtggctcacacctgtaatcccagcactttgggaggccgaggtgggtggatcacgaggtcaggggtttgagatcagcctgaccaacatggtgaaaccctgtctctactaaaaatataaaaattagctgggcgtggtggcgggcacgtgtaatcccagctactcaggaggctgaggcaggagaattgcttgaacccgggaagcagaggttgcagtgagccgagatcgcaccactgcactccagcctgggccacagagcgagagtctgtctcaaaaaaaaaaaaaaaaaaacacaaacaaaaacaaaacttagctgggcatggtggtgtgcacctgtaatcccagctactcaggagggtgagacagaaggatcacttgaatctggaaggtgcaggctgcagtgaactgagatcacaccactgcactctagtctgggcaacagagcgatactccgcctcaaaaaaaaaaaaatgggagaacagtttggcaagtcttaacacacacacacacacacacacacac

SEQ ID NO: 1244248 - DNA, 4001 bp, Homo sapiens
caacagcggctggcatggtcatggggagatcaacaactttcctcgtgcccacaatataccccctcctctcctcctgcccagtcaagcccaggaccaggaggaacagtgacacagcagcggccccatatgcccacactccccaagagcaagttcaaatatctttcagaacctccaaccccacctcctcacgctgactcagaggccaaaggtcactgaggaagctcacacaccaagggggaggggagagataaggtgtccaataaactatcctctcctgaacaaaacctggctccaggtcagtaatgaacttggccccagggctctatacccctctttcatctagtgttcccacccttgcacctctcttccatccagtcctcccagccctcccagttcagatggaaaggacagaatacttggacttggagccagctttgggtggtggatgaaagacgcggtgaggaagggcacaaaatcacagaggcctcccctccagactggggaggggatgcagaggggcaggttttaccttaggatcttacggagcttacaagagaacaggatcctaccctaaactgtacgggaaacacccagttctactctccaacccccctccaaaagtctaatggcaaccagatgaacaagtccagcattggggagacagggcccccaggggacactgaatctccacaaggccaccctcccctccccccaatacctccccctttcctcggcttccccagaactcagccaaccccaccctccattggagaaacctgctttgaaaagttagctctttgttcttccacacggtctcctggctctgagcacaatttcaggagatctcagctaagcaccctccacccaccctactctgccacccaaccccacccggctcaggctggacggcccagcaccgggagttggcttttaattggaggtgggggttgggaagctgtggaggaggtctgcgagtcctttaacgactgaatccaagggggtgcaggtcgttcaaaaacggggctcttgcggcagagcccgggtccttacccaaaaccccccgcatcagatgccacacactcgcaggctgatagcccccgccccgccaggccaggaagccaggccacccccgccggagcggacggttttgcagggccccccagcctctgccccgcccccccgccccctccaccagcgccccgcgcttccgcctacttggcgctcggcgcagagcggagagggagcggccgtctcttctcactctccaggccgtagggggcgggactgcacccctaaccttcccccaacacaccccggcgcctgacttccctgctcctctcccgtcctcccaaccccgggacacagagcccacccctctccagcagcggctgcccgctacgcgtggacttcccgcctcgccccagatctcctggttttcagactgggatgtgtccccacaccccatgacaccgcccgctcgccctccctccattctcctgggatcgcggggataaggcggcaaagacccggcccttctctcctccctggattcggagcactgcgggggattgcaaagacgcgtctcccggtcccgggctcaccttatccagacagttcaccttctccgtgggatacacgatcttgccgcaccgggcgcagttggggttcatggttccgagaaaagctggggcggggacgcctgagctcacgcgcgtcctgttccccgaggcgagctggcgggaggcggccgcggctgcaactacacaggcagcagcgacggcggctggagctggggaactggcctccgcctccgccctccttcccctaataaacacagcggggaggaggggctgcactggggcgggcacgcgcctcgggcgcgggcaagggcacgcgcagcgaggcgcgctctccgggcgacgtggggctgcgcgggggcgggttcctggggggacggcggggcccgcggtgctggcgcctcagcgctctcaggctgactgcgcccggtgcccagggcccttccccagccggaggcggcgcagaggcgagcaggctgcacatctggggcgcccgggctgcgggaggcgggctaacccctcaagcccgtcgagggtggggttggatcctcctgaacgctggaactgattcaccgcattcggggactttctacccggcatgaatctgcggaccgaacggggaccccctaccctgcccctcttagctctcttccggcccacaccctttcccacatttgtggggcggaacccgtccctccctcttggaccctgcgcgctgccgggcccgggctagtgcttccctctcgagcccctgcagtgcaccttcccggggttccccggatgcgggcaccgtctgcgttcagcttgacccctttttctccagcattcctttctccttctgttacaccactactcacagtgtagcagctgcaacaatgcttagcacccaaggagccgcctccaggcgctgtagaggcgcgggggtatagctcagtggtagagcatttgactgcagatcaagaggtccctggttcaaatccgggtgccccctcaatggcttggtttttccttccccttgttaaccatctgtttttcattcttgactcacattttaacattgggtcctgactaaaaaaaaaaaaaaaaagaaaagaaaaagtatcttcctcatttttcaaccttagcagaaatctttcggttttactttgtgctcagcgggaggagggggtgggtataaaagctgcgcgaccgcattactcgcgccagaggtgtagggatttctgcggccacgggcgccagcctcagatgggtcagacagttcgaggtgccgggtttgagggacaggatgtttccaatgggggtagggagacaggggaacgcctcaacttggcgttccttttgggggtggagggtgggtcaggcgagggaaacccatagacacagcccttctccaacttcaactttctgtattaatggtgacatggacgtgctgtgttcatccttgactattaatgtacaaaagtaaagttataacccagtgcaaactgagataaacgaacacagtgtttctcaaatttgaacgtgcatcagaattacctgcagggcttgttaaaacactgctagtttctgattctgtaagggggccccgagaatttgcatttctaccaagtttccaggtgcctctggtgctgctggtgtggggaccacattttaagaaccactgaagtaagaataaaaggccatggagtttcataacctaaagatggggacaagtatctgctggctgcgtgcctgacagggtcactgttgggccggaggaaaatggtaagtgtgacgggagacaagggcgtccccctcgactaggttttgcccaaaaaaaggaaaaataaaggagaaaggaagaggcgtgctgcctgggtcaaagggcagctgcgatattttaaacccggaatgtggttgtgtcattcctcggaccccggggaaacgcgcatttttttctcctggctcctattactgtgagctgtatctctaggctgaacagagagatcacagatcagcagagctgcggttccgtgcaaaacccaggaggaaccagttttacctctcctttaggccttgaactttccatgtatagcttatcaagccaaagccctgcctatgagctgagtcaagaaggaagaggggaaaattgctcgctgtctaccttctatctgtgtgccctgtcctgttcgagttcgcgagtatatgaaaacctctgaatttggattacttctcctagttttcatagtcaagtacgaactactgccccgtccaagacatattttttaccccaaaacaaattataattaacgttaaaccaatgggcatcggagatggaaatcgatacgcgcctttgttctccaactgagagtactggtgcgcttatcgccacttggggtatgagggctcagatccacctaaaggcagcctctggttgctgttctc

SEQ ID NO: 1244249 - DNA, 4001 bp, Homo sapiens
gtctcgccctgtcgaccaggctggagtgcagtggcgcgatctgggctcaatgcaacctccgcctcccaggttcaagcgattctcctgcctcagcctcccgagtagctgggattacaggtgcccgccaccacgaccagctaatttttgtactttcagtagagacggggtttcaccatgttggtcaggctggtcttgaactcctgacctcgtgatctgcctgcctcggcctcccagagtgctgagattacaggtgtgagccaccacacctggccaagtacagtcctttctgcccctgctcgagggaccccagggttagagatcccaagactaggtgtaatttctggttatcaactgctttctgcacacatctgctgggttacttctcaccgctgcacctttgcatctgcactgccctctgcctggaaggcctatgaacccaagcttcccaaaccctttagggatgtcactgcctctactcactgatccagccccttggacactcccagctggggcccctgcacccagcgtctttctcaacagacaaggccttcctcccggctggctcctccgcattcgcagtgctccacgtgcatgaaggggacatctgccttaccgggccctgtgggtgagaggaccgcccaccgtggtctgggtggcagatacctgctatggccgggtagaagtccttgaagtccacctgctcatgggccccttcacagccggccaggcaccgggcaaagactgccaggtactctgacaaggcccgctccatgtcctccgtgctgctgcggaaatccccgctgttgtagagcttcacagcccggaggaacacggcctggaaggggcgtggcagggggagtcagggcgcccccaacatctcccctcctctactagccctcctctacaagcctcctcctgaccctccaccccacctcgtagggctgggcctctaggtccgtgagggactcgtcggcgacgtccagcatcccctgatagtagttgagatacttggcggtcagctcgtgcttcgggttcctctggaggaaggtgtaggccgccgccaccgccttctccagccggttagcctggtcggggggtagggggtgggggagcgggtcagcaagaccggagctcgcggccccgagcgcacggcgggcttcgtgccttgggtgaagataacgctccttcgaccgatctgtggggagccacgacgcccagcccgagacaggtccccgggtgggggcgggctcccaccttgaacagcgcgtagtgcaggtactggtagggcaggcggctctggaagtcacgcagcagctgccgcggcgggtagggcacctggaaggcgggcagcgtccgcttgcagcgccgcaggcaggcggctcgctccaggacgcggccgaagagccgcagctcgcaggcccactcgtctgcgcggccgccgtcgggatcgggcttggccgcgggcgcggggccgctgcagttggcgtggcagaaggcctcgctgtcgcgcaggagccggtgcagccgcagcgccgcctccaggtagcgcgcgctctcgcgccagctctctccctcgtactgctccagagcgtgcccgtacgccgcggccagcggcatcaggtcctcgggcgggaagccccggaagctgtacttctcgtactgcgccccggcgctgcccagcagcaaccacagcagcccccacgccacccgagccatgcccgccgcgccgccggctctccggagctgagctggctgccccgcggacggaaggggacagggccgggccccgggcgggcggcgcgcccgctgggtcttagcgccgggcacgaggcggcaaggtggggcggggcctgggtcacgacgtctcccctcttttcccagagggtccgatagtgtcgttaagtcctctccgtcggcccgggctcctgccttgggggtgtcccctaggtagagaatgcgtcggggagcgcttcccgccagagatgggaagcccaggaagcccctccccatgcaaacagtgcccccgcctgagatcaggacactgagtgagggccgcctcctctgcgctgcccatacgagaaggaagccctggagccgggccttccgtcgctgcgccctcctgcaccctccgagtgtctcccccgcccacgtcggaggcacacacctgctgtcacctgcacaccttgcgctgccaccaccccccactccatctccgtgcccgtcacatcccaagtcacaaagtccttctttcagtccagcttttgcgggaccaagctgctcttccctggagatgccttcccttggagtacagctggggtcacggatgagcacggagatgcctctcacactccgcggcttcaccacccacctggaggggactagaattcgaagtgcccgcgaaagaagcaaggttcatctccgcccggctttaggacccgggggctccggaaaaagtcattgaacttttttttttttttttcctttggtgtccactcagagttctcatctttcccgagcctctctccctggccaggccccaggtctcgcagccagggatggagatggggggagggggaacctagagttctttgtagtgcctccctcagactctaacacactcagcctggccccctcctcctattgcaaccccctcccccgctcctcccggccaggccagctcagtcttcccagcccccattccacgtggaccagccagggcgggggtagggaaagaggacaggaagagggggagccagttctgggaggcggggggaaggaggttggtggcgactccctcgctcgccctcactgccggcggtcccaactccaggcaccatgttccccgcgggcccccccagccacagcctcctccggctccccctgctgcagttgctgctactggtggtgcaggccgtggggagggggctgggccgcgccagcccggccgggggccccctggaagatgtggtcatcgagaggtaccacatccccagggcctgtccccgggaagtgcagatgggggattttgtgcgctaccactacaacggcacttttgaagatggcaagaagtttgattcaaggtaaccccggttgggcgcccccggattcaccactccgtcccctgaacccggggtcctgtttccttgttgcctcttttaagctctgcatcccaatactctaaccctagacagcacccctggggcctcccagacacccatctccccaaagataccctcctgcccccacttccaaaccctcacttctcaaaggatcccatttctttctcacaagctctccacatcccggaaaggactcgataatcaaggtgaactgccttgtgtagttaccagggctgtatgtaatgacctgatggagaggggtgttctgatctacagtgttggggggaagggggtggtccctgctgcttaagaaccctgggatggtctatcagcctggaccccgtacctttccacccaccctgactccccttctggttccactgttttcagtgcctttgtggtcagagaagagggaatagaacttttttttggagggggtgggagttttcagcggctggtgggcagggaaaaaggctggtgggtattataagaagacagccggctggacctgggggtagcgcgtggctccctgcggaggccctgtctacgtgtcacacagtcggacatgccaccctgggctccttggaggaatttcattcctccctctctggttctcctggaaccctcatctctctccattttaggtacaccaggccagaggcacaggccgcccatttttgccagccttggggtttgtaaggtggcctcctggtctgacccaggcctttggtctgccccagcaagtccacttttgttagcggggacagggcagggctgtatgccagcctcaggggtaaatctagggtcccagttacacacagaccccacagcacactgaaagaagtcagtgtttcttagaccctcctctgaaacacacaactc

SEQ ID NO: 1244250 - DNA, 4001 bp, Homo sapiens
taatttccacgcttttgtcttcgtctgcctccctcccccacaccctgccaatggagagacagttatggtttctctggctcggtaagaatcctgtgatacctgacactgtcccctcagttcagcaagcctggggcaggcctctgggtggcactgctgtgggcaccggctgggagtctgggcctggtgaccttgaggctgcttggagggggcctggtggacggctgcaatggcatccccagagcttgtcggaaatgcagtcatggctggccttgccctagcccctctgcatgggagtctgcatgaacaagcgccctgggagctgggtgcactggctggtgagcagctttgctctgggactcgtgctcgctggcactgtgcagccaccccttgtcggggctccccgggcaccactggaggccttaccgtgaccctgagaaccaccttagttacacctcaccttacaagtgaatgagctgacacccagagaggcaaatgggctccacatccacagtcagtgagccacaggcagggggtctgctcgggggagcccacctctcctccctgtgtcaatgtcagtagatggctaaaggggccagggtgtgaccgcctgtcctgtgtgctggggactgtgctggttttagcactgaagtttccctgtgtcctgggaaacccctcagtcccaggcacgccggtatgggtggacgccctctccacttctgcccccagccacttcactctgctgcagccactaggtttgtccgtcctgggagagtaactcagggccttggaaaaatggccaactggccaggcgcgatggctcacgcctgtaatcccagaactttgggaggctggggcaggtggatcacttgaggtcaggagttcaagaccagcctggccaacatggtgaaaccccggctctactaaaaatacaaaataataataataataagctgggcatggtggtgtgcacctgtagtcccagctactcaggaggctgaggcaacagaattgcttgaatccggcaggcagagattgtagtgagccgctgcactccagcctgggtgacagagcaagactctgtctcaaaaaaaaaaggggggggggcaacgaagcacctggcaggtggcgtcgctgccctttgtgtggcagcggctatttttgcctgattccttcatacagttgagacccggctgcctgtgttggccccttcgtgcaaatcagaaaaaaaggtgctcttccttggagtgggtgcaggcctaggccaaatgcacaggtctgagagagggccaagctgaattctaacccacttgccctttggctggtatccttgtgcagtgagtaatctgcccaactgtacacagaggccctgtgggcctgggagcagcaatgattgttgctggactcaggagccctggatccccagctccaggcctatgtgcaaacagggaggcatgacccccacttgcctgtgtagagagaggggtgccctggccgggcgcggtggctcacacctgtaatccctacactttgggaggccgaggcgggtggatcaccagaggtcaggagtttgagaccagcctggccaagatggcgaaaccctgtctctactaaaaatacaaaaattagctgggcgtggtggcacgcgcctgtaatcccagctacttgggaggccgaggcaggagaatcgtttgaacccaggaggcagaggctgcagtgagcggacattgcatcactgtactccagcctgggtgacagagtgagaccctgtctcaaaaaaaataaaaataaaaaagagagagagactgagaggggtgcccacctgagagctagaggcaggagcttacctggctgcggtagctgcaacggccgtgtggagcctcctcgcttccagccacaggatccctctgcagactggtcctttgacccagaagcctctcccagtatggagcgtggtcaggctgatcccaggaaatgcttcagaaaagagtctactttcgatttccagaaaccacctgacatagatgtcttccgggattggctgctgctgatactccccagggcccctctcttttgtctcagctctgcctgtggctatcagtgccaggctggcagaggcccaaggtgggagtctggctggagcaaggcctgcaagaggactaacagccacactcagttggaaaggccgccaggctggtcaggggctggcgtttggtggacgggaggggaagaagcagaggctctgggcccagacagtctgcacctggtggtgtggctgtggactctgacagagcgctccgagtcttttcctgggtctagcacgttgctggctgggtgaacaccacacagggggctgcttatgtgcaaatccaccctctctgtgctcttggcatgctgaccacacagagggcctgtgccccacaaggttgcatggcactgtcccctgtccccaggggagggaggcactgagaaccaggtatgcagctggccagtggaggagctggaccctgctccaacacctgaccccagagcctgtgctcgccactgctggacctgtggccactctcctactgtctccccctcagcggggcgggggacagagcctctctgggtgacataatggctctgtccagctcatacccattccctttcctcccactgaaagccggcacctcaactgtcccttggggagcaccccctcccattcccggctgtgtggttcccagagggcccccagctcttggccttcaaccacccaaggcctggctgtctgagccctgcgggggccccgggccacactgctggtttcagggtggggctgtgagcccagccagccggtgagagccagcttctgactgagaggatgtgggcccaggctgctggggccggtggggcagagcagagggaagcaggcatcctccggcctgagctcctgggtccagctggcctaatccatggtcaaggctgggcttcaccgctcagtgaggcaatcagcagccgctcttgtttctgtcacttgcaccccatggttctggatgagccttgggatgtgcccaggcctctgaccagtggttctcagcctgggctggacagaagaatcatcagggagttttacaaactcctaatgcctagacccaggaagtcaccatctctgggagtaggggacaggcaggggcatttaaaagcccccaggcagtcccactgggtggaaggccctggttccctggcagcttagagtccgagacagccagcccagaggtcagacattcaatgactatttccttcaaggtgtgaggttttaggcagctgcacggtttgcctaatcccctccagaggaactgtgaagatccaggggcaggtgcagctggaaatagaactggctgtggggagtttaaaaaaatctcatctggattaagggcctgagtgcacagaaaccccagcatcatcccttctcagcagtgctaatgacttctgcccaagtggccagggaaggacaggagtgcagaggacgggagggcatctctgggaagtgctgggaaaggttttaaaactcaggtgccgaatctttagccccagagtccgggaaagtcctaagccatccaggcaggtaaaatggaaaacccagaggcctcctcgtggaatcggagcaccaacatctgctcccctggggctcgcaaggcctttccggtgtgcgatgaccatggggtggagggaagcgctgacaggggacaggcaggggaaggggcagcggctcggctctgagaagacagctgggtgaaagcctcagattcgtgtggacagaactgctgtcatcaggaagccgctcccaagacatggtagggaaagtgcggggcatttcagagatgagaatggttaactggcctgtaaggtcatcttttgtgcctctaccccaaacctctccgcaaattgaggaacgctccctataatagctaatatggatttcgccaggcattactataagccttgccacaaatgaatgcatt

SEQ ID NO: 1244251 - DNA, 4001 bp, Homo sapiens
cagcacccacgcttctaaccaccacacaggcttcctctcatgagtaagctgagaacatccttattcctggctctcccagtgcttcctggaccacacagcacgtggttccagcttcccccaggccctccaaagaggctgggctagatgaggccagacaagaagtgggagtgaggtttccaagccaggccctcatggcactcagccctcctcagcaggacagcgaaccgcgtgaccttcccccactgtcggcatgtggaggaagcgtggctccgactgccagatgggtcaccaagtgaggcttaattgtcccaacccaggggagcccccgtggggtagaggggtactctggacacccataggggctgcactgatcatctttcttgtctggactccaaggccctgttttaactctctgatgtccgtaggataattttccttctgaatccaaggattagaaagtaaaaaccagtcaccagaataataatatgtcagaacctggaagaagctctgggatcccctctttgacagaaaaccagagacagggtgacatgcccaaggcagcacctgctgaccctaaggcccccaccagcggcctgttccagcttcccccagccccctctgtgcaggtcctacctcaggggcctccacagggtggctgaggtgtcattggtgacagccaggaggaaacaggcctcctttccccattctttctctctggagtttagaaagcagagccgagctctgcagaccagaacgtaggcagcctcattctggactcagtgtcaccagggggcactcaagcccgaccctggcctctgctgaggtgggccatggcagcttccctccctcagtaccctgcctctgcccaccctccccaccctgcctccccacccaggaaggacccatcagcccaccctctccagcccctcgggaagctctttgccaaggcggggtgagatcctatgacaggagccggcccaggacacagtgacccctgaagtctcctgggctcctggggctgccactcccatctggaggcatttggcaactggcctctgcctccctgagcctcagattttccgtgtatgaaggggactcataaacctcacagggtttcagcaaggcacctgccgccctctgaccccacgctgcagggacagtcctcacccccctctcacctctgagactgcccctccacagatgccctgaacatgcccatgcccaaccttcagagcacagacacctcctcgggaggtcttccctgctgccctcagacacccaataacatgaaacactcccaaagcacctacagtgtgtcaggcactgttcaaacacactagatacactacttccttaatccatatcccaaccctgggagtggggggctcaagtattattcccacttcacagatatggaaactgaggcccagagaccaccagccagtaaatagctggacccagggaggccaccttcacagtaagcacccttaactaccatgccgggtagcgtccttactgtcccagaagcgtgcttgcttcctctttacatgaaccaccccgctctacatgtcttcccctgagcacacaggacaggacaggacaggacagctcagtcaacactgtcaaagccatgactcgtgggaaggagcatccctccaggcatgagtgagctcagcacggcacaggtgtgccaggatgacctcctctgatatttctgccctgcttgtgttctctttgggatgcccccacccccatcccctgccacccaggagttgcttcctcagagccccagagctgtgtccctctggctgaggcagccctgtgcccatagccctggaactcactggactcaggtagggagcctgggaaccgctgaaggccatctctccgccgcctctgtggccaccgctgcctttcacacccactaggaagtcctttgtagagggaacgacttaacaaagaaatagaaaccaaagcaacttggctgttattcaatggggaggagccggcagcaaaaggaagtgggtccagagagagaaaggtatggtactgggtggactggggtgacactcacagagggaagtaggcactcccagccccagtgacctttccctcctccctctcctgtgctcaacccaagcctgaagcatatttggttcatagaggtctacaatgcttgaccacactgacatgacagcaagttgccagatgacactgcccagaagtatgtggctgtgtgtcctaagcatgcttggccacggagtccagaaaataatggggctgggcattgcctgtgcacagggtgcttgtggggaagggcggcttcaacccattttacatacagagaagctgaggctcagagtctaaggggcatgccccaggtcacacagctaattcgtggccgcctgaactttatgaagattctcagactcttcaaaaagtatttctcctgtttaaatttatattattcatgtaaaaacataattatgtagaggggaatattttgcaagaaaaacaccataatgaatatttttattctacagtatggggtgcccaggagcttctgatcctccctctcaatgaatctctcttgattctcttctccttctcttctccatccttattttctgcactttaggatgaggagagaagtcttggacatgatagaacatttcaagtgacatggggctgggaaggaacatatggcatgtgcaggtcgtgggggagggagccatgaaataaacttacctgaagtcgaccaggtcccagcgatgtgctggtgagaaggcccagaactcaagctgggtagggtaagtgctggcaggtaagggctgtacgggtgcgagaggatggcaggtgccccagggccatacgtgagtctgcacctctcttccttcctgtgctccacctagatgcactagaatttgcagactaattcctttgagatgctccaatagactgaggccatgtgtgccatctgcactgtccatccccattatgttcctggatcaagtaccagtttaaggagtagacagtacaaggggagcagaaaggagagaaaggaagggaaattctttgcgatcctctcggacaccagggacaatttcatcacggcacatcatttgtaggcaatcacaaattgattgcgatacgcaacaactggaactctcattcacagcagactggagtgtaaaataatccaacttagaaaaatgggcagggcgtggtggcttatgcctataataccagcactttgagaggctgaggcaggaggatcacttcagcccaggagcttgagaccagctcgggaaaggttggaagaccctgtccctacatataatttaacaaacaaattagccaggtgtggtggtgcacacctgtggtctcagctacatgggaggctgaggtgggaggctcacttgaccccaggaggtcaaggctgtagtgaaccctcatcacgccactgcactccagcctgggtaatagagcaagactctgtctcaaaaaattgaaaaataaaaaataaaaagaaaaactgcttggtgagttgtaatacagtcaaatatctacttctatgttctggcttttctacttctaaaaaattacccaagagaaaggaaaacatatgtgcctgtttttaacagctttactcatcattgccccaggctggaaacagtgcaaatgttcaccaaaggagaagggagaaatgaattgtggttttcatacaacagagtagccctcggcaataaaaaggagctaggccacaggaaacatcaatgggcctcgcaactgagcagaagaagccagatccaaacttgacttgaagtgttgttcaagtcaagttgaacaacaggccagaatggcgtcacccttgggggtctctgactgggaggggcaggaaggagtctttgagaggctggaaatgttctggatctggttctgggtggcgatcacacaggtatttacatccattaacaacaggctgaggctgggtgcagtgg

SEQ ID NO: 1244252 - DNA, 4001 bp, Homo sapiens
ctggtcggcaacagagctgggatttgaaccccagcacccacgcttctaaccaccacacaggcttcctctcatgaggaagctcggaacgtccttattcctggctctcgcagtgcttcctgggccacacagcaggtggttccagcttccccccagccctccaaagaggctgggctagatgaggccagacaagaagtgggagtgaggtttccaagccaggccctcatggcactcagccctcctcagcaggacagtgaaccgcgtgaccttcccccactgtcggcatgtggagaaagcgtggctccgactgccagatgggtcaccgagtgaggctcaagtgtcccaacccaggggagcccccgtagggtagaggggagctctggacacctgtgggggctgcactgatcgtctttcttgtctgagctccaaggccccgctttaactctctcaaactctctgatgtgcataggaggattttccttctgaatccaaagattagaaagtaaaaaccagttaccagaataataatatgtcagaacctggaagaagctctgggatcccctctctggcagaaaaccagaaacggggtgacatgctcaaggtggcatacgctgactctaaggctcgcccaacaccggcagcccgttccagcttcccccactccctctatgcaggttctaccttgggggcttccatagggtggctgaggggtcattggtgacagccaggaggaaacaggcctcctttctccattcttcctctctggagtctagaaagcagagctgagctctgcagaccagaacataggcagcctcattctggactcagtatcaccagagggcacccaagcccgaccctggcctctgctgaggtggcccctggcagcttccctgccctcagcaccctgcctctgcccaccctccccattctgtctccccactcaggaagggcccatcagcccacccactccagcccctcgggaagctctttgccaaggcagggtgagatcctgtgacaggacccagcccaggacacagtcacccctgaaggctcctgggctcctggggctgccactcccatctgggggcatttggcaactggcctttgcctccctgaaccttggattttccgtgaatgaaggggactcataaacctcacagagtttcagcaaggcacctgcagccctctgaccccacactgcagggacagtccctgcctccgtcacctctgagactgtccgtctacagatgccctgacatgcctatgcctggttaactccgcctcacccttcagagcacagacacctcctcgggaggccttccctgctgcccccagactcccaataacatgaaacactcccaaagcacctacagtgtgtcaggcactgttcaaacactctagatacactacttccttaatccatatcccaaccctgggagtggggggctcaagtattattcccacttcacagatatggaaactgaggcccagagaccaccagccagtaaatagctggacccagggaggccaactccacagtacgcacccttaactaccatgccgggtagcatccttactgtcccagaagcatgcttgcttcctctttacacaaaccatcccactctacacctcttcccctgagcgcacaggacaggacacgacagctcagccaacactgtcaaacccatgattcatgggaggagcatccctccaggcatgagtgagctcagcatggcacagctgtgccaggacgacccccactgacatttctgccctgcttgtgttctctttgggatgcccccacccctgtctcctgccacccaggagttgcttcctcagagccccataactgtgtccccctggctgaggcagccctgtgcccacggccctggaactcactgggctcagatagggagcctgggaaccgctgaaggccatctccaccgcctctgtggccaccgctgcctttcacacctgccaggcagtcctttgcagaaggaatgacttaacaaagtaatagaaaccaaagcaacttggctgttattcaatggggaggagccggcagcaagaggaagtgggtccagagagagaaaggtagggtgttgggtgaactggggtgacactcatagagggaagtaggcactcccagccccagtgacctttccctcctccctctcctgtgctcaaccccagcctgaagcatatttggttcatagaggtctacaatgcttgaccacactgacatgacagtgagttgccagatgacactgcccagaagtatgtggctgggtgtcctaagcatgcttggccactggttccagaaaataatggggctgggcattgcctgtgcacagggtgcttgtggggaagggcggcttcaacccattttacatatagagaagctgaggctcagagtctgagggacatgccccaggtcacacagctaattcgtggcagcctgagctatatgaagattctcagaatcttcaagaagtatttctcctctttaaatttctattcttcatgttaaaacataattatgtagaagggaatattttgcatgaaaaacactataatgaagatttttattctagagtatggggtgcccaggagcttctgatcctccccctcagtgaatctctctttcttctcttctccatccttattttgtgagctttaggatggggagagaagtcttggacataatagaacatttcaagtgacatgggagtgggaaggaacatatggcatgaactgcctttaattggcttcagcacctagttaggggaaataattggctgaaacagagaataacaggataggctgcagaggggagagggagccatgaaataaacttacctgaagttgaccaggtcccaacgatgtgctggcgagaaggcccagaactcaagctggggatgggcgggtaaggaccatacaggctcgaggggatggcaggtgccccaggccatacgtgagtctgcacctctcttccttcctgtgttctgcctagatgcactagaatttgcagacgaactcctttgagatgttcccatagactgaggccgtgtgtgtcgtctgcactcaccatcccattatgttctggatcaagtagaatttgaccaagttaaggagtagacagtacaaggggagcagaaaggagagaaaagaagggaaattctttgcaatcctctcgaacaccaggaatattttcatcacgtcacgtcatttgtagcaatcaccaattgattgggatatggaacaactggaactatcattcatagcagacttgagtgtaaaataatccaacttagaaaaatgggcagggcgtggtggctcatgcctgtaatcccagccctttgggaggctgaagcgggaggatcacttgagtccaagaagttgagaccagcctggtcaagataggaagaccctgtctctacatataatttaaaaggcaaattagccaggtgtggtggtgcacacctgtggtcccagctatgtgggaggctgaggtgggaggctcacttgagcccaggaggccgaggctgcagtgaaccctcatcacgccactgcactccagcctaggtaacagagcaagactctgtctcaaaaaataaaaaaaataaaaagaaagaaaaactgcttggtgagttgtaatatagtcaaatatctacttcaaagttgctggcttttctacttctgaaaaattacccaagagaaaggaaaacatatttgtctgtttttaaaagctttactcgtcatagccccaggctggtaacaatgcaaatagtcaccaacagaagaagggagaaatgaattgtggttttcacaccacagggtggccctcagcaataaaaaggagctaggccacaggaaacgtcaatgagccttgcaactgagcggaagaagccagatccaaacagacacatgctgtgagaattccattcgagtcaagttgaacaacaggccagagtggcgttacccttgggagtcactgactggga

SEQ ID NO: 1244253 - DNA, 4001 bp, Homo sapiens
gtcggcaacagagctgggatttgaaccccagcacccacgcttctaaccaccacacaggcttcctctcatgaggaagctcggaacgtccttattcctggctctcgcagtgcttcctgggccacacagcaggtggttccagcttccccccagccctccaaagaggctgggctagatgaggccagacaagaagtgggagtgaggtttccaagccaggccctcatggcactcagccctcctcagcaggacatgaaccgcgtgaccttcccccactgtcggcatgtggagaaagcgtgactccgactgccagatgggtcaccgagtgaggctcaagtgtcccaacccaggggagcccccgtagggtagaggggagctctggacacctgtgggggctgcactgatcgtctttcttgtctgagctccaaggccccgctttaactctctcaaactctctgatgtgcataggaggattttccttctgaatccaaagattagaaagtaaaaaccagttaccagaataataatatgtcagaacctggaagaagctctgggatcccctctctgacagaaaaccagaaatggggtgacatgctcaaggtggcacacgctgaccctaaggctcgcccaacaccggcagcccattccagcttcccccactccctctatgcaggttctaccttgggggcttccatagggtggctgaggggtcattggtgacagccaggaggaaacaggcctcctttctccattcttcctctctggagtctagaaagcagagctgagctctgcagaccagaacataggcagcctcattctggactcagtatcaccagagggcacccaagcccaaccctggcctctgctgaggtggcccctggcagcttccctgccctcagcaccctgcctctgcccaccctccccattctgcctccccactcaggaagggcccatcagcccacccactccagcccctcgggaagctctttgccaaggcagggtgagatcctgtgacaggacccagcccaggacacagtcacccctgaaggctcctgggctcctggggctgccactcccatctgggggcatttggcaactggcctttgcctccctgaaccttggattttccgtgaatgaaggggactcataaacctcacagagtttcagcaaggcacctgcagccctctgaccccacactgcagggacagtccctgcctccgtcacctctgagactgtccgtctacagatgccctgacatgcctatgcctggttaactccgcctcacccttcagagcacagacacctcctcgggaggccttccctgctgcacccagactcccaataacatgaaacactcccaaagcacctacagtgtgtcaggcactgttcaaacactctagatacactacttccttaatccatatcccaaccctgggagtggggggctcaagtattattcccacttcacagatatggaaactgaggcccagagaccaccagccagtaaatagctggacccagggaggccaactccacagtacgcacccttaactaccatgccgggtagcatccttactgtcccagaagcatgcttgcttcctctttacacaaaccatcccactctacacctcttcccctgagcgcacaggacaggacaggacagctcagccaacactgtcaaacccatgactcatgggaggagcatctctccaggcatgagtgagctcagcatggcacagctgtgccaggacgacccccactgacatttctgccctgcttgtgttctctttgggatgcccccacccctatctcctgccacccaggagttgcttcctcagagccccagaactgtgtccccctggctgaggcagccctgtgcccacggccccggaactcactgggctcagatagggagcctggcaaccgctgaaggccatctctccaccgcctctgtggccaccactgcctttgacacctgccaggcagtcctttgcagaaggaatgacttaacaaagtaatagaaaccaaagcaacttggctgttattcaatggggaggagccggcagcaagaggaagtgggtccagagagagaaaggtagggtgttgggtgaactggggtgacactcatagagggaagtaggcactcccagccccagtgacctttccctcctccctctcctgtgctcaacccaagcctgaagcatatttggttcatagaggtctacaatgcttgaccacactgacatgacagtgagttgccagatgacactgcccagaagtatgtggctgtgtgtcctaagcatgcttggccactggttccagaaaataatggggctgggtattgcctgtgcacagggtgcttgtggggaagggtggcttcaactcattttacatatagagaagctgaggctcagagtctgagggacatgccccaggtcacacagctaattcgtggcagcctgagctatatgaagattctcagaatcttcaagaagtatttctcctctttaaatttctattcttcatgttaaaacataattatgtagaagggaatattttgcatgaaaaacactataatgaagatttttattctagagtatggggtgcccaggagcttctgatcctccccctcagtgaatctctctttcttctcttctccatccttattttgtgagctttaggatggggagagaagtattggacataatagaacatttcaagtgacatgggagtgggaaggaacatatggcatgaactgcctttaattggcttcagcacctagttaggggaaataattggctgaaacagagaataacaggataggctgcagaggggagagggagccatgaaataaacttacctgaagttgaccaggtcccaacgatgtgctggcgagaaggcccagaactcaagctggggatgggcgggtaaggaccatacaggctcgaggggatggcaggtgccccagggccatacgtaagtctgcacctctcttccttcctgtgttctgcctagatgcactagaatttgcagacgaactcctttgagatgttcccatagactgaggccgtgtgtgtcgtctgcactcaccatcccattatgttctggatcaagtagaatttgaccaagttaaggagtagacagtacaaggggagcagaaaggagagaaaagaagggaaattctttgcaatcctctcgaataccaggaatattttcatcacgtcacgtcatttgtagcaatcaccaattgattgggatatggaacaactggaactatcattcatagcagacttgagtgtaaaataatccaacttagaaaaatgggcagggcgtggtggctcatgcctgtaatcccagccctttgggaggctgaagtgggaggatcacttgagtccaagaagttgagaccagcctggtcaagataggaagaccctgtctctacatataatttaaaaggcaaattagccaggtgtggtggtgcacacctgtggtcccagctatgtgggaggctgaggtgggaggctcacttgagcccaggaggccgaggctgcagtgaaccctcatcacgccactgcactccagcctaggtaacagagcaagactctgtctcaaaaaataaaaaaaataaagagaaagaaaaactgcttggtgagttgtaatatagtcaaatatctacttcaaagttgctggcttttctacttctgaaaaattacccaagagaaaggaaaacatatttgtctgtttttaaaagctttactcgtcatagccccaggctggtaacaatgcaaatagtcaccaacagaagaagggagaaatgaattgtggttttcacactacagagtggccctcagcaataaaaaggagctaggccacaggaaacgtcaatgagccttgcaactgagcggaagaagccagatccaaacagacacatgctgtgagaattccattcgagtcaagttgaacaacaggctagagtggcgttacccttgggagtcactgactgggag

SEQ ID NO: 1244254 - DNA, 4001 bp, Homo sapiens
tggttccacgcaacccaaccccagccacgagtcctggagcggcactggggacagcgcgtcttggccctctgagtggctttgaatccctcttcctcctgctccctggtttgaactatgaccacaaactcagaaaagcagagaccaagtcagccgagtaaattgcgatatttcacatccgtagggtggaattacaattcgcatttgtgcccgttcttctctgttgacttgtgtgtttgtgtgaatggagcggcaaaattgtgagtgtacgataatataattaaaatgctaaacgaataaggggggtagggagaagtctccccaccagcaagctggaggtctcggctttcccccaggtttcatcaaggaggttgctggctgtggctggcagtttcctaggaggactactgagcggagcccgtgggagtcggagtcacctggggctgaagccgaaccaccagacaacttcggcagccagggaagcaggaaaaagctccgggcacttcgcaggctacagtgcagcagtttgtccaggtctgcactcggaggcatgtccgggtttggggaagacccccgggcgtgcaggatcggctttaaggccgagttctttcctgccgctgacagggcagttggcccagacactctacgcaaaaggctcggagcttaccgccaagaccgctcggggtcggaaaaggtagtggccgggagggagcctgggctctgcctggagggcaaacaaccccgaaggcctggagaatgcagttgctgcagagcttggctccgggaaagacagcagtccgggctacaacgcccgaggctgccctgtctcttccaagcttgaaggggcttctgggccgagtcaggctcagaccctttcttcccaggcacatgcagccaaacccagacccatagtttccaggatgcaagcagggccgcgtcccgggctcccagcgcgccagctggcggagaggcgggcgcccgcgggacttggctgccctctctagaagcagttcctaactgggcagcgaggccacgctaacctctgatccgaagctggccgggaagggcccgcggggaggtagcagcagaggcgtgggaggaaagtactcaccggaagaagtcgttcttgcagtagagtttgccttccctggagaagcacttctcggtcaggttgcatttacattcacagcactggacgcacttgacgtgccaggccctgtccagcacgttcaagagaaagcggtccaggatgggccttttgcagccggcacagtgaaccatggtctttggtttggtctgatgaggcccagagagagagaggggcaaagtagagcccaggggatgactcctgaagacaatcggcacgagctccccagtctctccaaaaagaggacacacactcggccgtgcaagccaaaactcgcaccaggaaatcaaagtagggtggaggaaacgaggctgatcggggcctgggggggcgtctcagtgaagtgtgcagccggggagtcccggggccccgggctggagcggcgccgcctgagctcccggggcgaggaaaagaagtctcaggcgggagagaatgcgacccttctgctcagagcccgcggaggagtgaaggtcagcgagaacggcggcgggaacggaaataaataaataaaaacggagaagaagaagacgacgactcgccgagctcgggttgcgaggaaagcgccgctgagttctccggggcttgaggtagagctgtcagaagtcaaagtgcatctgcttttgtcggggtatgagggcgactgtgtgcgtgccaggctgcccaccactgggatttcccccctctttttttaaaaaagggaaggaaagaacaaaaggagcagagaagctttggatcctaaactgccggcatcgcgccgcgggtctggacgcgccgagcgcccgcgctgggcctgggggagggggcgagggccgaccgcgggagaagggaaagaggggagggtaggaggaagatcttggtgttgattgctgttgttgcttaggtttccccgcttttggagaagtgtttgtgtcaatcgaaaacagagagggacaactccgtgcggaggcagccaggcgcactcgctccttccctaccgccccagcccagtcacctcggcccttggcctgcctggcggcctccgtgtcctcagggcgaccctccctgcgcccgggctccttcgggaggcactacgggctggcttctcaccgcgcctggccgtgcatcgtggctccagtcacaactcgcggccgcctgggcgcacagccccgcatcgctcggcccacgctctgtctgcctccgtctaaccccacagtcgctcgactttctctccttttccttttccccttctttttttcgttgtggtggcaaatctgggtttcctttctagcctccttcctttttttttttttgtttttcttttgcagcgggaggagtcggggaggaggggggcagcttggagagctttaaaaaaaaatgtcctggcgcagcggctacagtaggccggcggctggaacggctcggcgcggaccgccgctgtcgccgcccgggccgcggctcgttgctggccctccccgggcgcgtccctcagtccctggtctcctggcccagtcgccgccccggtgcgtctctccccagctccggcggcttggtcactgctcctggctgttggctgagctctggaagccccctcgccttaatgcagcgcccgctgacgtcactgcggcctgcgaccaatcagcgcctcgcggtccctctgtaaaccattctgcatcccccggcccgggagagtgcggggagaccgcgtttagaggatcagtggcggcggcacccgcggccccgcgcggcgcggacggcgggcagcaccgtgcctgggccccctcctgctccggtaaggcgtgggtttcgatgggagggacagagagagagcgggaataggcgcaggcggaggccagagttctgctgtagagtgggggtagtccaagaccgagccttgtggaaggttggggtgcagccgggtccggaatcccaggcggctcccctgcactgctgggctttgcaattcagcggctgttgccattgtccccccgtactttcttgagctggaagtttgtcccaagcgcagcgcacatctttggagggggaggaggctcttagcagcagaatctccctcctcccgtccctctttctgtgccccctcccccaatccatccaaagtccacagggtccgggtcctgggcgagctgagtgtctgtctcccgcagagcactcttgcaaagttgattcgggcggtttcctgatgggggcggggagaccggaggcgcggcgccggcgcgggggaaggagtggaccgggaagcgcctcgggtgaggagttgcaaccctggcgagaaagttgtgagaaaactgtgatccggagacaccttttacgtacaaaaacaaacgactaggcgggaaaccgggggctccagcggcggctgggggtggtggtcgtggcgttgggaagagggaaggaggaggggggggtgccgggacgccacgaagaggctgcagtagatgggcgtgcagtgcatgggcagcgtgtgccgggattccagtcctcccctgtccaggcttcgggttggcaccggcttccccagacaacagcaaaccacaccctccatagttcactcctcagggaacccgtaactccctaatcccgctctggctaggaactcgggaccgccgcccccaggggcctattttcccacacgtgggggacagatcctggtctagagtgccttcgcctggaagagttactgtagtttttcggagcactcaagtcaaaccctaaattccgtttcgaccacacctgttctgggtgggcttaaccaggatttctcctgaagtggagtctgaaggtggttgggctgggcggtcccacttttgctccccgtttttgtgcttcgggggagggggtgctaggaaggctcatttggccc

SEQ ID NO: 1244255 - DNA, 4001 bp, Homo sapiens
acttttttgtatttttaatggagacggggtttcttcttgttggtcaggctagtctccaactcccgacctcaggtgattcgcccgcctcggcctcccaaagtgctgggattacagacatgagccaccgtgcctggccctgaagtttcgttttaatcaccagtaaaaattacattatgttcatgaagtttttattgtgaagtttaacacatatgccatcctcagaaatcaagccactatatagatttggaattgagttagaatccctatattgagagacaactaagcagagcctggaatcagactgcctgagttcaaatcctaactcagccacttaccagctgtataaccttgatgggtttcttacctctgttcctgagcttccttatctgtaaaatgtggctaattatggggcctaacttaaagagctgttctaagagtaaaacccttaaaacagttgggcacacagcaagagctctcattaacgtcagctcctattatgatcggtgacgtcgttatctttcaagaagaggcttccgatgtgcaattaacctgtttatcattcagcaacttgaatcagagaatgctgaagtcactgggcagcaagactcacaggaactcataaatcaatccaaatggaaaaagattatatcagcatcttcttatattcatgttttctaaagcattttatagtcctagttttaagtatactggaattatgttcagtctgcacacgctgtgaagcaaaattgctgtcacgttataataaaaagcaggctttgcttactgtagtgcaacatgatgtgaaggaaagctggtggacctggaataagggatgggagtgcaagtctgactgtacagtttactgactgttacctcggagaaaactcttaatttatctgcatctgttttcttatttctaaagcagggtaaataatacctacctcacagggtagttgggaaaattacaaggaatccatgaatgcgctggttgtgggggagggaggctgttctgagctctctaaaaatgtatacaaaatgtacattcgataaaaatgcacggttttttggaggaggtctatcactttcgtgatattcacaaagggctatataactcccaaagtttaagaaccacagaggtgaggtaagtggaagtacggcagacccataaaaggaggtcagaacaagtgagtttcaacacttttcctagaagatcaatttacagagcaacctctagggccccaataatgaaaggagtggacttgagggaggctcgggaggcgctgggccacgaggaggcacaatgcagctttgaggaaacccgtctgtccctcgttccgcaccctcacaactgccgcagcccaggggcccgagaaggaaatcgctgaggcctggccgccgccgcttttctcgaagggcttcccgcgccgctgtcggagagtggcggggacagtggggtcggcggcgtaggccgcgacccccggcgaggcagaaaggagcgctcctccaccgggtccgggacgcaggcgggaagtgatcaaggctccctgagtcccacccgagcgctcccggttcagcgcaggaggacgcacgccgggccagggtacgagaaggccccgtgggttccacagggaacacagcccgggcgccggcctccccgcctcacgcggccccgtgggggtcccggggagccgcgagcctccccctgggctcccgggagggccgccacgtcacggagggtgtgccccggggctccgcaggcgggcgggggaggagccggggggctggctccccggccgcgccgagctcctcgccccgggcccgctgccttccccacgccgggccccgccgcgccgtgccgcgccgcgtagcccctcacctgcctctccggctccggcgctcaccgtaggcctcggaacttgctcattacaggccgcgggcagcccacgacggttggagcgcctgtctctttaaatccgggtcctagagcgggaggcagcgcgcaggcgcaagagccaaggccgcggccacgcgaccggtccccgcccccgtctgccacgtgggtcgtagttgcattctgcctgccctgtgatgtttgggagtagttttcaacctgcaatcgcggcccgggaagcggaggtggggggacgtggcggctcctcggaacgcagcctggcctgaacttccgaggctccccttgattttctcatactgttagagaggatctgtttttaaagatattggtggagaaactatattgtaatgaggtcggggaaggcaaagatcgcgtcaatctattttttaaatataatccctctgtttgtgtcccgcagactccctagtaaatagtttgtattcagtagctttcatggaattgagacgaggcactaaacagcagatagatataaaatgtaaaggagtgatggaggagaaactccttgattgtatatcattcaaagtgtattatctcaaatctgaagccagctctttgagagttgggatggcgatttttacaaatgtagcagcctgagggtaagtgacctcttcagagtctaggaagagcaaacaactgggccttgttaggtaagcaaagaacaggttcccgagagaattctgtgctgtgtgatgaagagtgtcgtctttactctgtagaggacggagagccatgaagagtcttagggaatactgctgaagctgggtggggagagactgaggcaagggaacaaatcagaaggctctcatagtgacccatgtgggagatgattcagctagttagggtggagagtaaagtgcgtttttgaagatcatttagaatttaaatgatcttctagataaagtgctcgtttatggataaaataataataatttgagtgagcagaaacataatggtaccatcaactgaaatagaaaatagagaggaagaggaggtgttagggttagaaagatgagttttgtattggatacattaagtttgtttgactaagtttaactgcgattctactgtttggaggggagtaaagcctgcttttaatgcgcagcagaatgaaccagggctttggttcaaccaggcaattggaaggtcgctggagactcacgtcctagctatgataattgagtgatcttgagcacgtctctacaactacatttgctacatttttttaagtttcctcaaccgtatctgtctttttccaatgctgtaatcactagccacacgtgactattgagcacttgaatgttgcatggaattgagatgtgctataagtgaagaaaatacacaccaaaaaattcatactaaaaaaagtaaaatatctcattaataatatgtaccacataatgacatttaggccaacaatggaccaaatatatgagggtggtcccataagattataatggagctgaaaaatccctatcatatagtgacagcacattactcatgtgtttgtggagatgctggtggaaacgaacctactccattgccagttgtataaaagcatagcacacactattatgtacagtatataaaactttataatgataataaaggacgatgttgctggtttatatatttagtatactataccttttattgtcattaaattaaattaattaatttagttatttttgagacagagtctcgctgtgtcgcccaggctggagtgcagtgccacgatcttggctcactgcaacctctgcctcccaggttcaagtgattctcctgcctcagcctcccaagtagctgggattacaggcccttgccaccacaatgggctaataattttttttttttttttttgcgacagagttttgttcttgtcgcccaggctggagtgcagtggcaggattttggctcactgcaacctctgcctcctaggttcaagcaattctcctccctcagcctcctgagtagctggaattacaggcacccgccaccacgcctggctaatttttgtatttttagtagagacggggtttcacgatgttggccaggctggtctcaaactctt

SEQ ID NO: 1244256 - DNA, 4001 bp, Homo sapiens
acgtgggggccacacagtctccggtggcagtgagggagcttgggaccctgaggggggcatgctgactccttgctggagaaaaggcacctagataggggagctgggcttgggggcctcccagggggtcctggggtgaggtggggagggaggctgaacgaagcaggaagcagggtggtgggcagaccccaatcctggtttccaaaccctcaccggctgcgggagaaggaagaaggaaggagtcctggagcagagccctgccctggtcccctacgcctgagcaagcctcatccccttcccacctggcccccacgcaagcccagctcgacctccttcccaccttccccctgccggctccaggccttccgcagagggggtggaaggttacagaggcctcaggccgtcttggtgccggggtccacctccttgtgggcccagagctccttgtgctgcttgcggccaaacccctcgtcgtagttgcctttgctcttaaacagctgctggaagtggggtttgcagtagaactccccgtgcagcgcggcgtagctgcccaggctgcagaagccaaacaacggcgtcaggtcaggtcaggtcggggctgggttggcaggcgaggcgggggcgggcagggcaggggcgcacctgagcttggtgtgacagtgcttgcagcagaagcaagagttgtggaaaatgagcttgtcggccaccagccgctccatggggtacacggtcttctggcaggcggcgcaggtctccttcacctgggcccgcaggctgaaggactgtgcgggaagctcagccaggtgctgccccagtgctcatcccgctccctcacacccctcctcccgcacacccggccccaggcccctaccttggagcgctgcaccgtgctgctgccgccgcctttggcgtcctgagggagaggggcggtcagggcaggggcagctccgggaggccctggatcagggctgcagccatcagcccaaggcccaggggcgcgccgcagggcacaaagggggccggcaaactctgatgcctctccccttcaccccaggccaggctcctgtccggggggccctcccacccagccgggcacttacatgagagggggtggcctgggcggctcctgcagcctggaacatggctcgttggaggtggaagcctcgggtggagaagcggcacccgctgggttctgcaaggggaagtcagtcgggagggccccgccagcccggccccagcctgcagggtggggggtgttgacaggcaggggctggggggattgcggttgggactttccctaagtcatttcctgttgctcttggtcttgccacttccgcccctcacccacctcccccacccctgctccccaggggccggggtcccgagtggcaccgtccctcggaagaacaaagttagcgggagcggaggggccgggggctcccgcgcagccgccgtgtgcgtcccgcgggctgggaccgcttggggtgaggggaggtcggggccggcggggccgcgatgagaagccgctgccccgacctgaccccggccctcgctgccctgcgccgcgcccgggcgtccaggcctaggctgcgcagcccctggacagcgcccgaggtccccgcccgccccgcccctcggcccccgacctggccccgcgaggaccggaccccagaccccgacgccgcgagccccgccagcgggtctcggctccgcccagccgggggccggccctgaaacgaggactcgagcctgtgcgccccgggcgagagcggctcgcagactcgccgggaccccacgggcggccctcaccccacacccctcggcgcctctcccggttccggagccggacgcggcccctccccccgcggctctcaccaggcccggcctgggccgcggggcgggatcggtctccgggggcgcacgggtacgaggagggcgcgggcgcgagctgctgccgctaccagtggtccccgagccaccgccgccgccaccgccttatcgctgcaccgcccccgccggcccccgccccgcgcccgcccattggctccgccgcgcccggagccgccttcggggccccggcgccgccgccgacccccctccgcgctttgtcttcccctcgccgccgtccccgcctttgtctgtcccccgccccggctccgcgctcccggctccgcagcgccccgcgggcctcgcgctcgcaggcctcgggtaccggccgcgccgtctgcccatcccgacggcggcccggcgtggggaagcaacggtggcagggacaggatggaagggccgcgctccgcatcctactgggaggggacgagttcaggctgcggcggctgcggtcgcgggacactgggcgctcccggcctggctccgggataaccgggcggggcctgggccattcactgcctcggtttcccccggttggcctcgcgcgtaggcgccggcgcccccatccccgcccagagctgtggggccgcagagacccagccggggcgaccccggagcctggcccggggtccctcgggcggccgagtcctcccgccgccaggggccgcccccgcccctttgcggcccacgaggctggcggcggcgtccgggcacgcggtctccaggcccggccgcgaggctgcggggaggagcctgcacgagggcccggcagccccggcagcccccccagccctcggcgcctctgcaaccctgcgacgggctggggaggccggtatgcgtggttcccggagcacccgtcccccgaggctccacgtactcaagcgtttctggggcggaattctgtgggcagcaacgggggccccctctccaacaagcgcacctcatttctcacgtgggagccgcggcccagagagctgaggtgacagagcttgggccgcagagctgctccctccctgcagccgcacagcaggccggaggcacagccggcgagagacggccactcgctttggagcggcggcgaggccggcgccttcccgggcaccagggactgcgtggcttggccggaaatcaggctagaagcagctccgggaagcacagcccttagcccagcgccttcccacactgtggcaggaatagcactggcggcccacgcgcttgtcagggaacagaacagctctcgcccgacgcctggcaggggagcagggaggctgcagcttccccagcgaccagctgtttcccaggctggcggactccacggaccggctccgcgtctcctctccagccttctgttctctctagaggaagatctgcgttttgtctgcactgtgggccgactctctagtggggagcgtcagaccctctaaagtggctgcctctcgggaaagcttccacacctgtcatcagattctccaaaggggctgtttgatgcaagaaacgggaagccccgggggtactaggagcagggcttgctgccattgggcatggtgaggccccggcaccctgcccaggacgggcctgtgggctgagctgcagatgggcattgaggatgccccaacagcaaggtgcagaaggcatccagaagcaaaggaaactgatgaccagcgtcaaaaacaaacaaaaaaagggaacttggctcggcggtggctcacgcctgtagtcccagcactttgggaggcagagacaggtggatcacgaggtcagaagtccaagaccagcctggccaacatggtgaaatcccgtctctactaaaaatacaaaaattatccaggcgtggtggtgtgtgcctgtaatcctagctactcgggaggctgaggcagaagaatcgcttgaacccgggaggtggagcctacagtgagtcaacatgaagccagtgcacgccagcctgggcgacagactctgtgtttgtgtgtgtgtgggggggggagggcggggcgaggcgaagggaacttgaggtttaaagcagggggaggagggccggaaatgctccccgccgcccccgacactcactcgccccaggccccatcctagcccagggtcagtgtcattcccttcacctt

SEQ ID NO: 1244257 - DNA, 4001 bp, Homo sapiens
ttgaacccaggagttcgagaccagcctgggcaacatggtgaaaccccatctctacaaaaaatacaaaaactagccgggcatggtgacacgagcctgtagtcccagcttcaggaggctgagatgggaggatcacctgagccagggagttgtgaggctgcagtggactgtgattgtgccactgcactccagcctgggtgagagtgagaccccatttcaaaaaaaaaaaagtgacatttagccctgtgcctgttgctgcctttccctgaagggccattctcctctcacctcaccctcacagcctccccggcacagaaaataggtgccatctggggaccacggagcaccagcttcccttctgggcccctctcaggttcctagcaggttctcagccaccgtgtgagggtcctggcagctctcatcggcaatcactgcagacctaggcagggaaaccctgagacatcccagtgcctccactactccaggtccagccgtcccagagcctcctccaagacaagtgtctcctcaaggcagcccagggcgcctggcacaacactggcccaggaccacagcagccccttggaaaaatccctgcccctcaaggctaaaatccaaccccactgacacaagaactcaagaaagatattggtgcagctcactctgactccgggcaagccgtcacccctctcagaacctcaattttctcacctgtattttgaagataactctaatttcgaagagcactgagaggctctgccatcagtgggctctggggtaagaatgaggacaaaaccaacgtccccagagcagtgagccaggagtgggctgaggccctgctctaacatcagtgcagagggaggcgggggctgaggcggcccctttccctggcccctagtgtcccactccgggaaaggaaggaaaagcctccacctcactccaccttggtgcagaaaggcaggacagctggcccatgtggcagagggagccagggcccacagtatggagaaaagtagcctcatttcacagctagggaaactgaggccccacgatgcgaagtgcagtgtagtacacagccaggcatgtcccctggactcggagccccgggcagggcagagcagggcaaggcagagcctggagcagtgggggaaggaaggagaggctccttgaagggatttcccagccgcaccccccacagctgcctcgcccccactaactctctcaccctcctgggtgccaaagcacaaaacaaaccgggccccagggctgtcccaagggccgagcagggacgcaatggagcccctaagaaaaaggataaagagacagaagtgagcgacagaggtcgagagactccacagagacagagagagagacacgcagggagagacaggcaaagaagactcagagacgcacaggcagcaagagaaatgagaggcagagagataaagggagacaggcagagataggaaggggcagaggcagagacacccccaccacacacacaggcacaactggggcgagacagccggtcagcggcggagaaagagggacagagacccagagacaggcaaagagtctcagagacagacccccacacacacagactggcagagccagggccagagcggcccgcagagactcggggagcagacacggaaagtcggccggagacccagacccacccagagtccgagccagagcggggcccgccgagggggtgcgcggcccggcccggccccgccccgcgccgcgctgcatgccagcccccgccccccgggcccgacgtggctccgaccccgggcccccagcccaggcccccgtcccgccccctcccgcccgagcccgggcccgggccgccgccgcaccttgttgaaggcgaaaagctcctgcttgagcttctcgcgctgcgggtcggcgccctgccgccggaaccgaaacttcatcatcttgcgcccggctgcaggcgcctcgcccgccgccgccgcccgcaggatgcgccgcgcggccccgcgggtcctaaggcgcgggcggggcgccaggcggcccgggcgcgggcgcgcggggccgggcctgcacgggggtgggcgccgggcgcgacggacgcgccgcccgaccagtgagcgagcccgccgtgccgcccgccccgcccctgttggccagacaatggtgaactgggcccccgggctcggccgggctcgcgaagggacgcccgcctagcatgcgccgcggcgcggggcctgccgggacttgtagtccatgagccggggctccagcgcgggcggctggggaagcgctttggagggggattggcgcacgttcccgggcttggaggagactttttcctcctcccagagagcgagcgacgtgcccactcatgtaatggggcagccctgttccgaaagccaagacagctctgactggaacaactccctggcccctctgcgcctcagtttccccatctacaccattggtcaagtgattgccaagtttatattttaccaatttcacagaactccatttcgtctgttccccgctctgtcagagcacctcccaccgccgtgcttttgccttggctttgtagtcaggaattctttcctcacccccagcccctggggaactcctacacatctttcaggacccaacgcaaaaggctctgtgtcacagcacaggggattctttcttagccaaagaaagagacgggatccccaggaggtggcatttgggactgttctggggttggattggagctttacggagatgggggaaggacctccccccgcagagaacagcgtctgaacaaagcttagccctgcccctactctcaggggccgtctgcctgtccccacccacctcccaggccttttctcatctggacaatggcctcgaggctgaacctttccttccaggctgaggataggccgcctggctcagggctggggctgcgggaggtcctagaagcttaggtggggcaggtaggacaggccccaaccccaccagctgtgtccagggagcaggagctgacctctgagcccgaggcggctgccaagccttggggcctggctgtccccctccacccacgccaggccggcggtgttcagcccttccccgtatttggggctggatccggaagagggcccaggagtgagtgaggaggtgagaggagggagaatgacgacagtaaagcccctaagtgtctactgcggggcaggcgctgttcaaagccctttcctggtttcagctgacttagtgctgtcagtagctctacgagggagccaacaatattacccatcccaaatgaggaagctgagaccatcagccaaaggctgttagttgttggcagagctgctggactgaggaggatgagacccctttggccactggccacgccacaccagcacaggcagcagggacagctcagaggtctgggttctggtccctgccctgcctcacacaggaagtgttaagaagttgctggctgggcgcggtggctcatgcctgtagtcctagcactttgggaggccttggagggaggatctcttgaccccaggagtttgagacctgactgagcagtagggtgagatctcatctctacagaaaaaaaataaataaatatttttttaattagctgggcatggtggcccagctgtaaattccagctactcaggaggttgaggcaggaggatggcttgagcccaggaggttgaggctgctgtgagctgtgatcgtgccactgcactccagcctgggcaacagagcaagaccatctcgaaaaaaaggccaggagcagtggctcacacctgtaatcccagcgctttgggaggctgaggcgggcaaatcacttgaggtcaggagtttgggaaaaacccagtctctactaaaaatacaaaaaatagccgggcatggtggcaggtgcctgtagtcccagctacttaggaggctgaggcaggagaatcgcttgaacccaggaggtggagctttcagtgagccgagatcatttgctctccagc

SEQ ID NO: 1244258 - DNA, 4001 bp, Homo sapiens
ttgagtccaggagtttgagaccagcctgggcaacatatggtgagatcccatctctacaaattaaaaaacatattattaaagaaaaaaagaatttggtcaacttagtttaaaaaaaagaaaaaaaaagagaaaaaagttacttttttctattttatttcttatttatgaatgtagtgtcattttaatataattaaaagcatattaatctgacaccaaaggggaaactcccttgcctcaaggaagaatggggatgccaaatgaccctggaccccggaaaccctgtccaggagcccccacaaagatgggcccagtctaacttcagaggaaaggagtgaactctgattagaagcttaagagctgagtttgagttctgtctgccacagctagcactgtgggaagatcgcctaagaaaactaaaccccaaatcccagttcataaaataaagctgagacatctctcgcacagttctccttgtgcctctgctcacacagacccagacagttttcctcaaatgccactttttttttttttttttgagacagggtctcactctgtccccaggctggagtgtggtggcgccatcatgactcactgcaacctccacctcctgggctcaggcaatcctcccacctcaggctcctgagtagctgggactacaggtgcacgccaccatgcctggctaactttttttattatttgcagagacgaggtctcactatgttgcccaggctggtctcaaactcctgggctcaggcgatcctcctgccttggcttcccaaagtgctgggattacagctgtgagccaatgcacccagcctcaactgccacttctgaccttggcttcccccgggctgggccacagctcttctgtggcagctctgctcttcctaccagcgtttccttgtcaccttgacacacccattccctccctgcccgctccctgctcagaatcctctctgtagccccttcaagagaactcaaggttctcttgaactacaaactccagcagggggtccctggagcccaggttaaggctgccggcagtcgcatacggatccccaggggaaggggcgccctcctcactcaaagctcacctgttcaggtgagagcctcaaagcgccactctacagctcccctggttaggtcagttctccccacagccaaggcccagcgtgtccaccaatcgtccagccggaacaaactaagacacactttctttggcaagatagaattttccacttctcgccaaatcccacagcgcaaaccccgcccgtcagcatggagggcagactgggtctccgcactgtcatgtgaaggtgtccaaagccgccccagctggagaaaggccggagaccgaagtccctcccgcgggcttcctgcgtccggggattaggaggcacaaagggccggcagggacacagcccagatggcaggggcaggggctaagccgccggggcaccgcgctccggccgccgcccgtggggagggggtcaccgcagacgcgcgtcgccaaccccgctggcctggcgcctgcacgtgggcccggggactccgtctctgcccgcggtgccccccgcacccagccggccggggcacctgttctcctgctctcctaagccaacattattgtgcaaacccaagcccaagtttcagtcatcgcgcagatcaggcagagaagtttcccgcagaactttctacaggtgtctctcttccaggccagcacagcgacgcggacaggggcgaggcgcgcggacctgggcgcagccctcccgccctggcccgacagcccaggggtcctgggcctccctggcctccccgccccaggtggaagccccgagggggcgggcccggctgggcgagtccggcacgcatctcacctggaaccccgggccagcccccgcccgaggcctcggcgtccctcggcgcccgccgccggccccgctcgctccgccgcgcctgcccacgggctgctgggcggccgtctccttcctgctcacctccggcgcggcgagcctggggcggagccgcgctatttacataaagggcgagcctgccggggcccagcgccccgcccccggcccgccccccagctcggcgccgcaggggcgggggcaccctcgggggtgggggctgcgctcctgccaatccgcggccccgggaagcgcggggcggggcctcgcgaacggcctcggggttccgcaggcccgccccggcctcacctgcgcgcacctggacgcagaacggcgcgccgcgcccagtgtcccgccgcctcccgcaagcggaaatagttcccggaacgcctgcggtcccgggccgcctcccagactccaggggagccgtccctccaactcccgggagctgccgagggaggggcggatccgggccagctcctctgccagagcccagcccagagagggtgaccgggggacgcagggccgggtttccagccccacgagagggatggtgtagggaccggggcgtcgcggcgagacgcctttcctcgggggggggtgcgggggggcgcccacctcctccgtgtcggccggagggtctgcaacagcgggtggaatttttagcacaagcgagggaggaggttggagcgacgagaggcgggagcggaaagggcgcggaggccggggctgcagcgcgctccaccgcccagctgcaggtggcgcctctcgccacccgcaccccgctgcgcccagggaagggccgatggcgcgccgtcctccctcctcccttcgggaagcctgcgacgtcccatcccctccgacgcaggcccgggaaaggctcaaaaggttcgaggtcgcgttcctgctatcccgcgggcttctctcactcttagatcccgcaccagaggaagcggatctccttgagtgggcaaagcaggggtgaggggctgggggcagttccactgacaacgggacgggggcgagaggggtttacccagtacatacagaaacagcagaaaagaaatctatttttaatggctttggctttatagcacgaagcaggcaccctctcgttaaaggcacacagtcctctcttctgccccacctcctgggtccttaaaatcgagtcctgagttccagaggggtcactgcaaggcagcagggaagggagagggtcacagtttcactctgtgagtatcagacacccagggccaaggcccagactggcctctgaagctacaggttagagtctgggtacaggaggcagccgagatggtccctgagaacagacagtcccggtcccccggagcaagctccatcctctgcagagctgtgaggtcagtgccccacatcctggggcaacgtgaagtccctgaagctgtagaaggagatgtcaccatgatccaccagggcaaagatcagagggacatccccactctggtaagacaaccgcttgaggctgcagaggtctgggacaggctcatcaaatctgcagggacaaagggttagagtgagacccagccatagcccactcctaagctctagggctcccagagaagagattctacggaaggagttggggtgcaagaattctgacccatgagttctgtctccaaaacacagggctctgatgaagagcgccccagagcactggttggggaggtgctaggaagagcaaggtgctcaccactcttagcctgtaaatccccacaatccacatcccttctgctgggtgagtcctagactaaaatggcattggagaaagactaccctaaaatgccagcaacgaggagctcagagtagggcagcacaaactggctgtgtggccttgtgtaggtcacttagcctctctggacctcctgttcctctcagagattggcacgctggccaggggagtacagaggagtcccacttggttcacaggagaactggcagcagctgggggaggggcagtgctggctcactgcgtacccactaatgcacatccgggcatagggtttgccagggttattctttcggaatgtggccacagcgtcggcctggtaaaca

SEQ ID NO: 1244259 - DNA, 4001 bp, Homo sapiens
ggtggccttgacggagagtgagggcttcctggtgactgagcctcgctttcctcgtgtgtcctgggctcggagaagtcctttctggaggaaggagggtcccttcctcttggtcagggcgggaagaaatgtgccccaaggagggatggcagcgcccactgcgcccctttcctcctccccccaccccgggctcctcctctgattccgttttggggactctttcctgcccctcagagtctgaggcttctaggcctgcgctgttcataccttgaccccaccccagcccccatgttcgcaagcctgtgtcccctggagcctcttgtcacagaggaccctctcctgtggagtcccagggctccactcgcccccatggggtttccagcttgcagcctggggtcctgggacgggtgcagggaggcaagtggcccccagcccacggagccccatcatgcagaaaattcggcaaaacccagcttcctccgagtgaggcggctgtcccagggcaagctcggggagggcactgttgccccgctgtcccttggccacggcagggttaggctgtagcatgggcaagactcagggacacagaaatcggaaggggagtctaaaagggggtccagccctgcccagcagcctcaccacctggtggcatcacccccacgctgggcgagctgccccctctccagggcagggctccaaaccgctctgggggaagctggcctcagctgggtgtcggggggcctgggcccatttgcctggacgctgcgggcaccctgcccctctggctccccggggtcctgggcctctcgcgggcaggaatgccatctgtgccatctgaccagggctcccctcactgtgcaccctggcgttttggggcgtgggaaggcgttcaaggctggtttctgtttccccgtcaagccctgagtggagtgcgaccggaggctggccagtggctccccgggcacctaggggaggctgggggcaaactgaggcagtctagagcctacaatcactccaggggcctgtggggcagggacagggctgaggggacctggcaccctgtgggttccccagcagtgtggctggggacatggggacagagcccaccttgcagcctctgatctctgggcctggacatttgtttggagtagtgttcactggtttgttttgttttcttttttttgagacagagtctctctctgttgcccaggctggagtgcagtggcgcgatctcagctcactgcaagctccgcctcctgggttcgagcgattctcgtgcctcagcctcccaagtagctggggctacaggtgcccaccaccacgcctggctaatttttgtattcttagtagagacggggtttcaccaagttggccaggctggtcttggactcctggcctcaggtgatccacccgcctcagcctcccaaagtgctgggattacaggtgtgaaccaccacgcctggcctgttttgttttctgattgcaaaatgaatacatttcaaaagggaaatttgaaaaatataaaaaatccttaaaaagagaataaaacccacccatcaacccatcatgctatacccaggaacactacctccagcttccaggacccccaacctcagccaagggtctccacatacttctctcttctgtaattgggtcttcccgcggaggctggggcctgggcggatggatgcccagggtgggggctacctcctctggactgccgagacctccccagcaatgaggtgccagaccaggaccggggtgaactcaccatgagcttctgttgccgtctgggcctgggctgggagcaggaatctctggggaaggccaagcatgtttcagagtcatcgggatcagggccaccctctccctcccccagtgtctgcagccattttcataggaaaaaaactgggtttaacaaagctgttccagacctcctgacctgaaactgatttctacccttccgtgtggccctaaggctcccaggcacgaggcgcatagctaggggaagacagtgcctctgacacccatttaagagttaactgaggccaaaaagccgctctgcacgcccctcttgttcagaggcccactgatcccctggtcccgtggtcaccacggggtatgggtgcagacaaagccgtgttcatggaagctccgggcctgatgacagtggcacaaggaccccattctctgctgtctccagctgcatcccctcccccagccggcctgacatcagagacagcgggtcagacatcccgggatcccccactcccaccccagggcgcaggctcagctgctggggctcagggaaatgcacaagagggcctgtgctggggagacagggcgtggatgaactgcctgagtggtgcagacagctgcagcttggcccagcaagtcttcagtgggaagctgcctgcatttttacaactgatttttgaacctgaaagtggaggttcacatccagcctgttcaacgtaatcttgttggttccagtccaacgtgaccttttggaatctggtttccagactcttgccatatattagcagttcctcccggctgcaggctgcgatctgccttgctggggcctcatcccagagaaacaggctggccgggagcattcggaggggcttcccaggaagagctggaccctgacacatctttccgtgggtgctgtggccaagacgcccaatggctggtcatgaggcccattttgttctgctcctggtctacaaggcagaagtcgggacgcatcatgtctgccccagccaggagtcttagggttgtcccaggcccaaaagtcagccaaccctagtactagttttccagaagaatccagagcctacgcacccaggccctcagtgtgaacaagggcacgttatttgctctcacagtctccttctgctcatctgtaaaatgggcatggccaccatgccctctgtgtcccaggctgtctagagggttgagcaggcagggtaggatctggtacccaccatgcccccgatgcccacgcaggccagagaggggagaaatggagttggctgaggcctggccctccaatgccctctctgggctctgaaccagggctccgtccgtcccctggggctgcctcccgcaggccagggctcctttatcctccccgttgagcacctggggcgcggggatgacagcctcatttccccaagcagcccccacagggctccctggattcctctctgacaagcacatgcgccggctctggtcttggctccgtgtgccccagcacgacagaacaagtgcggcaagacccaggcctgcagggcggcggcaagtgcccggaggggcggaggcgggggtagggggtatgccggcgcccggcagtgtcgctgtccccgcgccaccgaccccaccccggcgtgaccttccctgccgcgcgcccaaaggccagcaaagcaggcggcgcttttaaggacgcggcggcgcggcgggttcggtgccaggaggcgccggggggcggagggagggggcgctcgaggccagaggagcgacccccggcagccacccaggcgcgccccgctcgtcactcgctctcttctcccacttgcgccggccgggggcggggcgcggcggcgagggtgggggctgggcagccggggtcctccctcccccgctgtgctggaggcagcggggcgctccccggagctggggcgcggagggagggccgagggcgcgtcggagcctcatccggcctgggccctccgagcgggagcgacccgggtgcggggccccactctgcctggtcgccccgagcgcgtggaacgcgagccgaggttccgcccgaaatgcggccggcgaaggggtgcggtccgggcggggtcgcgcgcccccagcacgctgcctgggctctggaatctgggagaagcctccagcacgggctcccgagcgcacaaactcagggacgcccttcctcccgtccctggtcccctccccgaaaagcgagggggacgggcctggagggaaacggattc

SEQ ID NO: 1244260 - DNA, 4001 bp, Homo sapiens
caggccagtggatggttctggggaaagggtgaaaggctgtgtcttgtatctgtgtctgcccaagtaaggtccccagtggcctcaggcatgacactgaggtttgaagcaaggtttcctaaatctccaaggggtgagggatgctatatttaccactgggcttcagctggatcagctagaggccaaaaaaagtgagccacacaacagaaccagcttcctatggacacgtcagagggggaaaccagcatctcaataaaaccaaatcagctccaacctgaggtctctgcctgctggctgcaacacagccctcagctaccaccctgtgtaagttttgtcgcatttcaaacagcaaagacagttggatgtcagagacagtttgagtctccgacttttgtggaattcccagtgcgagagcctgcgggctcagggaaaatttccccagtggcagtgctttgctcccaacatgcgcctcgcctcccagcctccccgctattgaatccagcatgattggttctggggcccataatggaattttatcagggattcctataactggattgcttatttgcagccttccgccggcagcagctccagataaagaatgcagagtatgtgcttcagtgtcacaaactgtgcctagccaccatccatcatcctgtcaagacatcactccagacagcccggcttcaagcagaaccaggttggggattttcctcccaagaataacaaacagcagctaagtcaggttaggagcctctgcttccccccgatcccttcattacagatgaatgaattttgggtttccctacgttgtccagctagtcctcctccatttcctcagggcgtagagcagcaaaagtcaccaaccctcatccagttcaagaagcctctaaatgtcacgtaagtttatgcaacccttggcaggtaggatatggagtttggaatagcagaaattctttgcaagtagagagcatttataaaattcatccacgtaccttatcctgttgatctttacggccaccctataaggcagggattgtattccccagttgccagttgagctgaatgagactcagagaagttaagtgagttctccaaggtcacatagagtcaggggaagttggggtctgctcccagttcttttgactctaaatcatgcactcctggtactccttatgttgcagctattctttcttccccatactcctcctctcctcaaactgtgtctctctgttgctatctgtctttccatacctagtcccgagcatacagtgaaggtctgaccatctcagaagctgcatggagggagggtctggccatctcagaagcttcatggagggaggggctggccatctctgtagctgcatagagggaggggctggccatctcagaagttccatggagagaggggctgggcatgtcactggctgcatggagggaggggctggccatctcagaagctgcatggagggaggggctggccatctcagaagctgcatggagggaagggctggccatctcagaagctgcatggagtcggggtctggccatctcagtggctgcatggattgggggactggccatctctgtagctgcccttgattgtctccagagaggcactgactgatcatcggcgagtctgccttcccctcctctgaatcataaccaaccaggatcagcgaggctggagctatgagggggttgcttagagtgatctagttctcctctttgattggatagatccaggagccagctgaggccagcacagttctctccctagtgaatgtgacaataggcctgggtcctgattccccacatcctactgcctaacatgatgcacccatcatctccaaccaagagacagggatcagagactcaacatgttagcaaactacaactcacccacatgcaagccagctgtccaatgggaattctcctgattgagtgatggggtggactgaggtttcacacttgcttcctccagtgatgcagagcaccatttccaaacccaaatagtcctctggctcccaaaatgagggagaagataggaggggaaggaggagctaagctgcacccattatcagtgagcacaggtgcaggagagagggggtgccagacacatctccacctccatccctggatctgtgattgacaggcgctcatgtaattcacagaggccaaaggggatgaggtaggcagaataacagccccctaaagatacccatgttctaatccctagaacatgtgaatgttaaccttatatggcaagaaaaggattttatagatgtgattaagtttaagttctaaaaatggagaggttatcccggattatctgagtgggtccgatccgcaatcacgagacggaggcagaggcagatgatcgaccccagacaggagaggagaatgcagcagggcccgcagaggcagaggctggaatggagcagccccaagacaaagcatgctggccaccaccagaagccagagtacatgaggcacagacccttccctggagcctccagggaagcacagccctgctgacaccttgatttgcgcccattgagacttattttggacctttggcctctagaactgtgacagaatacacttctgttttttacacactttgtgtgtaagactgtgttaccgcagttgcaggaaactcacaccagggactagagcagcactggcggtgaccgctggtgctggcagatctgtccaagtggaccaggccctggttccacaagtgaggccctcatgcagagggcgggtctgcacacctggaagggaggtggtgattaggtaatgaacagttcttccattcctgtcccaattgaacatggtggtcccctctctcctattcaccctcgtccagcctcctccccaccaaccccatctgcctcccgaaagggcacttaccttcaccttgctgctgctctgatgtatttgtttttgcactgctataaataaatacctgagcctgggtaatttctaaagacaagaggttgaattggctcatggtcctgcaggctgtacaggaagcatggcggcatctgcttctggggaggcctgagggagttttactcatggtggaaggcaaagtgggagcaggcgtcttacacggcaggtgcaggacccagagagagaacagggaagtgccacacacttttaaacaaccagatgtcactagaactcactcactgtctcaagaacagcacccagggggttggtgttaatccattcatgagaatccacccccatcattcagtcacctcccacaaggccccacctccagcactggggattacatctccacctgagatttgggtggggacaccgattcaaaccacatcacccgatatttacccataggtctcagggcttctgccctctccccagggtgtcaatataggctaagtctatggtctgtccaggaacccaagcctgaagcagggggcctgactgtacattgtgaagtctgacatgggtggtgagtgtccgcctcactccctgccacctccctgcatcggaggtgagtggagccaactcaccttcttcttcctcaaggccccactgagacccaggaccagccccagggtcttgtgaactctcccttctttcctgcctgtccccacctgccacacacacacacacacacacacacacacacacacacagagagagagtcaaaggttaagaggcacttttttctttctttctttctttctttttgtgatggagtattgctccatcacaaaagagatcttggctgcaggctgatctcggctcactgcaaactgtgcctcctgggttcaagtgattatcctgtctcagcctcctgagtagctgggattacaggtaagctccatcacagccaggtaatttttgtgtttttagtagagatagggtttcaccatattggccaggctggtctcgaactcctgacctcaggtaatccccccgcctcagcctcccaaagtgctgggattacaggcatgagccactgt

SEQ ID NO: 1244261 - DNA, 4001 bp, Homo sapiens
atggccttctctgtgtctgcagtgatgtctgcagtgacgaacgcccggggtggtgagctctaatggccgtctctgtgtctgcagtgatgtctgcagtgacgaacgcccggggtggtgagctctcgactttagagagagaattgcatcctcctggaagaaggggttgtttttaccgatctgtctcaggaagttgcctggggctgatgagcctctgtcccctaggaatttttcgggaaattatcaccggcaactcctgttccgttccctgtacccctcgggtcctcctagtccctgtactgcggggttttacaagggttccggaacatctgcctgctgggccggccagcccgagtgctgcctctgctcagcgtgtgtcgcccggcggggtcgaggtggcaccaggaggtctcagcttcccagaggaggctcctgggggcaccagcccctcagcaaggagcgagctcagccgtcaggtggagctgccttgaggccgactaccccgtggggaatcttgagggacaaacggcctgtgagtcagcaagtcgcagagcctggttagagtccagctgtctgctctgagcatgtctgggctgttttctgaattcttccttgtctgggaaagccacatctctctgatgaaatacagttgaattaaatggatattccctgagcacctactttgcagcaggctctgtgtgggcatcaggaagggagggaaggaggaggatgtagggaccctctagggcacccaaggtccagcagggaaggagaaatggaaatttcatgtcgatagaactgaacacttctgggcgggctcctgggtggatgcccaccctctccacgaggggcttgccttccccatcagcagccttgacctatgtgctcattgaatatgctcctgtacacacacacgcgcacacacacacgctcctccttccccagcctcttacctgtcccagctggtaggacctcagagacagacctggccctggggatcacgtctctagtttacggaggaagtggccagagctccaccagccctgtccacagaacctcctgtgtctgctccccgcagagctccaccagccctgtccacaaaatctcctccgtcttctccccgcagaggtccatcaaccatgtccacaaaacctcctgcctctgctccccccagagctccaccagccctgtccacagaacctcctgcctctgctccccaggccaattccatcctccctcctgaatttgggggtttgccttccctgcttttccactcaccttctataaggccctattttgttccctcatcagtttaatttttgtccaggacaaatggtcatacctgagtacaagggcgcagtctgtgtttaatgcacagggcactgctctctggagttttcaggaccctgcttttaagagagaagggtcagactttctgccctctgagcccaagaggtgagtgctgagtggtggcgagcatagtttacccactggtgaagggggtgccgggcatgggggtcggctgatgaggccctccttgctgccgagtcagggagcctctgcatgctgacgaggtttggagaatcgaaactggctccgtgggcagtttcctaaaatgtgcctcctcgagttgcccttcctctcccaccatctgtcccgaggttgctccgtgcgagtgaaggacagctgtgccttctgaggtgccagccacggccagggtgggggtgcacagccgtcccagagccggggcctgaattctcctgggtcctcatgtccgacctttgctcagggccacccctgtgaacgtggtcagccacagacttgccatcagtgatgaacctgccctggcgctgcccgtggccccagctctggaggcgacatccttccgtctcccttgatctctgcagcatttggctctttccgtctcccttcatctctgcagcatttggctctgtggctcttctgccctgaagctacagcagtgagaggggtggggacatgtaggaagcagttctcgcggcctcctcctctctgtcctgtggactgggctggggagggctcagttcccacctcccacgtgggagcagccagcagcctgcctgctggctgcctgcctcccttgcctccctcgcttgcctccctcgcctccctcatgtaactcagcagggtccaaatcaggcattgaaattgcaggaggcggttgctccggcctgtctcaagctctgttgggtgccgatggggaaactgaggctcaggaagacagttgacttgttcctggacttctagtaagtttacataaaagccaaaatttcacagatcttttttttttttttgagattatgtctcgctctgtcacccaggctggagtgtagtggcgcgatctcagctcactgcaacctccaccccccaggttcaagcgattatcctgcctcggcctcccgaatagctgggattacaggtgcgcgccatcacgcctggctaatttttgcatttttagtggagacggggtttctccatgttgcccaggctggtctcaaactcctgagctcaagggatccacccacctgagtctcccgaagtgctgagattacaggcgtgagccaccccgtgtgggctgtagtatattttagtgtttactttgaaaagaataatgctttgtacacccatgtggagcagtgtgactgcacaagataactgaagtttttaaaaagcaaagcaaaccatagtgctctaaaggctgggatggggcactgatttaaagttgtttgaggacggtatcatttttgacctgtctttccttgcttgtccattagcctcatctgggagaagattgagcctccatctgaggaggtcctgggtgatctgggcccggccatgggatttccacgcttggctgtttggggtctggggctgcccaggtctctttgctgaggcagctcactggggagggtcaggtctgatctggaagagcaggtgcctggacatgtgcatggggtagagcgaccagtgtggttaaggttgtggcctggaccctgtgtggtcaggcggaggcggtctgcatgttacctctgctggtcatcatagaaatgggtggcactggccgagaaaagcagttctccaagctgggcccaggcctctctgggggtcccccaacaccctccggagatccacaggtcaaaagtgtttccataagaatagtcataggactctgggttttatcctgtcacaaatgtacagaaaaggagaagttcattgatgtggtttcagatgccacatttgaactaatctttaagaaattaccatctgttgagtttgggtgcaatatcaaagaaaaatatttacaatttctggaaagtaaaaaaagtcctcctcttttcagccatcatacgtatttgtgagggtctggatgtccttcaaggacttcagcgaaacaacctgccacaaatgcgtgaatgaaaaatcagatatgaaggtccagctgttttttgtgaagtcaaacattaaaaagagttgtaaaaatgtaaaacagtgtcatttgtctaattgctttgtaagtgtagtttttcataaaatatgtaaattatgtgaacgtctaatgggtttattatttttaatgaattaacaacattttaaagattttctcagttttaatttctagtgtggtaactagcaatggtcatagcccatgtattttggagttctcaagaatatatgtatatctatatattttttgagacggagtttcgctctttttgcccaggctggagtgcaatggcttgatctcggctcactgcaacctccacctccagggttcaagcaattctcctgcctcagcctcctcagtagctgggattacaggcactcgccaccacacccagctaattttttttgtatttttagtagaggcggggtttcaccatattggccaggctggtcttgaactcctgacctcaagcaatcctcctgccttggcctcccaaagtgctgggattacaggcctcagc

SEQ ID NO: 1244262 - DNA, 4001 bp, Homo sapiens
tgcaggggagtcagggaggagttctgtccctggaaaggaggttgacccgacctggtgagacatgtcctgcgtcagaaaggcctttctaaaagcaaacccatccctgagctgagacaggtgctttaggggtgaggggagtgcagaggactcactgtacaatccccaaatgatcgacgttgttgttgtagcttcgaaaaggcttaggccccttgtcctctggcagcccagctcggtgtccctgtagcccagagggagccttggtgaggggtccaaggtaaagggtgcaagggcctgggggcattggccacccgtccctgccctgtgctcctagggagcccaagaccctttgaccagggcacactggaagaggcctccctccaagaagcagaccgacttgtaccttttcgtatttcataatgatgtcctctcgctcttgtgcccaccaactacccgcgacctctaccacgtccatcctgtgagacaaaattgtctaaaggtcacactgtacgcggcggcttcggagaacacctgaactgctctcgccgggctcccagatgctggctggctgcgtaacccccattccaccgccgcccccagggaaaaaggggccagacccagtggcccacagctgctccagtctctggagtctcaagtcccaagcaggggtgggcatcttcccaaggacttgagtacagtgggacctagacagagaatcctgttgtcccccaatgccatgaaatggggacacaccggccccagcaggttgaatggtttccacctgccaagggtgaagggcccatgatgggctattccagggatgtggaggcagactggggtcagcgaccagaggtctctgtgcaatcggcctcctgggatgctcagggcctcagagatgcccagtttcctacagggaacaagatctctcccgactgctcggttctactccgctcatcactttggctaccgtggctcttcagtctgaacagtgaagccactttaggaataacgcctgttgagcaggagggtgttgggtttgggggatgaggaagatctattgtacgcatggaaaccacgtctctcgcggagggactgtggagtccaccattctgagccgtcccaacaggaggaggcttcattttcctgggtcactgaggaagaacagtgggtccttggtcctggagaacagctggatggaccgtccctcctgggaatactcgaggcaaaaggagggcgaggcttcaagaggaccacgcagagcaagaaatacctggggagaaccctagtgcccggacccctttgaacacaagggaagatagtctcccctcagccagccctccagggctccttcattttccacagctgcccaagggcagcaggctcccccggacaaggcaccatgtgtgttcagtggggcccacagcgaccatcaggacccagcttagggcacagaggtgttctgaggaccgtcagtggatctgtaccagtggctctataccagtggctctgccaggaccaggctctgccccatcgggatgggaaacctgggcagatttgggatctagggcagggaggtcacagggttcaggcctgaattccagcacagcacacggcagggctgagagcaaaactcagggtcatgtccggattcccaggccggttactgcctctctgaccccagacgtctcatctgtcgaatggggacatttgggaacagcacccactctacgaagccaccatggagacgaaagagccaatcgtctacacgggcagtgtagaacgggcgcctggtgagtgctcagggatgaccctcctcggtagctgccccacagaggccaacaccgcccgcaccgtagccactgtccccaagtccgcctggagggaagagagcaggtcacgctcacctgattctgatgaatcagctggcctgggtcatgcctctcagggagaaaacctttgagtccacagagctgctcacagataccactgcctgtgtgtaactgctgtagaccactgaggcaggccagagagcagataggtgctaagcaccagtgacattctgaggtcatggcacgaatcacagtggggccttgcccgggtcagcagcacccagagtcagggtcctccgctgcctgaggcgtcaacatgcctgcctgcaacgtgtttgtgcacgtgcgtgcacacgtgtatgtgggtaaacatgtctgtgcacatgtgtgttgcttctctggccaggcccggctgccccactcatgtgtgcacccagttcctcatcactgtcacccccgaggcccagggccagcatcagagcatccatggctgctccctaacctcagccctccccgcccagggtggtcctgggatacacataggggtggagggaagtgactgctgctgttggatctcagaatacaaaagctaatactattacctaatggtctttttagtgtatctaatggtatcgctttttcatttctgatattttaactgggtatttctctccatgacccttggatattctagctagaggatcctgtggggaaagtgccgagcacacagtaggggctcactcttctagacatgttatctaaaacctggttcatctgtccttccacgcagggcctaggggatgccaaattccagggtccagaaagagcttgggataaaatgaaacttcaaggggacggctttgacctgggctgagtctgtctgtgccatccaactggagtctcaagtcctgaggcaggacgtccagatgccccagtgcagggccctcctgatcaacacctgctcccctgtactcattagcaacctcacccaccctactctcaaagcacacttggctctcgtatccaggagctctgcatctatagattcagcaacagcagatggaaaatattcagaaaataaattggatggttatgtttctattgaacatgtgcagactttgttcttgtcatcattccctaaagaatacagtatcacgaccatttatgtagcatctgcattgtattacacatcataatctagtaacggtctaacgtatacgggaggatgcgcatagcttatacgtaaatactaggccatgttctatcagagacttgagcatccatggattttggcattcccggggaccctagaactaatcctccatggataccaagggatgactgtatatactcactcaggaaggcttctcattggaggaagggcccggttcaggacagacagggacatcatccctggactactgtccatccatccattcatccattggcaccaccctctaggactgtcccaatgacagccctagcaagtggagataagaaaaaagactggctcaaatggtacagctttgaggtcttggaagatgttgcaccagtatgagaatagggggtcagtttcctccaggatccagaaagcatatcaggcaggctcggggagaggaaaggaacacggcctctccagcagccacacaggcctgcagtaggatggggctggggctggggctggggctgggactggggctggccccgtttatcacttgggcctcatgaggggaaaagaaaggacagggggcagaggaggagcatgggggcagcgggttgcctaaggagaaggcgcctcagggaaggggtattagtttgttttcacactgctataaagaaatacttgagcctaggtaatttataaaggaaagaggtttaatcgactcccagttcagggaacttacagtcatggcagaaggcgaaggggaagcaggcaccttctccacaaggcggcaggagggagtgagcggagaagcaggaagtgccacactttcaaaccatcagctctcctgagaactccctcactatcaggggagcagcaggggggaaactgtccccagatcccatcccctcccaccaggttcctcccttgacaaaggaggattacaattccagatgagatttcggtggggacacagagcccaacctgtgagggtctcaatctatcttgtagct

SEQ ID NO: 1244263 - DNA, 4001 bp, Homo sapiens
tgcaggggagtcagggaggagttctgtccctggaaaggaggttgacccgacctggtgagacatgtcctgcgtcagaaaggcctttctaaaagcaaacccatccctgagctgagacaggtgctttaggggtgaggggagtgcagaggactcactgtacaatccccaaatgatcgacgttgttgttgtagcttcgaaaaggcttaggccccttgtcctctggcagcccagctcggtgtccctgtagcccagagggagccttggtgaggggtccaaggtaaagggtgcaagggcctgggggcattggccacccgtccctgccctgtgctcctagggagcccaggaccctttgaccagggcacactggaagaggcctccctccaagaagcagaccgacttgtaccttttcgtatttcataatgatgtcctctcgctcttgtgcccaccaactgcccgcgacctctaccacgtccatcctgtgagacagaattgtctaaaggtcacactgtacgcggcggcttcggagaacacctgaaccgctctcgccgggctcccagatgctggctggctgcgtaacccccattccaccgccgcccccagggaaaaaggggccagacccagtggcccacagctgctccagtctctggagtctcaagtcccaagcaggggtgggcatcttcccaaggacttgagtacagtgggacctagacagagaatcctgttgtcccccaatgccatgaaatggggacacaccggccccagcaggttgaatggtttccacctgccaagggtgaagggcccatgatgggctattccagggatgtggaggcagactggggtcagcgaccagaggtctctgtgcaatcggcctcctgggatgctcagggcctcagcgatgcccagtttcctacagggaacaagatctctcccgactgctcggttctactccgctcatcactttggctaccgtggctcttcagtctgaacagtgaagccactttaggaataacgcctgttgagcaggagggtgttgggtttgggggatgaggaagatctattgtacgcatggaaaccacgtctctcgcggagggactgtggagtccaccattctgagccgtcccaacaggaggaggcttcattttcctgggtcactgaggaagaacagtgggtccttggtcctggagaacagctggatggaccgtccctcctgggaatactcgaggcaaaaggagggcgaggcctcaagaggaccacgcagagcaagaaatacctggggagaaccctagtgcccggacccctttgaacacaagggaagatagtctcccctcagccagccctccagggctccttcattttccacagctgcccaagggcagcaggctcccccggacaagggaccatgtgtgttcagtggggcccacagcgaccatcaggacccagcttagggcacagaggtgttctgaggaccgtcagtggatctgtaccagtggctctataccagtggctctgccaggaccaggctctgccccatcgggatgggaaacctgggcagatttgggatctagggcagggaggtcacagggttcaggcctgaattccagcacagcacacggcagggctgagagcaaaactcagggtcatgtccggattcccaggccggttactgcctctctgaccccagacgtctcatctgtcgaatggggacatttgggaacagcacccactctacgaagccaccatggagacgaaagagccaatcgtctacacgggcagtgtagaacgggcgcctggtgagtgctcagggatgaccctcctcggtagctgccccacagaggccaacaccgcccgcaccgtagccactgcccccaagtccgcctggagggaagagagcaggtcacgctcacctgattctgatgaatcagctggcctgggtcatgcctctcagggagaaaacctttgagtccacagagctgctcacagataccactgcctgtgtgtaactgctgtagaccactgaggcaggccagagagcagacaggtgctaagcaccagtgacattctgaggtcatggcacgaatcacagtggggccttgcccgggtcagcagcgcccagagtcagggtcctccgctgcctgaggcgtcaacatgcctgcctgcaatgtgtttgtgcacgtgcgtgcacatgtgtatgtgggtaaacacgtctgtgcacgtgtgtgctgcttctctggccaggcccggctgccccactcatgtgtgcacccagttcctcatcactgtcacccccgaggcccagggccagcatcagagcatccatggctgctccctaaccccagccctccccgcccagggtggtcctgggatacacatagcggtggagggaagtgactgctgctattggatctcagaatacaaaagctaatactattacctaatggtctttttagtgtctctaatggtatcactttttcatttctgatattttaactgggtatttctctccatgacccttggatattctagctagaggatcctgtggggaaagtgccgggcacacagtaggggctcactcttctagacacgttatctaaaacctggttcatctgtccttccacgcagggcctaggggatgccgaattccagggtccagaaagagcttgggataaaaagaaacttcaaggggacggctttgacctgggctgagtctacctgtgccatccaactggagtctcaagtcctgaggcaggacgtccagatgccccagtgcagggtcctcctgatcaacacctgctcccctgtactcattagcaacctcacccaccctactctcaaagcacacttggctctcgtatccaggagctctgcatctgtagattcagcaacagcagatggaaaatattcagaaaataaattggacggttatgtttctattgaacatgtgcagactttgttcttgtcatcattccctaaagaatacagtatcacgaccatttatgtagcatctgcattgtattacacatcataaataatctagtaacggtctaacgtatacgggaggatgcgcatagcttatacgtaaatactaggccacgttatatcagagacttgagcatccatggattttggcattcccggggaccctagaactaatcctccatggataccaagggatgactgtatatactcactcaggaaggcttctcattggaggaagggcccggttcaggacagacagggacatcatccctggactactgtccatccatccattcatccattggcaccaccctctaggactgtcccaatgacagccctagcaagtggagataagaaaaaagactggctcaaatggtacagctttgaggtcttggaagatgttgcaccagtatgagaatagggggtcagtttcctccaggatccagaaagcatatcaggcaggctcggggagaggaaaggaacacggcctctccagcagccacacaggcctgcagtaggatggggctggggctggggctggcactggggctggccccgtttatcacttgggcctcatgaggggaaaagaaagaacagggggcagaggaggagcatgggagcagcgggttgcctaaggagaaggcgcctcagggaaggggtattagtttgttttcacactgctataaagaaatacttgagcctaggtaatttataaaggaaagaggtttaatcgactcccagttcagggaacttacagtcatggcagaaggcgaaggggaagcaggcaccttctccacaaggcggcaggagggagtgagcggagaagcaggaagtgccacactttcaaaccatcagctctcctgagaactcccgcactatcaggggagcagcaggggggaacctgtccccagatcccatcccctcccaccaggttcctcccttgacacaggaggattacaattccagatgagatttgggtggggacacagagcccaacctgtgagggtctcagtctatcttgcagctcc

SEQ ID NO: 1244264 - DNA, 4001 bp, Homo sapiens
ctgcaggggagtcagggaggagttctgtccctggaaaggaggttgacccgacctggtgagacatgtcctgcgtcagaaaggcctttctaaaagcaaacccatccctgagctgagacaggtgctttaggggtgaggggagtgcagaggactcactgtacaatccccaaatgatcgacgttgttgttgtagcttcgaaaaggcttaggccccttgtcctctggcagcccagctcggtgtccctgtagcccagagggagccttggtgaggggtccaaggtaaagggtgcaagggcctgggggcattggccacccgtccctgccctgtgctcctagggagcccaggaccctttgaccagggcacactggaagaggcctccctccaagaagcagaccgacttgtaccttttcgtatttcataatgatgtcctctcgctcttgtgcccaccaactgcccgcgacctctaccacgtccatcctgtgagacagaattgtctaaaggtcacactgtacgcggcggcttcggagaacacctgaaccgctctcgccgggctcccagatgctggctggctgcgtaacccccattccaccgccgcccccagggaaaaaggggccagacccagtggcccacagctgctccagtctctggagtctcaagtcccaagcaggggtgggcatcttcccaaggacttgagtacagtgggacctagacagagaatcctgttgtcccccaatgccatgaaatggggacacaccggccccagcaggttgaatggtttccacctgccaagggtgaagggcccatgatgggctattccagggatgtggaggcagactggggtcagcgaccagaggtctctgtgcaatcggcctcctgggatgctcagggcctcagcgatgcccagtttcctacagggaacaagatctctcccgactgctcggttctactccgctcatcactttggctaccgtggctcttcagtctgaacagtgaagccactttaggaataacgcctgttgagcaggagggtgttgggtttgggggatgaggaagatctattgtacgcatggaaaccacgtctctcgcggagggactgtggagtccaccattctgagccgtcccaacaggaggaggcttcattttcctgggtcactgaggaagaacagtgggtccttggtcctggagaacagctggatggaccgtccctcctgggaatactcgaggcaaaaggagggcgaggcctcaagaggaccacgcagagcaagaaatacctggggagaaccctagtgcccggacccctttgaacacaagggaagatagtctcccctcagccagccctccagggctccttcattttccacagctgcccaagggcagcaggctcccccggacaagggaccatgtgtgttcagtggggcccacagcgaccatcaggacccagcttagggcacagaggtgttctgaggaccgtcagtggatctgtaccagtggctctataccagtggctctgccaggaccaggctctgccccatcgggatgggaaacctgggcagatttgggatctagggcagggaggtcacagggttcaggcctgaattccagcacagcacacggcagggctgagagcaaaactcagggtcatgtccggattcccaggccggttactgcctctctgaccccagacgtctcatctgtcgaatggggacatttgggaacagcacccactctacgaagccaccatggagacgaaagagccaatcgtctacacgggcagtgtagaacgggcgcctggtgagtgctcagggatgaccctcctcggtagctgccccacagaggccaacaccgcccgcaccgtagccactgcccccaagtccgcctggagggaagagagcaggtcacgctcacctgattctgatgaatcagctggcctgggtcatgcctctcagggagaaaacctttgagtccacagagctgctcacagataccactgcctgtgtgtaactgctgtagaccactgaggcagaccagagagcagataggtgctaagcaccagtgacattctgaggtcatggcacgaatcacagtggggccttgcccgggtcagcagcacccagagtcagggtcctccgctgcctgaggcgtcaacatgcctgcctgcaatgtgtttgtgcacgtgcgtgcacatgtgtatgtgggtaaacacatctgtgcacgtgtgtgctgcttctctggccaggcccggctgccccactcatgtgtgcacccagttcctcatcactgtcacccccgaggcccagggccagcatcagagcatccatggctgctccctaacctcagccctccctgcccagggtggtcctgggatacacatagcggtggagggaagtgactgctgctgttggatctcagaatacaaaagctagtactattacctaatggtctttttagtgtctctaatggtatcgctttttcatttctgatattttaactgggtatttctctccatgacccttggatattctagctagaggatcctgtggggaaagtgccgggcacacagtaggggctcactcttctagacatgttatctaaaacctggttcatctgtccttccacacagggcctaggggatgccaaattccaggggccagaaagagcttgggataaaaagaaacttcaaggggacggctttgacctgggctgagtctgcctgtgccatccaactggagtctcaagtcctgaggcaggacgtccagatgccccagtgcagggtcctcctgatcaacacctgctcccctgtactcattagcaacctcacccaccctactctcaaagcacacttggctctcgtatccaggagctctgcatctgtagattcagcaacagcagatggaaaatattcagaaaataaattggacggttatgtttctattgaacatgtgcagagtttgttcttgtcattattccctaaagaatccagtatcacgaccatttatgtagcatctgcattgtattacacatcatgaataatccagagatggtctaatgtctacgggaggatgtgcatagctgatatgtaaatactaggccatgttatgtcagagacttgaggatccatggattttggcatccccggggaccctagaactaatccatggataccaagggatgactgtataaactcactcaggaaggcttctcattggaggaaggtcccagttcaggacacacagggacatctccctggactactgtccattcatccatccattcatccattgtctccccccacccccccatctcggactgtcccagtgacagccctagcaagaagagacaagaaacaagttcacgttgtccagttttgaggtaatggaagaagttgcaccagtatgagaatagtgggtcagttttctacaggatgcagaaagcatatcgggcagcctcggggtgcggaaaggagcctggcctctctagcagccacacaggcctgcagtaggatggggctgtggctggccatgtggatcacttgggcctcatgaggggaaaggaaataccaggggggcagaagaggagcatgggggcagctggttgcctaaggagaaggcacctcagggaaggggactgtattcatttgttttcacactgatgtaaagaaatacctgagattgggtaatttataaaggaaacaggcttaattgacttgcagttccggaaacttacaatcatggcagaaggggaaggggaagcaggcaccttcttcacaagacggcaggagggagtgagtggagaaccagtaagtgccacactttgaaactatgatcctcctacctcagcctcccaagtagctgggactacaggcacatgccaccacacccagctaatttttgtactttttatagagacgaggtattggcatggtgcccaggctggtatcaaactcctggactcaagcagtccacctgccccagcctcccaaagtgctcggattataggcatatcag

SEQ ID NO: 1244265 - DNA, 4001 bp, Homo sapiens
tggatgagagtttccaggacccctaattctcccagcatttggtgctgtcattattgcctgggggagctcatgggccctctatcctgccaccctcccgtgggtcctaccatgggtccccatgggtcagggagagcacccttcaccattgtgcatgattttgtttgctgccttccatctcctcaggatcctcctgggttctggccccacatgttccagtctggcccagggcttggaaccagggaggtgctcggttcatggtgccggctgctccctgggtcgggacagttcttggcacctgtgtcatccctcctgggtgaccctggcttctactccagggaagcccccatccctctcattcaccccatctctgctgggaccctgtggctcccgtaggcttacttggttccgtatcgatccctgaagaatatatgcttccttaatgtcccgcttacgtccaggtcgatgtggtggatgtgttcagatgacctcttgcccttctccttcatgatctgtagggcagggccaagaggaggaagcagcctcagaacagatggaaggctccctgcccccagtggcagtcagcccacagtcagcactttgggaaggaaggacagaaggaaggtttctttgtgcagaaagctgctttttggcttgttactgaagccggggagggtcaccagagcccagtttgtctgtggtgactgtgtcaccatctgtgcccagggtgttcatctgacctttgcccccaccccctccagggtgtgcttgacgttccctccagctggagacctgggcccctgacacggcctgtcctgtttgttatgctctggctgagcgtaccttgtattttctggggtttttcgacttgatttcctgaatgttcaggaggactgaccacaccaggccccggatgttcatgggaatgcccttgtacactagatctatcagctgtgtgcaaaaaacaatctggtatcacaggccaccgggtgaccccagtgaagaccagagcccaaggattctggaaattgtcggttttggccccatgattcctcggtagaggtgagatcaagctgggacagggcctctcttcccaggactgagagtggatggacactcagagtcaaaactctgatctgaaccttttccttccttcaggtcaccagggcatccctagccttgagctccgggtagtcccagccctagattcagattccctcccagcaaggtgacgcttgcacgaataggcaggaaatctggcgaccaggcctgcagtcctctgggcgaggacagtgtgccacccaccctctgagaggctgacggtgccaggccacagccatgggtgcctgtcccctgtctctgcagagagtgcttccaggggcctctccctccacacattactttggtactgttcttatatgtctcccattctcccagcatttccatccacttgctcgttcgtctcatctcccaccacatttgctgtcaaatgaggtatgttggagttagtggagctgccaggctttccagagccacccgtggatgctgggtcttgggctctggacccctggtgggagccagctggaaggagccagggaagggcagacctcaatggctgagagcctttgagcaaatgagcaccagtgggctggctttgggacctggggacatgccatcctcaggccacaaacacaccagtcttaggtcccagcctctaggtggggtcctgacacaagcgggcagccactcccaagccaggactgtggttctcactttggaattttatcaaactgccaaagtcacagcaacctggggtcaggtccagcagggactgctgcccctcccagtgacagcgtgttgccctcacccaccaccgcccaggccagctgcctcctctgcctcaccgaccacctgcccagtccctacatccctggaccagcccctccatgcatcaggttcttaccttcacctcccacgcagtcagaggaggcagctccgtctcactgtaagacaacccaggcaaagctgaggacctgcacagggcctggagccatcccagactgggagccaatccccagaaaggactggctctgtccctatccagctcagggctcaacccaggagaaggcacagggaagggaggacaagggccttcctgtggggctgactcccagaaggggcaggacctgggagaagaaggagtgtagggacagcctggctggggttactggggcccctggcgtggggggcggtcaggctgcccagtggggctgcccgtcctggactcgaggtggtgctttctgctggagctgagaaaggttagccctgaggtgggatgggggccgcccagggtgggcgaccgggccctgacaggagtccctcagggagtgaccacatcaccctgccagggtcaagggagcctgccctgagacctgcccggtgtactctgggtgccccaggggcccatcccccatgacagccccaaggcccttgcaagttctgacctcccagcatccacctgcctctccctgcaccagagccacacaccctgcatttcagaagtggcacggctcatcagctccctcccaccctacctccccagggatcctctgtctctccatcctatgatccctgagggatcatcgatccggtctctactaaaaatacaaaacttagcagggcatagtggcacgcacctgtaatcccagctgctcaggaggttgaggcaggaggatcacttggactcgggaggaggaggttgcagtgagctgagattgtaccactgcactccagcctgggcaacagactgagattccatctaaaaaaaaaaaaaaaaagttttctgggcaccacattccaagtttatgtagttttcaaggaaaatagaatactgggcccttcgtagtccaggccttagctttgagtctataaaaaaaagtgcgttagccaagcactgtggctccctgttgtaagaagtcccagctactctggaggctgtggtgggaggattacttgagcccaggggtttgagtccagcctggacaatataataagatcatgtctttttaaaaaaaggtttatttatttttttagttattaaaaagtagagatggggtcttgctatattgcccacgctggtctggaactctgccttcaagtgatcttcttgccttggcctctaaaattgctgggattacaggtgcgagctattgcacccagccaaaaagctggtgcaataaaaattccatctacactctacctttttttccaatactatagcataataactatattttcctttgtttggtgaggcaatctccgtgtcctctggtgtgtggtctctgctattactaagagagtcaataatctttacttagttgaagtacaggtctgtctcttatggtcttaggccaattggcccaggacagtcctcaccacaaccctgaaggaggggctgtcttgaccccctttttctagctggggacactgaggctgaggaaggtgaagggattcgttcctgtgttgtacttgacatgtgagctcaggacagtgttggtttctccaaagcccaccgcaatcctctgcctggtcctcttctgcccagtgcccctggccttaagccatggtggatttctgtttagggcatgcgtcagacccttccttgagctacagacatcggagtacagggccccggctcccttgtttctgctccacatacagaatgggtccagtagcactgaacccaaatctggcattatctggtctacaaataccctccctctcactgccctgccaccccaggtcttggaggtaccagaataccctatcatgtactgggaatcccatgtgactggactcatgatgtagaccacacaaacccaaccaaagacccctttccggccatgctgggtccctgcccacaaggggcaggtttctgacttgaggttgagggtaatcacccagggtcggcacaggacatgaggaaggagatggagcctggtgcc

SEQ ID NO: 1244266 - DNA, 4001 bp, Homo sapiens
ctgcaggggagtcagggaggagttctgtccctggaaaggaggttgacccgacctggtgagacatgtcctgcgtcagaaaggcctttctaaaagcaaacccatccctgagctgagacaggtgctttaggggtgaggggagtgcagaggactcactgtacaatccccaaatgatcgacgttgttgttgtagcttcgaaaaggcttaggccccttgtcctctggcagcccagctcggtgtccctgtagcccagagggagccttggtgaggggtccaaggtaaagggtgcaagggcctgggggcattggccacccgtccctgccctgtgctcctagggagcccaggaccctttgaccagggcacactggaagaggcctccctccaagaagcagaccgacttgtaccttttcgtatttcataatgatgtcctctcgctcttgtgcccaccaactgcccgcgacctctaccacgtccatcctgtgagacagaattgtctaaaggtcacaccgtacgcggcggcttcggagaacacctgaaccgctctcgccgggctcccagatgctggctggctgcgtaacccccattccaccgccgcccccagggaaaaaggggccagacccagtggcccacagctgctccagtctctggagtctcaagtcccaagcaggggtgggcatcttcccaaggacttgagtacagtgggacctagacagagaatcctgttgtcccccaatgccatgaaatggggacacaccggccccagcaggttgaatggtttccacctgccaagggtgaagggcccatgatgggctattccagggatgtggaggcagactggggtcagcgaccagaggtctctgtgcaatcggcctcctgggatgctcagggcctcagcgatgcccagtttcctacagggaacaagatctctcccgactgctcggttctactccgctcatcactttggctaccgtggctcttcagtctgaacagtgaagccactttaggaataacgcctgttgagcaggagggtgttgggtttgggggatgagaaagatctattgtacgcatggaaaccacgtctctcgcggagggactgtggagtccaccattctgagccgtcccaacaggaggaggcttcattttcctgggtcactgaggaagaacagtgggtccttggtcctggagaacagctggatggaccgtccctcctgggaatactcgaggcaaaaggagggcgaggcctcaagaggaccacgcagagcaagaaatacctggggagaaccctagtgcccggacccctttgaacacaagggaagatagtctcccctcagccagccctccagggctccttcattttccacagctgcccaagggcagcaggctcccccggacaagggaccatgtgtgttcagtggggcccacagcgaccatcaggacccagcttagggcacagaggtgttctgaggaccgtcagtggatctgtaccagtggctctataccagtggctctgccaggaccaggctctgccccatcgggatgggaaacctgggcagatttgggatctagggcagggaggtcacagggttcaggcctgaattccagcacagcacacggcagggctgagagcaaaactcaggatcatgtccggattcccaggccggttactgcctctctgaccccagacgtctcatctgtcgaatggggacatttgggaacagcacccactctacgaagccaccatggagacgaaagagccaatcgtctacacgggcagtgtagaacgggcgcctggtgagtgctcagggatgaccctcctcggtagctgccccacagaggccaacaccgcccgcaccgtagccactgcccccaagtccgcctggagggaagagagcaggtcacgctcacctgattctgatgaatcagctggcctgggtcatgcctctcagggagaaaacctttgagtccacagagctgctcacagataccactgcctgtgtgtaactgctgtagaccactgaggcagaccagagagcagataggtgctaagcaccagtgacattctgaggtcatggcacgaatcacagtggggccttgcccgggtcagcagtgcccagagtcagggtcctccgctgcctgaggcgtcaacatgcctgcctgcaatgtgtttgtgcacgtgcgtgcacatgtgtatgtgggtaaacacatctgtgcacgttgtgtgctgcttctctggccaggcccggctgccccactcatgtgtgcacccagttcctcatcactgtcacccccgaggcccagggccagcatcagagcatccatggctgctccctaacctcagccctccctgcccagggtggtcctgggatacacataggggtggagggaagtgactgctgctgttggatctcagaatacaaaagctagtactattacctaatggtctttttagtgtctctaatggtatcgctttttcatttctgatattttaactgggtatttctctccatgacccttggatattctagctagaggatcctgtggggaaagtgccgggcacacagtaggggctcactcttctagacatgttatctaaaacctggttcatctgtccttccacacagggcctaggggatgccaaattccaggggccagaaagagcttgggataaaaagaaacttcaaggggacggctttgacctgggctgagtctgcctgtgccatccaactggagtctcaagtcctgaggcaggacgtccagatgccccagtgcagggtcctcctgatcaacacctgctcccctgtactcattagcaacctcacccaccctactctcaaagcacacttggctctcgtatccaggagctctgcatctgtagattcagcaacagcagatggaaaatattcagaaaataaattggacggttatgtttctattgaacatgtgcagagtttgttcttgtcattattccctaaagaatccagtatcacgatcatttatgtagcatctgcattgtattacacatcatgaataatccagggatggtctaatgtctacgggaggatgtgcatagctgatatgtaaatactaggccatgttatgtcagagacttgaggatccatggattttggcatccccggggaccctagaactaatccatggataccaagggatgactgtataaactcactcaggaaggcttctcattggaggaaggtcccagttcaggacacacagggacatctccctggactactgtccattcatccatccattcatccattgtctccccccacccccgcatctcggactgtcccagtgacagccctagcaagaagagacaagaaacaagttcacgttgtccagttttgaggtaatggaagaagttgcaccagtatgagaatagtgggtcagttttctacaggatgcagaaagcatatcgggcagcctcggggtgcggaaaggagcctggcctctctagcagccacacaggcctgcagtaggatggggctgtggctggccatgtggatcacttgggcctcatgaggggaaaggaaataccaggggggcagaagaggagcatgggggcagctggttgcctaaggagaaggcacctcagggaaggggactgtattcatttgttttcacactgatgtaaagaaatacctgagattgggtaatttataaaggaaacaggcttaattgacttgcagttccggaaacttacaatcatggaagaaggggaaggggaagcaggcaccttcttcacaagacggcaggagggagtgagtggagaaccagtaagtgccacactttgaaactatgatcctcctacctcagcctcccaagtagctgggactacaggcacatgccaccacacccagctaatttttgtactttttatagagacgaggtattggcatggtgcccaggctggtatcaaactcctggactcaagcagtccacctgccccagcctcccaaagtgctcggattataggcatatca

SEQ ID NO: 1244267 - DNA, 4001 bp, Homo sapiens; identical to SEQ ID NO: 1244262

SEQ ID NO: 1244268 - DNA, 4001 bp, Homo sapiens
ctgcaggggagtcagggaggagttctgtccctggaaaggaggttgacccgacctggtgagacatgtcctgcgtcagaaaggcctttctaaaagcaaacccatccctgagctgagacaggtgctttaggggtgaggggagtgcagaggactcactgtacaatccccaaatgatcgacgttgttgttgtagcttcgaaaaggcttaggccccttgtcctctggcagcccagctcggtgtccctgtagcccagagggagccttggtgaggggtccaaggtaaagggtgcaagggcctgggggcattggccacccgtccctgccctgtgctcctagggagcccaggaccctttgaccagggcacactggaagaggcctccctccaagaagcagaccgacttgtaccttttcgtatttcataatgatgtcctctcgctcttgtgcccaccaactgcccgcgacctctaccacgtccatcctgtgagacagaattgtctaaaggtcacaccgtacgcggcggcttcggagaacacctgaaccgctctcgccgggctcccagatgctggctggctgcgtaacccccattccaccgccgcccccagggaaaaaggggccagacccagtggcccacagctgctccagtctctggagtctcaagtcccaagcaggggtgggcatcttcccaaggacttgagtacagtgggacctagacagagaatcctgttgtcccccaatgccatgaaatggggacacaccggccccagcaggttgaatggtttccacctgccaagggtgaagggcccatgatgggctattccagggatgtggaggcagactggggtcagcgaccagaggtctctgtgcaatcggcctcctgggatgctcagggcctcagcgatgcccagtttcctacagggaacaagatctctcccgactgctcggttctactccgctcatcactttggctaccgtggctcttcagtctgaacagtgaagccactttaggaataacgcctgttgagcaggagggtgttgggtttgggggatgagaaagatctattgtacgcatggaaaccacgtctctcgcggagggactgtggagtccaccattctgagccgtcccaacaggaggaggcttcattttcctgggtcactgaggaagaacagtgggtccttggtcctggagaacagctggatggaccgtccctcctgggaatactcgaggcaaaaggagggcgaggcctcaagaggaccacgcagagcaagaaatacctggggagaaccctagtgcccggacccctttgaacacaagggaagatagtctcccctcagccagccctccagggctccttcattttccacagctgcccaagggcagcaggctcccccggacaagggaccatgtgtgttcagtggggcccacagcgaccatcaggacccagcttagggcacagaggtgttctgaggaccgtcagtggatctgtaccagtggctctataccagtggctctgccaggaccaggctctgccccatcgggatgggaaacctgggcagatttgggatctagggcagggaggtcacagggttcaggcctgaattccagcacagcacacggcagggctgagagcaaaactcagggtcatgtccggattcccaggccggttactgcctctctgaccccagacgtctcatctgtcgaatggggacatttgggaacagcacccactctacgaagccaccatggagacgaaagagccaatcgtctacacgggcagtgtagaacgggcgcctggtgagtgctcagggatgaccctcctcggtagctgccccacagaggccaacaccgcccgcaccgtagccactgcccccaagtccgcctggagggaagagagcaggtcacgctcacctgattctgatgaatcagctggcctgggtcgtgcctctcagggagaaaacctttgagtccacagagctgctcacagataccactgcctgtgtgtaactgctgtagaccactgaggcagaccagagagcagataggtgctaagcaccagtgacattctgaggtcatggcacgaatcacagtggggccttgcccgggtcagcagcgcccagagtcagggtcctccgctgcctgaggcgtcaacatgcctgcctgcaatgtgtttgtgcacgtgcgtgcacatgtgtatgtgggtaaacacatctgtgcacgtgtgtgctgcttctctggccaggcccggctgccccactcatgtgtgcacccagttcctcatcactgtcacccccgaggcccagggccagcatcagagcatccatggctgctccctaacctcagccctccccgcccagggtggtcctgggatacacatagcggtggagggaagtgactgctgctgttggatctcagaatacaaaagctagtactattacctaatggtctttttagtgtctctaatggtatcgctttttcatttctgatattttaactgggtatttctctccatgacccttggatattctagctagaggatcctgtggggaaagtgccgggcacacagttaggggctcactcttctagacatgttatctaaaacctggttcatctgtccttccacacagggcctaggggatgccaaattccaggggccagaaagagcttgggataaaaagaaacttcaaggggacggctttgacctgggctgagtctgcctgtgccatccaactggagtctcaagtcctgaggcaggacgtccagatgccccagtgcagggtcctcctgatcaacacctgctcccctgtactcattagcaacctcacccaccctactctcaaagcacacttggctctcgtatccaggagctctgcatctgtagattcagcaacagcagatggaaaatattcagaaaataaattggacggttatgtttctattgaacatgtgcagagtttgttcttgtcattattccctaaagaatccagtatcacgaccatttatgtagcatctgcattgtattacacatcatgaataatccagagatggtctaatgtctacgggaggatgtgcatagctgatatgtaaatactaggccatgttatgtcagagacttgaggatccatggattttggcatccccggggaccctagaactaatccatggataccaagggatgactgtataaactcactcaggaaggcttctcattggaggaaggtcccagttcaggacacacagggacatctccctggactactgtccattcatccatccattcatccattgtctccccccacccccccatctcggactgtcccagtgacagccctagcaagaagagacaagaaacaagttcacgttgtccagttttgaggtaatggaagaagttgcaccagtatgagaatagtgggtcagttttctacaggatgcagaaagcatatcgggcagcctcggggtgcggaaaggagcctggcctctctagcagccacacaggcctgcagtaggatggggctgtggctggccatgtggatcacttgggcctcatgaggggaaaggaaataccaggggggcagaagaggagcatgggggcagctggttgcctaaggagaaggcacctcagggaaggggactgtattcatttgttttcacactgatgtaaagaaatacctgagattgggtaatttataaaggaaacaggcttaattgacttgcagttccggaaacttacaatcatggcagaaggggaaggggaagcaggcaccttcttcacaagatggcaggagggagattgtgcagtggcacaatctcggctcactgcaacctctgcctcccgggttcaggcagttctcctgcctcagcctccctagtagctgggattacaggcatgcaccaccacgcctggctaattttgtatttttagtagagacagggtttcaccatgttggccaggctggtcttgaactcctgacatcaggtgatctgcctgcctccgcctgccaaagtgctgg

SEQ ID NO: 1244269 - DNA, 4001 bp, Homo sapiens
tgcaggggagtcagggaggagttctgtccctggaaaggaggttgacccgacctggtgagacatgtcctgcgtcagaaaggcctttctaaaagcaaacccatccctgagctgagacaggtgctttaggggtgaggggagtgcagaggactcactgtacaatccccaaatgatcgacgttgttgttgtagcttcgaaaaggcttaggccccttgtcctctggcagcccagctcggtgtccctgtagcccagagggagccttggtgaggggtccaaggtaaagggtgcaagggcctgggggcattggccacccgtccctgccctgtgctcctagggagcccaggaccctttgaccagggcacactggaagaggcctccctccaagaagcagaccgacttgtaccttttcgtatttcataatgatgtcctctcgctcttgtgcccaccaactgcccgcgacctctaccacgtccatcctgtgagacagaattgtctaaaggtcacactgtacgcggcggcttcggagaacacctgaaccgctctcgccgggctcccagatgctggctggctgcgtaacccccattccaccgccgcccccagggaaaaaggggccagacccagtggcccacagctgctccagtctctggagtctcaagtcccaagcaggggtgggcatcttcccaaggacttgagtacagtgggacctagacagagaatcctgttgtcccccaatgccatgaaatggggacacaccggccccagcaggttgaatggtttccacctgccaagggtgaagggcccatgatgggctattccagggatgtggaggcagactggggtcagcgaccagaggtctctgtgcaatcggcctcctgggatgctcagggcctcagcgatgcccagtttcctacagggaacaagatctctcccgactgctcggttctactccgctcatcactttggctaccgtggctcttcagtctgaacagtgaagccactttaggaataacgcctgttgagcaggagggtgttgggtttggaggatgaggaagatctattgtacgcatggaaaccacgtctctcgcggagggactgtggagtccaccattctgagccgtcccaacaggaggaggcttcattttcctgggtcactgaggaagaacagtgggtccttggtcctggagaacagctggatggaccgtccctcctgggaatactcgaggcaaaaggagggcgaggcctcaagaggaccacgcagagcaagaaatacctggggagaaccctagtgcccggacccctttgaacacaagggaagatagtctcccctcagccagccctccagggctccttcattttccacagctgcccaagggcagcaggctcccccggacaagggaccatgtgtgttcagtggggcccacagcgaccatcaggacccagcttagggcacagaggtgttctgaggaccgtcagtggatctgtaccagtggctctataccagtggctctgccaggaccaggctctgccccatcgggatgggaaacctgggcagatttgggatctagggcagggaggtcacagggttcaggcctgaattccagcacagcacacggcagggctgagagcaaaactcagggtcatgtccggattcccaggccggttactgcctctctgaccccagacgtctcatctgtcgaatggggacatttgggaacagcacccactctacgaagccaccatggagacgaaagagccaatcgtctacacgggcagtgtagaacgggcgcctggtgagtgctcagggatgaccctcctcggtagctgccccacagaggccaacaccgcccgcaccgtagccactgcccccaagtccgcctggagggaagagagcaggtcacgctcacctgattctgatgaatcagctggcctgggtcatgcctctcagggagaaaacctttgagtccacagagctgctcacagataccactgcctgtgtgtaactgctgtagaccactgaggcagaccagagagcagataggtgctaagcaccagtgacattctgaggtcatggcacgaatcacagtggggccttgcccgggtcagcagcgcccagagtcagggtcctccgctgcctgaggcgtcaacatgcctgcctgcaatgtgtttgtgcacgtgcgtggacatgtgtatgtgggtatacacatctgtgcacgtgtgtgctgcttctctggccaggcccggctgccccactcatgtgtgcacccagttcctcatcactgtcacccccgaggcccagggccagcatcagagcatccatggctgctccctaacctcagccctccccgcccagggtggtcctgggatacacataggggtggagggaagtgactgctgctgttggatctcagaatacaaaagctagtactattacctaatggtctttttagtgtctctaatggtatcgctttttcatttctgatattttaactgggtatttctctccatgacccttggatattctagctagaggatcctgtggggaaagtgccgggcacacagtaggggctcactcttctagacatgttatctaaaacctggctcatctgtccttccacacagggcctaggggatgccaaattccaggggccagaaagagcttgggataaaaagaaacttcaaggggacggctttgacctgggctgagtctgcctgtgccatccaactggagtctcaagtcctgaggcaggacgtccagatgccccagtgcagggtcctcctgatcaacacctgctcccctgtactcattagcaacctcacccaccctactctcaaagcacacttggctctcgtatccaggagctctgcatctgtagattcagcaacagcagatggaaaatattcagaaaataaattggacggttatgtttctattgaacatgtgcagagtttgttcttgtcattattccctaaagaatccagtatcacgaccatttatgtagcatctgcattgtattacacatcatgaataatccagagatggtctaatgtctacgggaggatgtgcatagctgatatgtaaatactaggccatgttatgtcagagacttgaggatccatggattttggcatccccggggaccctagaactaatccatggataccaagggatgactgtataaactcactcaggaaggcttctcattggaggaaggtcccagttcaggacacacagggacatctccctggactactgtccattcatccatccattcatccattgtctccccccacccccccatctcggactgtcccagtgacagccctagcaagaagagacaagaaacaagttcacgttgtccagttttgaggtaatggaagaagttgcaccagtatgagaatagtgggtcagttttctacaggatgcagaaagcatatcaggcagcctcggggtgcggaaaggagcctggcctctctagcagccacacaggcctgcagtaggatggggctgtggctggccatgtggatcacttgggcctcatgaggggaaaggaaataccaggggggcagaagaggagcatgggggcagctggttgcctaaggagaaggcacctcagggaaggggactgtattcatttgttttcacactgatgtaaagaaatacctgagattgggtaatttataaaggaaacaggcttaattgacttgcagttccggaaacttacaatcatggcagaaggggaaggggaagcaggcaccttcttcacaagatggcaggagggagattgtgcagtggcacaatctcggctcactgcaacctctgcctcccgggttcaggcagttctcctgcctcagcctccctagtagctgggattacaggcatgcaccaccacgcctggctaattttgtatttttagtagagacagggtttcaccatgttggccaggctggtcttgaactcctgacatcaggtgatctgcctgcctccgcctgccaaagtgctggga

SEQ ID NO: 1244270 - DNA, 4001 bp, Homo sapiens; identical to SEQ ID NO: 1244263

SEQ ID NO: 1244271 - DNA, 4001 bp, Homo sapiens; identical to SEQ ID NO: 1244265

SEQ ID NO: 1244272 - DNA, 4001 bp, Homo sapiens
tgcaggggagtcagggaggagttctgtccctggaaaggaggttgacccgacctggtgagacatgtcctgcgtcagaaaggcctttctaaaagcaaacccatccctgagctgagacaggtgctttaggggtgaggggagtgcagaggactcactgtacaatccccaaatgatcgacgttgttgttgtagcttcgaaaaggcttaggccccttgtcctctggcagcccagctcggtgtccctgtagcccagagggagccttggtgaggggtccaaggtaaagggtgcaagggcctgggggcattggccacccgtccctgccctgtgctcctagggagcccaggaccctttgaccagggcacactggaagaggcctccctccaagaagcagaccgacttgtaccttttcgtatttcataatgatgtcctctcgctcttgtgcccaccaactgcccgcgacctctaccacgtccatcctgtgagacagaattgtctaaaggtcacaccgtacgcggcggcttcggagaacacctgaaccgctctcgccgggctcccagatgctggctggctgcgtaacccccattccaccgccgcccccagggaaaaaggggccagacccagtggcccacagctgctccagtctctggagtctcaagtcccaagcaggggtgggcatcttcccaaggacttgagtacagtgggacctagacagagaatcctgttgtcccccaatgccatgaaatggggacacaccggccccagcaggttgaatggtttccacctgccaagggtgaagggcccatgatgggctattccagggatgtggaggcagactggggtcagcgaccagaggtctctgtgcaatcggcctcctgggatgctcagggcctcagcgatgcccagtttcctacagggaacaagatctctcccgactgctcggttctactccgctcatcactttggctaccgtggctcttcagtctgaacagtgaagccactttaggaataacgcctgttgagcaggagggtgttgggtttgggggatgagaaagatctattgtacgcatggaaaccacgtctctcgcggagggactgtggagtccaccattctgagccgtcccaacaggaggaggcttcattttcctgggtcactgaggaagaacagtgggtccttggtcctggagaacagctggatggaccgtccctcctgggaatactcgaggcaaaaggagggcgaggcctcaagaggaccacgcagagcaagaaatacctggggagaaccctagtgcccggacccctttgaacacaagggaagatagtctcccctcagccagccctccagggctccttcattttccacagctgcccaagggcagcaggctcccccggacaagggaccatgtgtgttcagtggggcccacagcgaccatcaggacccagcttagggcacagaggtgttctgaggaccgtcagtggatctgtaccagtggctctataccagtggctctgccaggaccaggctctgccccatcgggatgggaaacctgggcagatttgggatctagggcagggaggtcacagggttcaggcctgaattccagcacagcacacggcagggctgagagcaaaactcagggtcatgtccggattcccaggccggttactgcctctctgaccccagacgtctcatctgtcgaatggggacatttgggaacagcacccactctacgaagccaccatggagacgaaagagccaatcgtctacacgggcagtgtagaacgggcgcctggtgagtgctcagggatgaccctcctcggtagctgccccacagaggccaacaccgcccgcaccgtagccactgcccccaagtccgcctggagggaagagagcaggtcacgctcacctgattctgatgaatcagctggcctgggtcgtgcctctcagggagaaaacctttgagtccacagagctgctcacagataccactgcctgtgtgtaactgctgtagaccactgaggcagaccagagagcagataggtgctaagcaccagtgacattctgaggtcatggcacgaatcacagtggggccttgcccgggtcagcagcgcccagagtcagggtcctccgctgcctgaggcgtcaacatgcctgcctgcaatgtgtttgtgcacgtgcgtgcacatgtgtatgtgggtaaacacatctgtgcacgtgtgtgctgcttctctggccaggcccggctgccccactcatgtgtgcacccagttcctcatcactgtcacccccgaggcccagggccagcatcagagcatccatggctgctccctaacctcagccctccccgcccagggtggtcctgggatacacatagcggtggagggaagtgactgctgctgttggatctcagaatacaaaagctagtactattacctaatggtctttttagtgtctctaatggtatcgctttttcatttctgatattttaactgggtatttctctccatgacccttggatattctagctagaggatcctgtggggaaagtgccgggcacacagttaggggctcactcttctagacatgttatctaaaacctggttcatctgtccttccacacagggcctaggggatgccaaattccaggggccagaaagagcttgggataaaaagaaacttcaaggggacggctttgacctgggctgagtctgcctgtgccatccaactggagtctcaagtcctgaggcaggacgtccagatgccccagtgcagggtcctcctgatcaacacctgctcccctgtactcattagcaacctcacccaccctactctcaaagcacacttggctctcgtatccaggagctctgcatctgtagattcagcaacagcagatggaaaatattcagaaaataaattggacggttatgtttctattgaacatgtgcagagtttgttcttgtcattattccctaaagaatccagtatcacgaccatttatgtagcatctgcattgtattacacatcatgaataatccagagatggtctaatgtctacgggaggatgtgcatagctgatatgtaaatactaggccatgttatgtcagagacttgaggatccatggattttggcatccccggggaccctagaactaatccatggataccaagggatgactgtataaactcactcaggaaggcttctcattggaggaaggtcccagttcaggacacacagggacatctccctggactactgtccattcatccatccattcatccattgtctccccccacccccccatctcggactgtcccagtgacagccctagcaagaagagacaagaaacaagttcacgttgtccagttttgaggtaatggaagaagttgcaccagtatgagaatagtgggtcagttttctacaggatgcagaaagcatatcgggcagcctcggggtgcggaaaggagcctggcctctctagcagccacacaggcctgcagtaggatggggctgtggctggccatgtggatcacttgggcctcatgaggggaaaggaaataccaggggggcagaagaggagcatgggggcagctggttgcctaaggagaaggcacctcagggaaggggactgtattcatttgttttcacactgatgtaaagaaatacctgagattgggtaatttataaaggaaacaggcttaattgacttgcagttccggaaacttacaatcatggcagaaggggaaggggaagcaggcaccttcttcacaagatggcaggagggagattgtgcagtggcacaatctcggctcactgcaacctctgcctcccgggttcaggcagttctcctgcctcagcctccctagtagctgggattacaggcatgcaccaccacgcctggctaattttgtatttttagtagagacagggtttcaccatgttggccaggctggtcttgaactcctgacatcaggtgatctgcctgcctccgcctgccaaagtgctggg

SEQ ID NO: 1244273 - DNA, 4001 bp, Homo sapiens
tgcaggggagtcagggaggagttctgtccctggaaaggaggttgacccgacctggtgagacatgtcctgcgtcagaaaggcctttctaaaagcaaacccatccctgagctgagacaggtgctttaggggtgaggggagtgcagaggactcactgtacaatccccaaatgatcgacgttgttgttgtagcttcgaaaaggcttaggccccttgtcctctggcagcccagctcggtgtccctgtagcccagagggagccttggtgaggggtccaaggtaaagggtgcaagggcctgggggcattggccacccgtccctgccctgtgctcctagggagcccaggaccctttgaccagggcacactggaagaggcctccctccaagaagcagaccgacttgtaccttttcgtatttcataatgatgtcctctcgctcttgtgcccaccaactgcccgcgacctctaccacgtccatcctgtgagacagaattgtctaaaggtcacaccgtacgcggcggcttcggagaacacctgaaccgctctcgccgggctcccagatgctggctggctgcgtaacccccattccaccgccgcccccagggaaaaaggggccagacccagtggcccacagctgctccagtctctggagtctcaagtcccaagcaggggtgggcatcttcccaaggacttgagtacagtgggacctagacagagaatcctgttgtcccccaatgccatgaaatggggacacaccggccccagcaggttgaatggtttccacctgccaagggtgaagggcccatgatgggctattccagggatgtggaggcagactggggtcagcgaccagaggtctctgtgcaatcggcctcctgggatgctcagggcctcagcgatgcccagtttcctacagggaacaagatctctcccgactgctcggttctactccgctcatcactttggctaccgtggctcttcagtctgaacagtgaagccactttaggaataacgcctgttgagcaggagggtgttgggtttgggggatgagaaagatctattgtacgcatggaaaccacgtctctcgcggagggactgtggagtccaccattctgagccgtcccaacaggaggaggcttcattttcctgggtcactgaggaagaacagtgggtccttggtcctggagaacagctggatggaccgtccctcctgggaatactcgaggcaaaaggagggcgaggcctcaagaggaccacgcagagcaagaaatacctggggagaaccctagtgcccggacccctttgaacacaagggaagatagtctcccctcagccagccctccagggctccttcattttccacagctgcccaagggcagcaggctcccccggacaagggaccatgtgtgttcagtggggcccacagcgaccatcaggacccagcttagggcacagaggtgttctgaggaccgtcagtggatctgtaccagtggctctataccagtggctctgccaggaccaggctctgccccatcgggatgggaaacctgggcagatttgggatctagggcagggaggtcacagggttcaggcctgaattccagcacagcacacggcagggctgagagcaaaactcagggtcatgtccggattcccaggccggttactgcctctctgaccccagacgtctcatctgtcgaatggggacatttgggaacagcacccactctacgaagccaccatggagacgaaagagccaatcgtctacacgggcagtgtagaacgggcgcctggtgagtgctcagggatgaccctcctcggtagctgccccacagaggccaacaccgcccgcaccgtagccactgcccccaagtccgcctggagggaagagagcaggtcacgctcacctgattctgatgaatcagctggcctgggtcgtgcctctcagggagaaaacctttgagtccacagagctgctcacagataccactgcctgtgtgtaactgctgtagaccactgaggcagaccagagagcagataggtgctaagcaccagtgacattctgaggtcatggcacgaatcacagtggggccttgcccgggtcagcagcgcccagagtcagggtcctccgctgcctgaggcgtcaacatgcctgcctgcaatgtgtttgtgcacgtgcgtgcacatgtgtatgtgggtaaacacatctgtgcacgtgtgtgctgcttctctggccaggcccggctgccccactcatgtgtgcacccagttcctcatcactgtcacccccgaggcccagggccagcatcagagcatccatggctgctccctaacctcagccctccccgcccagggtggtcctgggatacacatagcggtggagggaagtgactgctgctgttggatctcagaatacaaaagctagtactattacctaatggtctttttagtgtctctaatggtatcgctttttcatttctgatattttaactgggtatttctctccatgacccttggatattctagctagaggatcctgtggggaaagtgccgggcacacagtaggggctcactcttctagacatgttatctaaaacctggttcatctgtccttccacacagggcctaggggatgccaaattccaggggccagaaagagcttgggataaaaagaaacttcaaggggacggctttgacctgggctgagtctgcctgtgccatccaactggagtctcaagtcctgaggcaggacgtccagatgccccagtgcagggtcctcctgatcaacacctgctcccctgtactcattagcaacctcacccaccctactctcaaagcacacttggctctcgtatccaggagctctgcatctgtagattcagcaacagcagatggaaaatattcagaaaataaattggacggttatgtttctattgaacatgtgcagagtttgttcttgtcattattccctaaagaatccagtatcacgaccatttatgtagcatctgcattgtattacacatcatgaataatccagagatggtctaatgtctacgggaggatgtgcatagctgatatgtaaatactaggccatgttatgtcagagacttgaggatccatggattttggcatccccggggaccctagaactaatccatggataccaagggatgactgtataaactcactcaggaaggcttctcattggaggaaggtcccagttcaggacacacagggacatctccctggactactgtccattcatccatccattcatccattgtctccccccacccccccatctcggactgtcccagtgacagccctagcaagaagagacaagaaacaagttcacgttgtccagttttgaggtaatggaagaagttgcaccagtatgagaatagtgggtcagttttctacaggatgcagaaagcatatcgggcagcctcggggtgcggaaaggagcctggcctctctagcagccacacaggcctgcagtaggatggggctgtggctggccatgtggatcacttgggcctcatgaggggaaaggaaataccaggggggcagaagaggagcatgggggcagctggttgcctaaggagaaggcacctcagggaaggggactgtattcatttgttttcacactgatgtaaagaaatacctgagattgggtaatttataaaggaaacaggcttaattgacttgcagttccggaaacttacaatcatggcagaaggggaaggggaagcaggcaccttcttcacaagatggcaggagggagattgtgcagtggcacaatctcggctcactgcaacctctgcctcccgggttcaggcagttctcctgcctcagcctccctagtagctgggattacaggcatgcaccaccacgcctggctaattttgtatttttagtagagacagggtttcaccatgttggccaggctggtcttgaactcctgacatcaggtgatctgcctgcctccgcctgccaaagtgctggga

SEQ ID NO: 1244274 - DNA, 4001 bp, Homo sapiens; identical to SEQ ID NO: 1244266

SEQ ID NO: 1244275 - DNA, 4001 bp, Homo sapiens
acctgcaggggagtcagggaggagttctgtccctggaaaggaggttgacccgacctggtgagacatgtcctgcgtcagaaaggcctttctaaaagcaaacccatccctgagctgagacaggtgctttaggggtgaggggagtgcagaggactcactgtacaatccccaaatgatcgacgttgttgttgtagcttcgaaaaggcttaggccccttgtcctctggcagcccagctcggtgtccctgtagcccagagggagccttggtgaggggtccaaggtaaagggtgcaagggcctgggggcattggccacccgtccctgccctgtgctcctagggagcccaggaccctttgaccagggcacactggaagaggcctccctccaagaagcagaccgacttgtaccttttcgtatttcataatgatgtcctctcgctcttgtgcccaccaactgcccgcgacctctaccacgtccatcctgtgagacagaattgtctaaaggtcacaccgtacgcggcggcttcggagaacacctgaaccgctctcgccgggctcccagatgctggctggctgcgtaacccccattccaccgccgcccccagggaaaaaggggccagacccagtggcccacagctgctccagtctctggagtctcaagtcccaagcaggggtgggcatcttcccaaggacttgagtacagtgggacctagacagagaatcctgttgtcccccaatgccatgaaatggggacacaccggccccagcaggttgaatggtttccacctgccaagggtgaagggcccatgatgggctattccagggatgtggaggcagactggggtcagcgaccagaggtctctgtgcaatcggcctcctgggatgctcagggcctcagcgatgcccagtttcctacagggaacaagatctctcccgactgctcggttctactccgctcatcactttggctaccgtggctcttcagtctgaacagtgaagccactttaggaataacgcctgttgagcaggagggtgttgggtttgggggatgagaaagatctattgtacgcatggaaaccacgtctctcgcggagggactgtggagtccaccattctgagccgtcccaacaggaggaggcttcattttcctgggtcactgaggaagaacagtgggtccttggtcctggagaacagctggatggaccgtccctcctgggaatactcgaggcaaaaggagggcgaggcctcaagaggaccacgcagagcaagaaatacctggggagaaccctagtgcccggacccctttgaacacaagggaagatagtctcccctcagccagccctccagggctccttcattttccacagctgcccaagggcagcaggctcccccggacaagggaccatgtgtgttcagtggggcccacagcgaccatcaggacccagcttagggcacagaggtgttctgaggaccgtcagtggatctgtaccagtggctctataccagtggctctgccaggaccaggctctgccccatcgggatgggaaacctgggcagatttgggatctagggcagggaggtcacagggttcaggcctgaattccagcacagcacacggcagggctgagagcaaaactcaggatcatgtccggattcccaggccggttactgcctctctgaccccagacgtctcatctgtcgaatggggacatttgggaacagcacccactctacgaagccaccatggagacgaaagagccaatcgtctacacgggcagtgtagaacgggcgcctggtgagtgctcagggatgaccctcctcggtagctgccccacagaggccaacaccgcccgcaccgtagccactgcccccaagtccgcctggagggaagagagcaggtcacgctcacctgattctgatgaatcagctggcctgggtcatgcctctcagggagaaaacctttgagtccacagagctgctcacagataccactgcctgtgtgtaactgctgtagaccactgaggcagaccagagagcagataggtgctaagcaccagtgacattctgaggtcatggcacgaatcacagtggggccttgcccgggtcagcagtgcccagagtcagggtcctccgctgcctgaggcgtcaacatgcctgcctgcaatgtgtttgtgcacgtgcgtgcacatgtgtatgtgggtaaacacatctgtgcacgttgtgtgctgcttctctggccaggcccggctgccccactcatgtgtgcacccagttcctcatcactgtcacccccgaggcccagggccagcatcagagcatccatggctgctccctaacctcagccctccctgcccagggtggtcctgggatacacataggggtggagggaagtgactgctgctgttggatctcagaatacaaaagctagtactattacctaatggtctttttagtgtctctaatggtatcgctttttcatttctgatattttaactgggtatttctctccatgacccttggatattctagctagaggatcctgtggggaaagtgccgggcacacagtaggggctcactcttctagacatgttatctaaaacctggttcatctgtccttccacacagggcctaggggatgccaaattccaggggccagaaagagcttgggataaaaagaaacttcaaggggacggctttgacctgggctgagtctgcctgtgccatccaactggagtctcaagtcctgaggcaggacgtccagatgccccagtgcagggtcctcctgatcaacacctgctcccctgtactcattagcaacctcacccaccctactctcaaagcacacttggctctcgtatccaggagctctgcatctgtagattcagcaacagcagatggaaaatattcagaaaataaattggacggttatgtttctattgaacatgtgcagagtttgttcttgtcattattccctaaagaatccagtatcacgatcatttatgtagcatctgcattgtattacacatcatgaataatccagggatggtctaatgtctacgggaggatgtgcatagctgatatgtaaatactaggccatgttatgtcagagacttgaggatccatggattttggcatccccggggaccctagaactaatccatggataccaagggatgactgtataaactcactcaggaaggcttctcattggaggaaggtcccagttcaggacacacagggacatctccctggactactgtccattcatccatccattcatccattgtctccccccacccccgcatctcggactgtcccagtgacagccctagcaagaagagacaagaaacaagttcacgttgtccagttttgaggtaatggaagaagttgcaccagtatgagaatagtgggtcagttttctacaggatgcagaaagcatatcgggcagcctcggggtgcggaaaggagcctggcctctctagcagccacacaggcctgcagtaggatggggctgtggctggccatgtggatcacttgggcctcatgaggggaaaggaaataccaggggggcagaagaggagcatgggggcagctggttgcctaaggagaaggcacctcagggaaggggactgtattcatttgttttcacactgatgtaaagaaatacctgagattgggtaatttataaaggaaacaggcttaattgacttgcagttccggaaacttacaatcatggaagaaggggaaggggaagcaggcaccttcttcacaagacggcaggagggagtgagtggagaaccagtaagtgccacactttgaaactatgatcctcctacctcagcctcccaagtagctgggactacaggcacatgccaccacacccagctaatttttgtactttttatagagacgaggtattggcatggtgcccaggctggtatcaaactcctggactcaagcagtccacctgccccagcctcccaaagtgctcggattataggcatat

SEQ ID NO: 1244276 - DNA, 4001 bp, Homo sapiens
aacctcgggctggacctgcaggggagtcagggaggagttctgtccctggaaaggaggttgacccgacctggtgagacatgtcctgcgtcagaaaggcctttctaaaagcaaacccatccctgagctgagacaggtgctttaggggtgaggggagtgcagaggactcactgtacaatccccaaatgatcgacgttgttgttgtagcttcgaaaaggcttaggccccttgtcctctggcagcccagctcggtgtccctgtagcccagagggagccttggtgaggggtccaaggtaaagggtgcaagggcctgggggcattggccacccgtccctgccctgtgctcctagggagcccaggaccctttgaccagggcacactggaagaggcctccctccaagaagcagaccgacttgtaccttttcgtatttcataatgatgtcctctcgctcttgtgcccaccaactgcccgcgacctctaccacgtccatcctgtgagacagaattgtctaaaggtcacaccgtacgcggcggcttcggagaacacctgaaccgctctcgccgggctcccagatgctggctggctgcgtaacccccattccaccgccgcccccagggaaaaaggggccagacccagtggcccacagctgctccagtctctggagtctcaagtcccaagcaggggtgggcatcttcccaaggacttgagtacagtgggacctagacagagaatcctgttgtcccccaatgccatgaaatggggacacactggccccagcaggttgaatggtttccacctgccaagggtgaagggcccatgatgggctattccagggatgtggaggcagactggggtcagcgaccagaggtctctgtgcaatcggcctcctgggatgctcagggcctcagcgatgcccagtttcctacagggaacaagatctctcccgactgctcggttctactccgctcatcactttggctaccgtggctcttcagtctgaacagtgaagccactttaggaataacgcctgttgagcaggagggtgttgggtttgggggatgagaaagatctattgtacgcatggaaaccacgtctctcgcggagggactgtggagtccaccattctgagccgtcccaacaggaggaggcttcattttcctgggtcactgaggaagaacagtgggtccttggtcctggagaacagctggatggaccgtccctcctgggaatactcgaggcaaaaggagggcgaggcctcaagaggaccacgcagagcaagaaatacctggggagaaccctagtgcccggacccctttgaacacaagggaagatagtctcccctcagccagccctccagggctccttcattttccacagctgcccaagggcagcaggctcccccggacaagggaccatgtgtgttcagtggggcccacagcgaccatcaggacccagcttagggcacagaggtgttctgaggaccgtcagtggctctgtaccagtggctctgccaggaccaggctctgccccatcgggatgggaaacctgggcagatttgggatctagggcagggaggtcacagggttcaggcctgaattccagcacagcacacggcagggctgagagcaaaactcagggtcatgtccggattcccaggccggttactgcctctctgaccccagacgtctcatctgtcgaatggggacatttgggaacagcacccactctacgaagccaccatggagacgaaagagccaatcgtctacacgggcagtgtagaacgggcgcctggtgagtgctcagggatgaccctcctcggtagctgccccacagaggccaacaccgcccgcaccgtagccactgcccccaagtccgcctggagggaagagagcaggtcacgctcacctgattctgatgaatcagctggcctgggtcatgcctctcagggagaaaacctttgagtccacagagctgctcacagataccactgcctgtgtgtaactgctgtagaccactgaggcagaccagagagcagataggtgctaagcaccagtgacattctgaggtcatggcacgaatcacagtggggccttgcccgggtcagcagcgcccagagtcagggtcctccgctgcctgaggcgtcaacatgcctgcctgcaatgtgtttgtgcacgtgcgtgcacatgtgtatgtgggtaaacacatctgtgcacgtgtgtgctgcttctctggccaggcccggctgccccactcatgtgtgcacccagttcctcatcactgtcacccccgaggcccagggccagcatcagagcatccatggctgctccctaacctcagccctccccgcccagggtggtcctgggatacacatagcggtggagggaagtgactgctgctgttggatctcagaatacaaaagctagtactattacctaatggtctttttagtgtctctaatggtatcgctttttcatttctgatattttaactgggtatttctctccatgacccttggatattctagctagaggatcctgtggggaaagtgccgggcacacagtaggggctcactcttctagacatgttatctaaaacctggttcatctgtccttccacacagggcctaggggatgccaaattccaggggccagaaagagcttgggataaaaagaaacttcaaggggacggctttgacctgggctgagtctgcctgtgccatccaactggagtctcaagtcctgaggcaggacgtccagatgccccagtgcagggtcctcctgatcaacacctgctcccctgtactcattagcaacctcacccaccctactctcaaagcacacttggctctcgtatccaggagctctgcatctgtagattcagcaacagcagatggaaaatattcagaaaataaattggacggttatgtttctattgaacatgtgcagagtttgttcttgtcattattccctaaagaatccagtatcacgaccatttatgtagcatctgcattgtattacacatcatgaataatccagggatggtctaatgtctacgggaggatgtgcatagctgatatgtaaatactaggccatgttatgtcagagacttgaggatccatggattttggcatccccggggaccctagaactaatccatggataccaagggatgactgtataaactcactcaggaaggcttctcattggaggaaggtcccagttcaggacacacagggacatctccctggactactgtccattcatccatccattcatccattgtctccccccacccccgcatctcggactgtcccagtgacagccctagcaagaagagacaagaaacaagttcacgttgtccagttttgaggtaatggaagaagttgcaccagtatgagaatagtgggtcagttttctacaggatgcagaaagcatatcgggcagcctcggggtgcggaaaggagcctggcctctctagcagccacacaggcctgcagtaggatggggctgtggctggccatgtggatcacttgggcctcatgaggggaaaggaaataccaggggggcagaagaggagcatgggggcagctggttgcctaaggagaaggcacctcagggaaggggactgtattcatttgttttcacactgatgtaaagaaatacctgagattgggtaatttataaaggaaacaggcttaattgacttgcagttccggaaacttacaatcatggaagaaggggaaggggaagcaggcaccttcttcacaagacggcaggagggagtgagtggagaaccagtaagtgccacactttgaaactatgatcctcctacctcagcctcccaagtagctgggactacaggcacatgccaccacacccagctaatttttgtactttttatagagacgaggtattggcatggtgcccaggctggtatcaaactcctggactcaagcagtccacctgccccagcctcccaaagtgctcggattataggcatatca

SEQ ID NO: 1244277 - DNA, 4001 bp, Homo sapiens; identical to SEQ ID NO: 1244262

SEQ ID NO: 1244278 - DNA, 4001 bp, Homo sapiens; identical to SEQ ID NO: 1244268

SEQ ID NO: 1244279 - DNA, 4001 bp, Homo sapiens; identical to SEQ ID NO: 1244269

SEQ ID NO: 1244280 - DNA, 4001 bp, Homo sapiens; identical to SEQ ID NO: 1244263

SEQ ID NO: 1244281 - DNA, 4001 bp, Homo sapiens; identical to SEQ ID NO: 1244265

SEQ ID NO: 1244282 - DNA, 4001 bp, Homo sapiens; identical to SEQ ID NO: 1244272

SEQ ID NO: 1244283 - DNA, 4001 bp, Homo sapiens; identical to SEQ ID NO: 1244266

SEQ ID NO: 1244284 - DNA, 4001 bp, Homo sapiens
gagagtctgagacgggaggatcacttgagggcaagagtttcagaccagcctgggcaacccagtgagaccccatctctacaaaaaaaacatatttttgtttgtttgtttgtttgtttgttgttttttaattagccaggcgtattggtgtgcacctgtaatctcagctacttgagaggctgaggtgggaggatctgttaagcccaggaagttgaggctgcagtgagttatcatcccaccactgcacttcagcctgggcaatggagcaacaccctgtctcaaaaaaaaaaaaaaaaaaaaggcaagacatcaagacatccctggaggaagccactctgtagaccacaggctaacagagcatggttgagcagggaggagttgggagctgcacccagcacctcacacaatgttatcatggagctggggacagagcaggttccagagctgggtttgagtcccagctcctccgatgatgatatgacaccccagacatgtgcagggatgtcctctaagcctcagcttcctcactgcaatttggggctctgtctctttctggcagggagttattgggaagaccaaatgagatcatgtccccctcccaaaccctgcaaggcctttgcgtcacagttagaatgaagtctacatatagccctgtccactcgcagcctgcctcccttccccattcgcacccttacacacggagccccctccaacctcccccccacacacactgagccctgtgctctttcctctgcccaaatggcccttccctcagacatctagatgtccatcctccttccctcagtctgcctctcggagcagtcttcccgaccactacaacgatgcctccccaaccccggcctgcgtcactccccacgcccaccctgctttgcagcatcgctccctggctgacattacatcatgcatttatttctttgcttattgtctccctcccctccatgagggcaggaaccttcatctgtcttgttgacagtagcatccctagaacctagctcaggcctgactcacagtgtgtgctcagtccacatttgggaaaccaatggagagatgaatggcacagagatgcgctcaggaacccagttccctgacctcccatccaggctgcacccctcaggagtctaggttcctgctgattggtagagttcaggacccagggctggaaagtgtccacccacagggcagatgggccaaggccatgtgctcaaggtgtgcagggctaggagagggggtcagccccagctcccatatgaggggcatgtgcctcgccttgcccctgctttggctagagggtaccctgttcaccagagatgagcctaggctctccccgggcccggctctggctttaccccagagccctccaactcgcagacctccaggcaaggagggctggggacccacccgtcccagccatttgccttttctccagtaacagagcccagaggggtccctgcctgggcccaaaatcacacagcagattggggtagagccggagaagacccgagactcctgtgccagcctgggcatcccctccactgccagggaaggactgcatccaagtcgcatccgtacccaggccgaggtgtccgaggcccaggctgaaatccggttgctgctgcagagaccaagtttccaaggccttgtcaagaagtgggctgtgccagacgatccccaggcctgtcattggctgctcttcggctcggacacaccaaacctcaccaagcacttccatttctgagggaatagaggttgtggcttccgtcaagcacccatttaccccaccctcctcctcctcttcctgcaaacttgagtcacagctgccctgctgggctcaggccccagggatgtctgagtcagcctggctggggttccagtcctgacaccgcccttaccagctgggagactccgggaacctccaaccctgctgagcctccacttcgacatctgtgaaacagccatgaacaagcaggtctcaaaggtcgactcctgtatgcagggacacagcatgcagtaggtgcccaatcataacagcagcacccacctggagccccttatagcagcccttctcctctgcacttctacatggcatctcatttaaccttcaccacaacccaactaggaaggcaccatcattatcccattttactgatgaagaaactgaggcccaggaaggtgaatttaccagccagctcacaaatggactagtagatggcagtttgtggattggagcccagaggctgtgctcctgcccacaccctctcaaatgagggctataaaataacactctaagagctcttcctacgtgcctggcagtgtactaagaatttgagtcttcagtacgttcaatcttcacaacagccctatgaggtgggggttatgaggagccaccattttacagatgggtaagtcaagacacagagagaggatgtggcttgccacagaccacatggctggtgagcataggagccaagattccaacccgtttcccatcctggccaagaataacactcctgcttcttcatttctccgaaagaagccatgctgtctccatccctggctgtgacttgggctgcttgtcccttctctgcccacccacccacccccagggctgtgccggggaaagaaggtggttcctggagccctctagcctctgaaaagcatggcagtggcgcaacgtagaggatgggcttaaagccaaagaaacacagcttcttttgttgttgttgttgttgtttgggtttttgtttttgttttgttttgagacagagtctcactctgtcccgagagtgcagtggtgtgatcctggctctctgcaagctctgcctcctgggttcacgccattctcctgcctcagcctcccgagtagctgagactacaggcacctgccaccaagctcagctaattttttgtatttttagtagagacagggtttcaccatgttagccaggatggtctcgatctcctgacctcatgatccacccacctcggcctcccaaagtgctgggattacaggcatgagccaccgtgcccagtcttttttttttttttttttttttaagacggagtcttgctccgttgcccaggctggatgcagtggcacgatctcggctcactgcaacctccacctcctgggttcaagcaattctcctgcctcagcctcccgagtagcttggattacaggcgtgtgccaccacgcctggctaatttttgtatgtttagggttttgccatcttggccaggccagtctcgaactcctgacttcaggtgatccgctcacctcggcctcccaaagtgctgagattacaggcgtgagccaccatgcctggccaagaaacatgggttctaatcccaatgcccccgcttcctagctatgggaccttgattgagtcctgtaccgtgcctcagtttccccacttataaaaagaggttactaaaaaggatgcttcactcaagggtgtgaagacccagtgaatgaagtgttaataagagctccacgtatagcgatgctgctgttcagctgcaccagggtggactcccttgacttgctgggagttacaatgaggaaggaaggaccgttaaacctgtaggtctttccagagaaagtgcgtttcctaaaaccaaatcctgcccttgctccaaaactgtcagtggtggtttcccatgaccacgccacagtcccagggtctcccctggccttcaaggctggcacagtctgaccctgccaacgtccctagtgccaccatctgtcagcccctccttgctcctgctcctggtctgcacatgctgttctctttgccaagaatgccatttccccagccccctggtcccgatggggaacacctcctcatccttcaaagccaagctggaagggaacatctttggagatgccgcttgacctcccaggcagaaggggtcattctccctggagatgtggtcacgtcattaaccacactgggttagaatcatcagaagctgttcctgcctct

SEQ ID NO: 1244285 - DNA, 4001 bp, Homo sapiens
tggagagtctgagacgggaggatcacttgagggcaagagtttcagaccagcctgggcaacccagtgagaccccatctctacaaaaaaaacatatttttgtttgtttgtttgtttgtttgttgttttttaattagccaggcgtattggtgtgcacctgtaatctcagctacttgagaggctgaggtgggaggatctgttaagcccaggaagttgaggctgcagtgagttatcatcccaccactgcacttcagcctgggcaatggagcaacaccctgtctcaaaaaaaaaaaaaaaaaaaaggcaagacatcaagacatccctggaggaagccactctgtagaccacaggctaacagagcatggttgagcagggaggagttgggagctgcacccagcacctcacacaatgttatcatggagctggggacagagcaggttccagagctgggtttgagtcccagctcctccgatgatgatatgacaccccagacatgtgcagggatgtcctctaagcctcagcttcctcactgcaatttggggctctgtctctttctggcagggagttattgggaagaccaaatgagatcatgtccccctcccaaaccctgcaaggcctttgcgtcacagttagaatgaagtctacatatagccctgtccactcgcagcctgcctcccttccccattcgcacccttacacacggagccccctccaacctcccccccacacacactgagccctgtgctctttcctctgcccaaatggcccttccctcagacatctagatgtccatcctccttccctcagtctgcctctcggagcagtcttcccgaccactacaacgatgcctccccaaccccggcctgcgtcactccccacgcccaccctgctttgcagcatcgctccctggctgacattacatcatgcatttatttctttgcttattgtctccctcccctccatgagggcaggaaccttcatctgtcttgttgacagtagcatccctagaacctagctcaggcctgactcacagtgtgtgctcagtccacatttgggaaaccaatggagagatgaatggcacagagatgcgctcaggaacccagttccctgacctcccatccaggctgcacccctcaggagtctaggttcctgctgattggtagagttcaggacccagggctggaaagtgtccacccacagggcagatgggccaaggccacgtgctcaaggtgtgcagggctaggagagggggtcagccccagctcccatatgaggggcatgtgcctcgccttgcccctgctttggctagagggtaccctgttcaccagagatgagcctaggctctccccgggcctggctctggctttaccccagagccctccaactcgcagacctccaggcaaggagggctggggacccacccgtaccagccatttgccttttctccagtaacagagcccagaggggtccctgcctgggcccaaaatcacacagcagattggggtagagccggagaggacccgagactcctgtgccagcctgggcatcccctccactgccagggaaggactgcatccaagtcgcatccgtacccaggccgaggtgtccgaggcccaggctgaaatccggttgctgctgcagagaccaagtttccaaggccttgtcaagtgggctgtgccagacgatccccaggcctgtcattggctgctcttcggctcggacacaccaaacctcaccaagcacttccatttctgagggaatagaggttgtggcttccgtcaagcacccatttaccccaccctcctcctcctcttcctgcaaacttgagtcacagctgccctgctgggctcaggccccagggatgtctgagtcagcctggctggggttccagtcctgacaccgcccttaccagctgggagactccgggaacctccaaccctgctgagcctccacttcgacatccgtgaaacagccatgaataagcaggtctcaaaggtcgactcctgtatgcagggacacagcatgcagtaggtgcccaatcataacagcagcacccacctggagccccttatagcagcccttctcctctgcacttccacatggcatctcatttaaccttcaccacaacccaactaggaaggcaccatcattatcccattttactgatgaagaaactgaggcccaggaaggtgaatttaccagccagctcacaaatggactagtagatggcagtttgtggattggagcccagaggctgtgctcctgcccacaccctctcaaatgagggctataaaataacactctaagagctcttcctacgtgcctggcagtgtactaagaatttgagtcttcagtacgttcaatcttcacaacagccctatgaggtgggggttatgaggagccaccattttacagatgggtaagtcaagacacagagagaggatgtggcttgccacagaccacatggctggtgagcataggagccaagattccaacccgtttcccatcctggccaagaataacactcctgcttcttcatttctccgaaagaagccatgctgtctccatccctggctgtgacttgggctgcttgtcccttctctgcccacccacccacccccagggctgtgccggggaaagaaggtggttcctggagccctctagcctctgaaaagcatggcagtggcgcaacgtagaggatgggcttaaagccaaagaaacacagcttcttttgttgttgttgttgttgtttgggtttttgtttttgttttgttttgagacagagtctcactctgtcccgagagtgcagtggtgtgatcctggctctctgcaagctctgcctcctgggttcacgccattctcctgcctcagcctcccgagtagctgagactacaggcacctgccaccaagctcagctaattttttgtatttttagtagagacagggtttcaccatgttagccaggatggtctcgatctcctgacctcatgatccacccacctcggcctcccaaagtgctgggattacaggcatgagccaccgtgcccagtcttttttttttttttttttttttaagacggagtcttgctccgttgcccaggctggatgcagtggcacgatctcggctcactgcaacctccacctcctgggttcaagcaattctcctgcctcagcctcccgagtagcttggattacaggcgtgtgccaccacgcctggctaatttttgtatgtttagggttttgccatcttggccaggccagtctcgaactcctgacttcaggtgatccgctcacctcggcctcccaaagtgctgagattacaggcgtgagccaccatgcctggccaagaaacatgggttctaatcccaatgcccccgcttcctagctatgggaccttgattgagtcctgtaccgtgcctcagtttccccacttataaaaagaggttactaaaaaggatgcttcactcaagggtgtgaagacccagtgaatgaagtgttaataagagctccacgtatagcgatgctgctgttcagctgcaccagggtggactcccttgacttgctgggagttacaatgaggaaggaaggaccgttaaacctgtaggtctttccagagaaagtgcgtttcctaaaaccaaatcctgcccttgctccaaaactgtcagtggtggtttcccatgaccacgccacagtcccagggtctcccctggccttcaaggctggcacagtctgaccctgccaacgtccctagtgccaccatctgtcagcccctccttgctcctgctcctggtctgcacatgctgttctctttgccaagaatgccatttccccagccccctggtcccgatggggaacacctcctcatccttcaaagccaagctggaagggaacatctttggagatgccgcttgacctcccaggcagaaggggtcattctccctggagatgtggtcacgtcattaaccacactgggttagaatcatcagaagctgttcctgcctctt

SEQ ID NO: 1244286 - DNA, 4001 bp, Homo sapiens
ttggagagtctgagacgggaggatcacttgagggcaagagtttcagaccagcctgggcaacccagtgagaccccatctctacaaaaaaaacatatttttgtttgtttgtttgtttgtttgttgttttttaattagccaggcgtattggtgtgcacctgtaatctcagctacttgagaggctgaggtgggaggatctgttaagcccaggaagttgaggctgcagtgagttatcatcccaccactgcacttcagcctgggcaatggagcaacaccctgtctcaaaaaaaaaaaaaaaaaaaaggcaagacatcaagacatccctggaggaagccactctgtagaccacaggctaacagagcatggttgagcagggaggagttgggagctgcacccagcacctcacacaatgttatcatggagctggggacagagcaggttccagagctgggtttgagtcccagctcctccgatgatgatatgacaccccagacatgtgcagggatgtcctctaagcctcagcttcctcactgcaatttggggctctgtctctttctggcagggagttattgggaagaccaaatgagatcatgtccccctcccaaaccctgcaaggcctttgcgtcacagttagaatgaagtctacatatagccctgtccactcgcagcctgcctcccttccccattcgcacccttacacacggagccccctccaacctcccccccacacacactgagccctgtgctctttcctctgcccaaatggcccttccctcagacatctagatgtccatcctccttccctcagtctgcctctcggagcagtcttcccgaccactacaacgatgcctccccaaccccggcctgcgtcactccccacgcccaccctgctttgcagcatcgctccctggctgacattacatcatgcatttatttctttgcttattgtctccctcccctccatgagggcaggaaccttcatctgtcttgttgacagtagcatccctagaacctagctcaggcctgactcacagtgtgtgctcagtccacatttgggaaaccaatggagagatgaatggcacagagatgcgctcaggaacccagttccctgacctcccatccaggctgcacccctcaggagtctaggttcctgctgattggtagagttcaggacccagggctggaaagtgtccacccacagggcagatgggccaaggccacgtgctcaaggtgtgcagggctaggagagggggtcagccccagctcccatatgaggggcatgtgcctcgccttgcccctgctttggctagagggtaccctgttcaccagagatgagcctaggctctccccgggcctggctctggctttaccccagagccctccaactcgcagacctccaggcaaggagggctggggacccacccgtaccagccatttgccttttctccagtaacagagcccagaggggtccctgcctgggcccaaaatcacacagcagattggggtagagccggagaggacccgagactcctgtgccagcctgggcatcccctccactgccagggaaggactgcatccaagtcgcatccgtacccaggccgaggtgtccgaggcccaggctgaaatccggttgctgctgcagagaccaagtttccaaggccttgtcaagtgggctgtgccagacgatccccaggcctgtcattggctgctcttcggctcggacacaccaaacctcaccaagcacttccatttctgagggaatagaggttgtggcttccgtcaagcacccatttaccccaccctcctcctcctcttcctgcaaacttgagtcacagctgccctgctgggctcaggccccagggatgtctgagtcagcctggctggggttccagtcctgacaccgcccttaccagctgggagactccgggaacctccaaccctgctgagcctccacttcgacatccgtgaaacagccatgaataagcaggtctcaaaggtcgactcctgtatgcagggacacagcatgcagtaggtgcccaatcataacagcagcacccacctggagccccttatagcagcccttctcctctgcacttccacatggcatctcatttaaccttcaccacaacccaactaggaaggcaccatcattatcccattttactgatgaagaaactgaggcccaggaaggtgaatttaccagccagctcacaaatggactagtagatggcagtttgtggattggagcccagaggctgtgctcctgcccacaccctctcaaatgagggctataaaataacactctaagagctcttcctacgtgcctggcagtgtactaagaatttgagtcttcagtacgttcaatcttcacaacagccctatgaggtgggggttatgaggagccaccattttacagatgggtaagtcaagacacagagagaggatgtggcttgccacagaccacatggctggtgagcataggagccaagattccaacccgtttcccatcctggccaagaataacactcctgcttcttcatttctccgaaagaagccatgctgtctccatccctggctgtgacttgggctgcttgtcccttctctgcccacccacccacccccagggctgtgccggggaaagaaggtggttcctggagccctctagcctctgaaaagcatggcagtggcgcaacgtagaggatgggcttaaagccaaagaaacacagcttcttttgttgttgttgttgttgtttgggtttttgtttttgttttgttttgagacagagtctcactctgtcccgagagtgcagtggtgtgatcctggctctctgcaagctctgcctcctgggttcacgccattctcctgcctcagcctcccgagtagctgagactacaggcacctgccaccaagctcagctaattttttgtatttttagtagagacagggtttcaccatgttagccaggatggtctcgatctcctgacctcatgatccacccacctcggcctcccaaagtgctgggattacaggcatgagccaccgtgcccagtcttttttttttttttttttttttaagacggagtcttgctccgttgcccaggctggatgcagtggcacgatctcggctcactgcaacctccacctcctgggttcaagcaattctcctgcctcagcctcccgagtagcttggattacaggcgtgtgccaccacgcctggctaatttttgtatgtttagggttttgccatcttggccaggccagtctcgaactcctgacttcaggtgatccgctcacctcggcctcccaaagtgctgagattacaggcgtgagccaccatgcctggccaagaaacatgggttctaatcccaatgcccccgcttcctagctatgggaccttgattgagtcctgtaccgtgcctcagtttccccacttataaaaagaggttactaaaaaggatgcttcactcaagggtgtgaagacccagtgaatgaagtgttaataagagctccacgtatagcgatgctgctgttcagctgcaccagggtggactcccttgacttgctgggagttacaatgaggaaggaaggaccgttaaacctgtaggtctttccagagaaagtgcgtttcctaaaaccaaatcctgcccttgctccaaaactgtcagtggtggtttcccatgaccacgccacagtcccagggtctcccctggccttcaaggctggcacagtctgaccctgccaacgtccctagtgccaccatctgtcagcccctccttgctcctgctcctggtctgcacatgctgttctctttgccaagaatgccatttccccagccccctggtcccgatggggaacacctcctcatccttcaaagccaagctggaagggaacatctttggagatgccgcttgacctcccaggcagaaggggtcattctccctggagatgtggtcacgtcattaaccacactgggttagaatcatcagaagctgttcctgcctct

SEQ ID NO: 1244287 - DNA, 4001 bp, Homo sapiens
agagtgatatgggattatgggaagtcagaactgagaaatggcaaggccctgatattggaaaacagggcgtttgtaaagacccagggggaaaattccagagcttagctggggggccgtactcggtcttcaaaatggaggcaagtggaaacgaaatactgaggggcagtaggtaatgccacaatgggatagtggctgatctgccataagggatggtagactcggatactggcatgttgtgaggacctgacgtggagaaagatgccattgaagggccttgtagctatttagtggagggagaggctatattttggaatgctgggtcacaggattaagtctgttttggagggacagtggggatgctgtggagcagactaggaagtttggcagaagaagttagaagagttggaaattaatggagaactgaatatagaggagactgaaaaagataatttattccatcagaggcatcacaattacagattacagacatttgcaagtaaataatatgcagggttagagcgctgcgttttaacatttaacattcatgagtaaacagagatggccggtgggtaaatatcttgccaaggtggttcctggtattaagccttttgagtcttaagatgacaaatccctagggatcaggtggttttcccgcacgaactcttgtcaatgagaaatccctcagccccttttgtcttgggtctcacagctccagaagtgagccgggccagaacgaagccatcctagagtccccaaggacagccctcccgtggaccccggctagggcccccagagtctcatcctcaggagtgcgccagctctgggcctgcgtgccggcggggtctgcagccacaggtcccgcgagtcccggacacttccaggacgtggtctcctggtgagacagctcctccgggtaccagtctcgactcctccgggcagcgacaacaaagtctaaggcaggaaaaacacacagtcgtggtcagccggagcccctgggggcgcagcacgacaccccgacgaacgccacttaccgagtcccgccctccagcttcgcctgctgcgcgctcttgtcctctctcggccgcgccaactctggggcacagctggctcctcctgggggcgatgcagcatcacagggctccggcccaccccgggccagggcgccgaccctccctgccggaccctctctagaaggccgcgggtctgggtctggctcatcccttaaagattccaagattgggcgcactctgagctccccaaacacaaaatgatgggatccctgcgcgtgcccccacgtcacagagtggtaggggtccaggggcattctaattataaacggggctcaatcacaccccaaaattctaaacgcctccacccctaacctgcaggtgcaaacagcacccctatttcattgccggcagctactttgtactttcgtactgatagacaaagatagtgacaacaaagacggaaagaaacaagcatcgaaagctacatgaagggggtgcagcgctgttctaaaacacaaaatgccgagccccgttttccctttccctccccgctcggtcctgcgcccaccccgtcccgcgctggccactcaggcaagctgtaaatggatataggtaaagatgcaggaggtgatggagaaggcgatggctgcgtagatgaagatggagaggtgcggaaaatggtcgagatagcagccctcgtccagtggaggcgcctccttcttgggcggggggcgcgatgcggccttcgggggctgcccggcgcggcccccctgcgccctcccgcccgcgcgccgaccagccttcttgcccgcggccgacgccgacctgggcccgcgggcagcgggagggtcttccgggggaggcttgtcaaacaggccttcggactcggggtccgggcgaatctgctcgagaccccagggtctgcgccgaaagagcccgtcagccatgggcaggatcgcgggtaggtgggtcagccgggtctgggtcagagcgcagtgggcggtgggcggggctacggctgtatttctagcgacccgggtgggggcggagccagaggggcagggggcctctgcagggtccgccggtcctctcagctgaggcgccgcttcgcctggctcctccttccgcccccagcctgttgcagaggctggctcgccgggttccagctccgctgcctgcggctcggcagtctctgcgcagcaaggtttgtctccatggcaaccagactggcggcgcaagggggaggaaacgcgagccgctggctgggaccccggggcactagtaggcttggcacctaagaagccgaaatgcaaccagccaggctctcagctgcgtggggagcttccccagggcatatttctccttttaaaagaaatatttattgtgtggtctgttttaaattttaatcttaatgcgtgaaaaagctaacacatcatctttgtagaaaactagaaattgagaaaacagtgtaggcaaaatcagtagtaaaataaagcctcccacaatcccaaggtccagagataatacagctcaagaattggtgcatttctctgccttcttccttttttttctctgtctctccatctgcatctgtatgtgtacaacctgttttctcttcttgctcttcacccacaaaagcaggcatccagccttttgagcatctcgcatatgattaagaacaaatccttcaaagacctgcctcacctaagcccatttctcagacccacctgcggtctactcaggcctccttgtcatccaccaagccctctctggcttcattggtactgccgcaggctgctgggcactagtatctcctggcgtctctgttgcacctgaggttccacggctggctggtgttccttcctggaatggagggagaacaatcacttggatttatttgagtcccagtagattggagaggtccactggccggctttgttagttgcagcaaatccaactcaaactgccatcagagaactccctgcctcctgcaagtgaaaggccccggggtgaaccaaggccaggatgctgaaacgctgtaaccagggtgctgttcctctctatcctacagcgttgccagggacttcttgcatggccagagcctactaggtagtggtaggtactcaggtttttgctgaatgaatgatgcagtgaataacggcagcagcaaactctggttctcacagcttaaccacctcagctaaaagggcttccagttggctggatgaggagaagatggaaccctcatccgtgatgttgagaatgtaaaatggtgcagttccttttttttttttttttgagacggggtcttgctctgttgtccaggctggagtgcagtggagcggtctcggctcactgcaacctctgcctcccaggttcaagcgattctcctgcctcagcctctgagtacctgggattacaggcccacaccatcatgcccagctaattttttgtatttgcagtagagacagggtttcaccacatgggccaggctggttttgaacttcctgacctcaagtgatccacctgcctcggcctcccaaactgctgggattactggcatgagccactgcgccaagccgggtggaagtatatgaagggtgaaattgaaaggtgtggagggtggaatggaaggatggtttaggtggagtgaaagaatgtgaagaatggaatggaaggttgcagaaggcagaatggaaggacatggaaggaccagagagtgaaaagtggaatgagaggatgttaagggtggcacggaagagcttgaaggatgtcatggaggggtgtgaagggtggaattgaagggtgtgaagggtgaaatgggaggttgcttagggtgaaatggaagatgtgaagagagaaacggaaggacatgtagtggactggaagagtgtcaagggtggaatataaggtgtgtaaggtggagtggaagaatatgaaggttgtaatggaatggcgtgaagaatggaatgaaatggtgtgaatgaataa

SEQ ID NO: 1244288 - DNA, 4001 bp, Homo sapiens; identical to SEQ ID NO: 1244284

SEQ ID NO: 1244289 - DNA, 4001 bp, Homo sapiens; identical to SEQ ID NO: 1244286

SEQ ID NO: 1244290 - DNA, 4001 bp, Homo sapiens; identical to SEQ ID NO: 1244285

SEQ ID NO: 1244291 - DNA, 4001 bp, Homo sapiens
ggccaacaagaggctcctgtgatgtgtagatatttatccatattcttatcaacatgctgagtgcagaaaccatttcccaagccctttgatttgcagcaaagcctggagccttccctgggacatgaagcactatctggagacagagccacagcctttgcccctcaaatgccaggctggtccacaatcccatgcctctactcatgctcttccctatacaataccctctctggctaataaactcctattcattcttcaaaacccagaccaaatttcacctcctctgtgaagtttaccagttttctccaggaaaagttagatcgttcctttttctgtcctcccacagtatttcatccatatctcatattactgtcttcacatctgtttcccctatcagaccatgaactcctcaagggctccatcttatttatttgttttcccaggacctaagcatgtcaatacataataggtgttgggtgcatgctgaatgaataaaactcctagagcagagaaattcagcatctggaggttgcagagggagagggcagagatagtccctcggcaagcctctcacactgtaatgtgcctactatcacctagggattttggtaaatgcagattctgactcagaaggtcatagaaggggcctgaaagtctgcatttccagtaagctccaggtgatgatgatgttgctggtctgcagaccacactctgagtaccaaggccttccagactttggttctcaatgtcgctgagcagtcaccaaggagatagggggaaggcctgagaagggatgaagtcagtgagattctcttccatgattgtaaagagccctgtggagggtggtggagtgagccaataggaaagccataattcttgccccatcacctgcaggaacactctcttgatcttttgagtgactccaagatcaggatgagaatgaagagatagctcttatcaagccctctagagcggaaataatctacttcaactgaaagatttgaggcacacaattgcataaaaaacaaatataatttaaccaccccattcccccaaaatgaagcctgcctactaccgctgcatacaggtcacacacctgcttgagagccaggtgtccacagggcacttaagacagctaggactagacattgagggcaaactagatggtcggatctgctgcagatggcaggcatgagatgctggaaatgagatgaagacctgacagctccggcttagggaaccccttaaaacactgcaaaatctccactatagtggagaggccagatttcatcacactgtctcaagaacagcacagggagcaccattctgtcactgttttcccccaaattcctgtgtgactctggacacattaaattgcttaagtctcagttcctaaacaaggtggataagagaggtctatggtaccttccagccctaagagtttatgattctctgacatagttttcagacacagaaaagcctttttcccccacagtggtggggggaggcttaattacattctctcttataccaaacaagaggagtgtgccatggggtggctaaagctggcaccagaaagtgcctgatagagacaagtctaaatccagtgttaagctttctgagaagacgttaggaaatttcatcatcaactttgcagaaaccaggaaagatgaaagttgacgagtcttacctgcccagtgccttgtcttttcacggcagccagggagttgctctgcttggaggagctggtcttttataccttccagcaagaattcacttctgggaaaggcccagaaggaaagattttgatgtggcttggaggagacgctgaggcttagcaggaaagactgtgtgactccgggcagatacaccaggaaactgcagaatggcagggattggttgatgcaatagcactgactgtgggtgaagcaactcctctttccattttctagcttaaatgcatgatcctgatctagttccggaaggcaaaaactgcatgccctgagcacatttgtcccttttaagctcctaatgggatccgaatagctcttagaattatgaacaattattaggttggtgcaaaagtattgcaaaaaccgcaattacttttgcacctagctaaatggttctcctccccattcatatattcactgccctttgatccctcccttacattccacccaatttactgtggaatccagtggattcatcttttggatttaaagtgatcaataaacattaatttttttggtcaaaatttcaaaatacttttggccaccaaagggtgagaagagccctaagctttcatagtgggttgcagtccctgcctctgccattgtatggctctaggcaagtcacttcaccttctggtgtctcaaattttctagtattgaaatcaatggttggttttggtgattattatgattctatgacttcatgccttctatagggtgacccatttaaaaaactccagaatctgggaggccaaggtgggtggatcacttgaggtcaggagttggagaccagcccagccaacatggtgaaaccctgtctctactaaaaacacaaaaattaaccaggcatggaggtgcatacctgtaatcccagctacctgggaggctgaggtgggagaatcacttgaacctgggaggcaggggttgcagtgagccaagatcatgccattgcactccagcctgggtgacaggacgagactctgtctcaacaaaacgaaacaaaacaaaaccaccactatcgtataaattattgacctaaagctcaagcataatgttacatacctttcctacctcaatgactttggaaattcaagttcattagattcatacaagaaggaaaaaggaagattccgagaaaacaaaatttcatgaaagtatattttacagacagacaatttaaaacataataagcctctttatgaaattatactttgagttgaaaatactctgggagcaactgtcagaaatttatcaaccccaaaacagacttcttggttcgccttcaaaaaagtgatatttcctttctctagatggtggaatatatctaaaaactacttctctcgtgatgaatccaggcaaataagctgggcatctcggaagaaggcagctgtccaggagaggtgaatgagacatcaggctcttcttgttttctttgaaacacacttcagctccttagccaagcattgtttttctgtgtctgaccattccctgaactttggcacatgtttctcaaggttcttgcctctgagttttatgcttaatatgttcaggaagctgtgttgttaggcagatcttgacctagttggttctgaataatctgaagatggaacttccttttagaagaccctatgggataacattgcttcctatgtacaaaatatagtgacttattggtcagggtaacagcaaaatacaggtctgattattcccgggttttatcatgttatgacatgatatgatatgtcctagctttggtctttctgtaatgggtcaaataggatggggcagtgtcagctccagcccagtaaggaccttccttgatattggccgtgaagcacacctggaggcagtcaatctgacagtgacatgcctattgttctatagctaatttttatttgagagctttgctgacatgtgatgacatgttttcatgggtttatctcagtctagtcaaatctgtagcacaggtagatgtcttcccatgtgggaatggcaaattggcctgagaaatggagagtggaaggcagaaagttcaggagaaagctaaaaaggccaatagcttctcatatgtcagtgcagagtccaagatattttagcaaaagcagcagcagcagggagtacccaatgaagataaggtctatcgctggcacatgacagtacacacacccacacacacacacaaacatgcacacatacttcccaggaacacacagtttataaatgagactgattttggacatagctggctcacctctgtcgccttctagaatt

SEQ ID NO: 1244292 - DNA, 4001 bp, Homo sapiens
caaaggttgaactgtggctcgagtcaggtgtgaatgctgagtctgaacctggtctggatgtggaagtgtcacctcaggatgctttggagaaactatagtcctcttcgggggtgtagaatgtccaacctccgtagtaggttctggagtgatggtaagtcccaggtccaaaagttgaactgtaacgctgggtgacactggatgctgagcttgatcctgacctggtgttggatttgttaccccttgatatactcgaagttggggtacaactttcttaggaggctgagttggggtctccttcatggttggagaaagttcaacctctgtcttggattctggagtgatggtaaaccccagatccaaaggttgaactgtggcttgagtcaggtgtgaatgctctggaggttgagctacaactacattagggaactctggagtctgagctggggcctcctgatgggttagggaagactcaccctcctcagcggtctgtggatgctcagctgcagcctcctgctgggttggagaggggttctcattattaataggttccggagattgaaatgaagtctcctgttgaactgctaaaggtccagcttcttctgatgactctggaagcagaggtgggcccccgtgctggatggcgggaggttctacatcattacctgaccctgagagccgagttgtagcctcctggtggactagagaagttcccacctctgcactaggctctgctgctatggtgagctgcacgtctggaggcttcacagagacactgggtgaagctaaatgatgagtttgatggtgacctggaggtgaaactgtgacttcatgatgttctggaggctgacctggggtctcctgctgggtcggagaagattcgacctccctaggagactcagaaggctgaactggctgctgctgctcactgatggaaagttcatgctccataggaggaactggaggctcaattggggcctcctgttgggttgcagaaggttccacctcctctggaaactgaattggggtctcctgctgggcttgggaagattctgtctcattggtaggctctgaagttatggtaacctccacatctgcaggtttaactgtaatgttgggcaagtgataataagcttgatcctcacctggaggttgaactgacacctcatgattcggtagagttagactctccatagaggactctggaggcagagctggggcctcctgctgcattgaagaaggttcttcctcaaggagctgtggaagctgtgctggggcttcttgctggagtgaagaggactggatgtcttcaagggtctctggattttgagtttcgggctctagatggaattgagaaggtccaacttgctcagagggccctggaggctcatctgacttcacccggagttctggaggcaggctaccgggatacggtgtatctgtactggaatattcattctgcaaagtctgtttctgactctgaggtgtggataattggcgtgtaattccaataatctcagcaaggctccaacgctgagctggatctttcttcagcttcttgggcgaaacagggagcctttcctgtggactcagcttgtcctttaaatcctgctgtgaagccaagaactgctctggctccaggggctgctctccagctgaatcccaggtgtccaggaatggaaccaaattttcagtcgattcctggggtggggctggcatctctgaggaagcagagggccccaggtgatcaaagtcccacgggtctgctgggagagtaggcgcatggggagattcccgtgggaaatgggaggagtgggaagaccaggactcaggcggccccaggggattagaggtgagctggagcgggtccttgacccactccagaggctgagcctccttgactagtagccacaatagttgccacataaggaggggccatgggccccagaaacgcagccgggacatgacacacactagtgccgggcactgagcagaagacattctggcagctccgagacgctcgtgccccttctaagcgtgagccccgccctgtctttatgacacctttatttatgtcacagatctgctccatgtcaccagggcactcttatgtcacaatcccgcccaagcacgccttcccatcctgccctgccggaacacccctctcctccccttagtgaggaaggatttgggcctcagaccctggtggtcccaggactccagcgcctgctgtggtggggtagggtggggtagggtggggtgggggcgcggcagagcttcccaaggaagtcaccggacctcgcctcaggatattcagaagtgctagttcagttctggcagccttcctcctttaaggtgaaatccgagaacactcttccttccagggagagcaactgacctgcaaaatgggcgccaggatgcacattacagtcacttattccaaagtgttgccattttcgctaaactgtcgcatgtttgataattaattcaccaccctattaggtaggggctgccagggaataagcgaggactccaaattttctgtaggaggggtgttgggagttggcaattcggtctgggagagaaggttttaatccgagtgaagagccctttgcactagcctgggaggaggctgaactgtcatcctgccttgactcaacacagccattcccctagaagttacagcacttctagggtcacctgtgttcagagatctaccctgtgtgcacacatggagaagaggcttaggttgttaaagtcagcatgttaaatcatttcctgaaatgcgactgtaactagaacccagctgacttcccccacagccgttcttacctattttattactgtctggcataattaccagcatgtaaactccaagaaggtgcttcatcttattttagtgcttggcatagacatagggtgcatagtgatggctttaaaattgaaggggggccgggtgtggtggctcacacccataatcccagaactttgggaggccgaggtggggggatcactgaggtcagaagttcgagaccagcctgaccaacatggtgaaactccgtctctactaaaaatacaaaattagccaggtgtggtggtgcatacctgcaatcccagctactcaggaggccaaagcaggagaatcacttgaacctgggaggcagaggttgcagtgagccgagatcgcaacattgcacttcagcctgggcaacaagagagaaactccatctcaaaaaaataaaataaaataaaatggaagagagtccaagattcacctcatttagggatggagctatcgttataatcagatttctgaaatgagtgctgacttcctctcacatttcacaggaagctagacttcttaaagcttgaagtctccttggtgggttttatttaaattgaattaaaataattattttacagggaaaaatttcaaaacactttgcaactttggggtaaaagttaaataaaacactgtagccccaagttaagttcccactgaaatgatacttttgctcctttttttaaaaaaaattccataaatagtaaataatgactgttttgagattaatttagaaacaatctctatttaagagctttcatatgcagtcatgcattgcttgccacgtgaggagcttgagaaatgtgtcactaggtgatttcaccattgtgctaatatcatagcgtatacttacacaaacctaggtggtgtagccaccatacctagggtacacggtatggcttaggactcctaggctacaaacctgtactgtatgttactgtactgaatactaaaggcaactgtcacagaatggcaggtatttgtgtatgtaaacatggaaaatatatagttaaaatactgtgtaaaagataaaaatggggcctgggcacagtggctcatgcctgtaatcccagcactttgggacgccaaggtgggtggatcacttgagctcaggagttcaagaccagcctggccaacatgatgaaaccccatctctactaaa

SEQ ID NO: 1244293 - DNA, 4001 bp, Homo sapiens
caaaggttgaactgtggctcgagtcaggtgtgaatgctgagtctgaacctggtctggatgtggaagtgtcacctcaggatgctttggagaaactatagtcctcttcgggggtgtagaatgtccaacctccgtagtaggttctggagtgatggtaagtcccaggtccaaaagttgaactgtaacgctgggtgacactggatgctgagcttgatcctgacctggtgttggatttgttaccccttgatatactcgaagttggggtacaactttcttaggaggctgagttggggtctccttcatggttggagaaagttcaacctctgtcttggattctggagtgatggtaaaccccagatccaaaggttgaactgtggcttgagtcaggtgtgaatgctctggaggttgagctacaactacattagggaactctggagtctgagctggggcctcctgatgggttagggaagactcaccctcctcagcggtctgtggatgctcagctgcagcctcctgctgggttggagaggggttctcattattaataggttccggagattgaaatgaagtctcctgttgaactgctaaaggtccagcttcttctgatgactctggaagcagaggtgggcccccgtgctggatggcgggaggttctacatcattacctgaccctgagagccgagttgtagcctcctggtggactagagaagttcccacctctgcactaggctctgctgctatggtgagctgcacgtctggaggcttcacagagacactgggtgaagctaaatgatgagtttgatggtgacctggaggtgaaactgtgacttcatgatgttctggaggctgacctggggtctcctgctgggtcggagaagattcgacctccctaggagactcagaaggctgaactggctgctgctgctcactgatggaaagttcatgctccataggaggaactggaggctcaattggggcctcctgttgggttgcagaaggttccacctcctctggaaactgaattggggtctcctgctgggcttgggaagattctgtctcattggtaggctctgaagttatggtaacctccacatctgcaggtttaactgtaatgttgggcaagtgataataagcttgatcctcacctggaggttgaactgacacctcatgattcggtagagttagactctccatagaggactctggaggcagagctggggcctcctgctgcattgaagaaggttcttcctcaaggagctgtggaagctgtgctggggcttcttgctggagtgaagaggactggatgtcttcaagggtctctggattttgagtttcgggctctagatggaattgagaaggtccaacttgctcagagggccctggaggctcatctgacttcacccggagttctggaggcaggctaccgggatacggtgtatctgtactggaatattcattctgcaaagtctgtttctgactctgaggtgtggataattggcgtgtaattccaataatctcagcaaggctccaacgctgagctggatctttcttcagcttcttgggcgaaacagggagtctttcctgtggactcagcttgtcctttaaatcctgctgtgaagccaagaactgctctggctccaggggctgctctccagctgaatcccaggtgtccaggaatggaaccaaattttcagtcgattcctggggtggggctggcatctctgaggaagcagagggccccaggtgatcaaagtcccacgggtctgctgggagagtaggcgcatggggagattcccgtgggaaatgggaggagtgggaagaccaggagtcaggcggccccaggggattagaggtgagctggagcgggtccttgacccactccagaggctgagcctccttaactagtagccacaatagttgccacataaggaggggccatgggccccagaaacgcagccgggacatgacacacactagtgccgggcactgagcagaagacattctggcagctccgagacgctcgtgccccttctaagcgtgagccccgccctgtctttatgacacctttatttatgtcacagatctgctccatgtcaccagggcactcttatgtcacaatcccgcccaagcacgccttcccatcctgccctgccggaacacccctctcctccccttagtgaggaaggatttgggcctcagaccctggtggtcccaggactccagcgcctgctgtggtggggtagggtggggtagggtggggtgggggcgcggcagagcttcccaaggaagtcaccggacctcgcctcaggatattcagaagtgctagttcagttctggcagccttcctcctttaaggtgaaatccgagaacactcttccttccagggagagcaactgacctgcaaaatgggcgccaggatgcacattacagtcacttattccaaagtgttgccattttcgctaaactgtcgcatgtttgataattaattcaccaccctattaggtaggggctgccagggaataagcgaggactccacattttctgtaggaggggtgttgggagttggcaattcggtctgggagagaaggttttaatccgagtgaagagccctttgcactagcctgggaggaggctgaactgtcatcctgccttgactcaacacagccattcccctagaagttacagcacttctagggtcacctgtgttcagagatctaccctgtgtgcacacatggagaagaggcttaggttgttaaagtcagcatgttaaatcatttcctgaaatgcgactgtaactagaacccagctgacttcccccacagccgttcttacctattttattactgtctggcataattaccagcatgtaaactccaagaaggtgcttcatcttattttagtgcctggcatagacatagggtgcatagtgatggctttaaaattgaaggggggccgggtgtggtggctcacacccataatcccagaactttgggaggccgaggtggggggatcactgaggtcagaagttcgagaccagcctaaccaacatggtgaaactccgtctctactaaaaatacaaaattagccaggtgtgatggtgcatacctgcaatcccagctactcaggaggccaaagcaggagaatcgcttgaacctgggaggcagaggttgcagtgagccgagatcacaacattgcacttcagcctgggcaacaagagagaaactccatctcaaaaaaataaaataaaataaaatggaagagattccaagattcacctcatttagggatggagctattgttataatcagatttctgaaatgagtgctgacttcctctcacatttcacaggaagctagacttcttaaagcttgaagtctccttggtgggttttatttaaattgaattaaaataattattttacagggaaaaatttcaaaacactttgcaactttggggtaaaagttaaataaaacactgtagccccaagttaagttcccactgaaatgatacttttgctcctttttttaaaaaaaattccataaatagtaaataatgactgttttgagattaatttagaaacaatccctatttaagagctttcatatgcagtcatgcattgcttgccacgtgaggagcttgagaaatgggtcactaggtgatttcaccattgtgctaatatcatagcgtatacttacacaaacctaggtggtgtagccaccatacctagggtacacggtatggcttaggactcctaggctacaaacctgtactgtatgttactgtactgaatactaaaggcaactgtcacagaatggcaggtatttgtgtatgtaaacatggaaaatatatagttaaaatactgtgtaaaagataaaaatggggcctgggcacagtggctcatgcctgtaatcccagcactttgggacgccaaggtgggtggatcacttgagctcaggagttcaagaccagcctggccaacatgatgaaaccccatctctactaaa

SEQ ID NO: 1244294 - DNA, 4001 bp, Homo sapiens
aaaaaaaaaaaaaagactttagtatttttccataaacaatgatatacagatggcaaatcaaaagatgcacataaaaagaggctcagaaccattagtcattagggacaaggaaattaaaaccagaagaagctaccaccatatacttattaaggtggccaaaaaaaaaaaaaaaacttgaggccgggcgcagtggctcacgtctgtaatcccagcactttgggaggccgaggcgggcagatcacgaggtcaggatatcgagaccatcctcgctaacatggtgaaaccccgtctctactaaatatacacaaaaattagccgggcgtggtggtaggcccctgtagtcccagctacacgggaggctgaggcaggagaatggcatgaacccgggaggcggagcttgcagtgagccgagatcgcgccactgcactccagcctgggtaacagagccagactccatctcaaaaaaaaaaaaaaaaaaaaaaaaacctgaaaatatcaagtgctagggaggatacagagcaaccggaactcttcatacatttgcaggtaagaatgcaaaatggtacagctactttggaaaacagttttggcagtttcttataaacatacaacccagaaatcatactcctaggtatttactcaagagaaacaagaattgtgttcagacaaaaaacattatggaaatgtttacggcagctttattcataggtgccacaaactagaaataattgaaatattcaactattgaacagataaatgcactgtgatacactcatataaaggactgctactcagcaataaagaaactactgatacaacaacacagatgaatcttaaatacattatgcactgtacacgtataaactaaaaaattaaaatacctatttaaaagtcaaacaggccgggcgcgatggctcacacctgtaatcccggcactatgggaggccgaggccggcggattacctgaggtcaggagttcaagaccagcctggccaacatggtgaaaccctgtctctactgaaaataccaaaaattcgccaggcgtagtggcgggcgcctgtaatcccagccactcaggaggctgagacaggagaatcgcttgaacctgggaagcggaggttgtggtgagctgagatcgcgccactgcactccaccctgggcaacaagagcgaaactctgtctcaaaactaaataaataaagtcaaacagtacatgaaaaaataatatgatcaagagaggttcactgcaagaatgtaagggtgaatcaatataagatctactaatataattctatgaatatacactactgtaattaatatgtagcatgcaggaggaaaactatatgatcatcttaaaagatgctaagatgtcatttaacaaaatataatagccatatctgatttaaaaaaaaaaaacttaaacagaaaaaaaattgaaataggtgaatatactcaacacattaaaggtctcaaaccaacagttaaccattaaatatctgcaacagttccattaaattgggatagcatactaagatgcctatcattataactaacatttgacattgttttggaggaggtggtagggaatgcaatttttttcttttttctttattacccaggttcccatcaatggtaaaggcaatgtaatttgaagagaaaaaggagacataaatataagaaaatcagatgtgtacatgattcatgtttgcagatgacaaaactttattcctagaataaagttattccaatcaaagcaaaagctacaagaaacaattagaaaaaagaataggtggctgaattcaaaattaattttttaaattaatgagttttcaactagaagccccctagcagagcaggtattttcatagacaaattaaagattaaataagatatcatggcataagtgaaaatatttaacaaataaattatacttcatccaattttgtaaaaaatacatacatatacctgtgccaggtgcagtggctcacgcctataatcccaacactttgggaagctgaggcgggcggatcgcctgagctcaggagttcgacaccagcctgggcaacacggtgaaactccatctctactaaaaaatacaaaaaattagctgggtgtggcagcgagcacctgtagtgactacaccactttgttgacggccgtccggacctgcagctgtccgggccaggtggctgcccccgcctccccccggccggggcgctggtgctggggtggggctggcggcggcggcggctttctccggctactgctgccccccctgggcgagctcagccgcgtcttgggcgccacctcagcctgggcggcggcccacctgccccggctgctgccgcggtgccgcgagcggaaccccggatgggtccggacgtgggcggcggcggcggcggcggggccggggcgcagcgctccgcagagggagccgcgggctgcttggtcggcctgccccgccggcccctcatgttggaaccgaggcggagggagaagggaaagcggccgggaaggggcgggcgcaatgggcgcagtgggggcggccggggccgggtggggaggccagaggggcagggcaggaggggcccggcctgcggaagcggttggagggagaaggctcaatccgaatggctggggcctcactgcggatcgccttcagccgccatcttgtttcttccgttaccggagcgcggtcacgtgagctgagcagcctacgagcctgggacggggcgaggtggcgcggcggccgctagggggagcgcgggagcattgagtcgggggcggagagcctggggcgccggggctgggcgcagcgcggcgcggctggactccgggcgcggtggcgccgttgagagagacgcgcagctcgcgaaatgccccgcggctaaggccttcggagaccatagtctccgcggacccctggctggagcccaaagccggccggacctcctccctgcgtctccccttccgcggctcggagaggaaggcaggagagcccccaaatattcccctcccgccccctagggaaactgaagctgaaagagccagcgaaagaaaaaaaaagtctcggagtggggcggcccgagcgacctaagggacggggcagcgccagcgaccgagggaaattagtcggggtgggggaacagggagacaagcccccagaatttaggaaactcctaaattctactaaaaatacaaaaattacctgggcatggtggcgggtgcctgtaatcctagctactgaggaggctgaggcagaagaatcgcttgaacccctgaggtggaggttgcagtgagccaagattgcgccattgtactccagcctgggctgcaagagtgagactccttctcaaaaaataaaataaaataaatcaagaaaagtctggaaaccatgccaactggtgaaatgaataaagaaataaatgttgtctggactgagtggctcacacctctaatcccagtactttggaggccgaggcgggcagatcacttgaggccaggagttcaaaccagtctgggcaacatggtgaaaccctgtcttttctacaattgcaaacaaattagccggacgtggtggtgcatgcctgtaatcccagctactcgggatgctgaggcccgagaatcgcttgaacctgggaggcagaggttgcaatgaactaagataacgccactgcactccagcctgggtgacagaatgagactaggtctcaaaaaaaaaattataattcagtaacatagtcagttacaagataaacattgagcctgcctcctaggttcaagcgattctcatgactcagcctcccgagttgctgagattacaggcgtgtgccaccatgcctggataattttttgtacttttagtgcagacggtgtttcaccatgttggtcaggctggcctccaactcctgacctcaagtaatccacccacctcagtcttccaaagtgctgggattacaagcgtgagccactgtgcccggcctcaatttgggtttttatgga

SEQ ID NO: 1244295 - DNA, 4001 bp, Homo sapiens
aaaaaaaaaaaaaaaagagggtgaagcgaaaataggagcagagcagcggttaagcaatgatgtgatggggtaaataagaacggataagaaaacgagtaagagtaaaagactggagaaaaagtaaaagactggagaatgggtctaacattaaaggagaatgaggagaagggagaattgacaggcaaaggtgaaagcagaaagtcacttgtcagtatggcttggggagataaagaaggcccaggaaggcctccaggaaaaggctgccatgtcaggcaagacacagaggatgattgaggaaaggtgattcttacaaggtggtgaagatgccattgtaggtgtcgggctctggcacaggcacttggcggagcctctgctttgggctgagaccaacacatgacagagtctcatctccgcaggtgcagagctcacatatgttggtgcttgtggaggccttctgttcctctggtgcagtttcagactgcaccaatgaatcctgcgaagattctaactttgtaggtggacctgtgacttcagtcaggcttcgatgcagagtctgaacctggtctggatgaggagctctagtcttctccagggctgtggaatgtccaatctctgtagtgggttctggagttatggcaagccccgggtctggaggctgagctgaggtttcctccgtggttggagacggtttaacctctgtagtaggctctgtagttatgctaagctccaggtccagaggttgaactgtggcttcagtcaggtgtgaatgctgagcctgacccttgtctgaaggtggaagtgtcacctcagggtgttctggaggaggatctgtagtcctcagggctgtagaagaaggttccgcctcctcgggaggctgaattggggcctcctgctgggcttgggtagattctgtctcatttttaggctctgaagtcatggtaacctccacatctgcaggtttgactgtaaacttgggcaaattataatgagcttgatcctcacctggaggttgaactgtcacttcatgattcagtggagtttgagctagactctccatagaggactctggaggcagagctggggcctcctgctgggttgaaggttctacctcctgagggagctgtagaagctgcgctggggcttcttcctggagtgaagaggactggatgtcttcaagggtctctggattttgacttttgggctctagatggaattgagaaagtccaacttgctcaggaggccctggaggctcatctgcgttcacccggagttctggaggtaggctgccgggatacagtgtgtccatactcaaataatcatctggcaaagtctgtttctgacgctgaggtttggataattggtgtggaatcccaacaatctcaggaaggctccaacgttcagctagatctttcttcaggttcttgggcgaaacaacaaatttggttggtcttgaaaccttactgtctagtggaacaagtatttcatctgcctgatgacctgcagcccgatctagatctgtagtttgaacccacttgaggcgaggaagctgaactagggcctggttctgatcccggttgagaagcggaaccacctctgggagcctttcttctggagtccgcttgtcatttaagtcctgatgtgcagccaagaacggctctggccccaggggcagctctccagctgaatccaattccttcaggaatggagccaaattttcagttggttcctgaggcagggctgacatctgcgaagaagcagagggccccaggtaatcaaagtcccccggggctgctgggggagcaggtgcatggggagattcccatgggagatgggaggagcgggaagaccagggctcaggtggccccagggggttagaggtcagctggagcgggtccttgacccacaccagaggctgagcctccttgactagtaaagacaatagttgccacgtaaggaggggccatgggccccagaaacgcagccaagacatgacacacgctggtgctatgcactcagcaaaagccattctggcagccctgagatgctcatgccccttataagcgtgtgccatgccctgtctttatgacacctttatttatgtcacctttattaggcttgggtccagatctgttccatgttaccagggcaaccttatgtcacaatcccgcccaagcgccccttcccaccccgccaggccggaacacccctcccctccccttagtgaggaaggatttgggccgcagaccggggtggtcccaggactccagcggcctgctgtggtggggtggggtggggtgggggcacggcagagcttcccaaggaagtcacgggacctggccttgggatcttcagaagtgctagtccagttctggcagcctgaattcttcctcctctgaggtgaaatccgagaatactcttccttcaggggagagcaactgacctgcaaaatgggcgccagttagggtggcaggcaggacgcgcgttacagtcatttattccaaaatgttgccgttttcgctaaactgtcgcatgtttgataattaattcaccaccctattaggtaggggctgccagggaataagcgaggactccagattttctgtaggaggggtgttgggggtgggcaattcagtctgggagagaaggcttcaatccgagggaacagccctttgcaccagcctgggaggaggctgaactgtcatcctgccttaactcaacacagccattaccctcgaagttacagcgccacccttcagagatctaccctgtgtgcacacatggagaagaggcttaggttgttaaagtcagcatgttaaatcatttcctgaaatgcgactataactagaacccagctgacttcccccacagcccttacctattttattactgtctggcacaattatcagcatgtaaaccccaagaaggagcttcatcttcttccagtgcctagcacaggcacggggtgcatagtgatggttttaaaattgaaggggggctgtgcacagtggctcacacccataatcccagaactctgggaggccgaggtgggtggatcactgaggtcagaagttccagaccagcctgatcaacatgctgaaactccgtctctactaaaaatacaaaattagccaggcgtggtggtgcatgcctgtaatcccagctactcaggaggcaggagaatcccttgaatctgggaggcagaggttgcagtgagccgagatcgcaacattgccctccagcctgggcaacaagagagaaactccgtctcaaaaaaataaaataaaattgaagggattccaagattcgcctcatttagggatggatctattgttataatcagatttctgaaatcagtgctaacttcctctcacatttcacaggaagctagacttcttaaagctggaagtttccttggtgggtttgatttaaattgaattaaaataattattttacagggaaaaacttcaaaacactttgcaactttggagtgaaagttaaataaaacactctagccccaaattaagttcccattgaaatgaaacttttgctccctttttaaaaaaaaatccataaatagtaaataattactgttttcttttgagattaatttagaaatttaatccctatttaagagctttcatatgcagtcatgcattgcttgccatgtgaagagcttgagaaatgtgtcaggtgatttcaccattgtgctaacatcatagtgtatacttacacaaacataggtggtgtagcctacagcatacctaggctatgcggtatagcctaggctacaaacctgtactgtatgttactgtactgaatattaaaggcaactgtaacacaatggcaggtatttgtgtatataaacatggaaaaggtgtagttaaaatactgtataaatgataacaatggggcccaggcgcagcggctcgcacctgtaatcccagcactttgggatgcagaggtgggtggatcacctgaggtcaggagttcgagaccagtct

SEQ ID NO: 1244296 - DNA, 4001 bp, Homo sapiens
cagggcatccagctaggccaggtgactaggtaaaatagacctctggccccaccttctatgcccatctaccccttttccgggagcatccacccctctgcctgccccagctctgtcctctctgctctgtacttcctccctcctcctccccgtcctcctccattcctctcacccctgttggtggcagagccttctccagtgcagatgccctgtccctggacgtaggctccctgctgctgggctctggagacccgcttcctcctccagaagccctgtttgctcgtagctgctggaagttgggggctgggacccaagagtgttgggtttcctggcatgtgactctgggcccaggtgtcggatacctgagccatggtgtggccaggcaatgccaagagagggcagatcctggaccctgatgaactctgttgtggggagaccaggacccaattccattccctgcaccaggctcccctcccaaggccttgatgctgccatcttccctcactccccaaggctgaaactgcttcccagaactcctcttccttacccagaacctggctgggcagaaggatccctgcttggcaggcctggcgggcagaactgggtgggccccatctcacatccagtgtctccagcaacctgtattcccccaactccattcctctccctactcccttctgccattctttcacgccatggcacattcttccatgctcggtggccccttcttccacggtgagcaaacttcccctagtctttccttggaaaacatgtctgtccagggttcctcatttcctggctcctcgcagtgcccagacctcctgcctgccaggggtgctgtggttcaatttcagtttgttctctgcgtggtagattgattgcttctctaggagttggaaggagttctttaaggcacctgaagcctgatgtggtcatctctgagttttcctgctgattttatgatctggatgagaactgactcaggttctctcagtttgctagagccctggactctcaggttggcactttgaactctccctcaggcctgggcaccaaagatggcttggatgacttgttcccccagggtgtccctatcccaggcatcatttgcaggccacgccactccgtgataccaccctctcctaatgttcactgggtagtgggaaggaaggatttcaaggcagaagatgagattagtgtgtgacctgggcatgtcacctgacactgctgcagggttgggaggacccgccagggttgagtggatgtgaaggtactttgtgaagtgctgtgcaaaggctagttgttaggattactgacttccagaacacatcatggtcttcctccatgatttcattacccacgccaggcttttccccttcacctcctctcgtatgctgtgcaggggcagaggtgacaaagggtcatagatgtgatccatgtggatgacccatctcattccttagcccatggtggcttatcccctgcaactcccttgaccctcaagtccaaccacatggtgcctcctatggcaccatcctacccacactatctccagttcggtgctgggattcagagcctcaatgattgatagagctcaaaggaagggaccagccagttgatccctccttagtttgcagaccggtaaactgaggcccagaatgtgaccagagttacacaatgagtcagtggccaaagaccagagcccagttttctaactccttgtccaaccactttccattgcctgctagcagctcttacctctgtgcctctctgccacacataccaataccctacatccttgcacgttgagcctgatggtacccacggtattgtattgtacggaacctggaagccctcctgccaggtcagagaggtggaagagaacaggagagtggggtgtcacagagactaggggtggatatacttacacgaaggaagatgaggtcatacgcattggagacctttctgagaaggatttttcttgctggattttggaagactatgggtgaccaggactggacacggaattgtagagctgagtgcaaaataaaaatggggtgtgtgtgggggggtcccttgtttcaaaaacctgttaagaatttcttcctttttttttttttttttttttagataaagtctcactctgtggcccaggctggagtgcagtgccacaaccttggctcactgcaacctctgcctcccaggttaaaacgactctcctgccttagtctcccgagtagctgagactacaggtgcctgccgaccaaacccggctaatttttgtatttttagtagagacagggtttcaccatattggccaggctggtcttgaactcccgacctctagtgatccacccacttcggcctcccaaagtgctgggattacagatgtgagccaccacacccaggtgaaaacttaagaatttcaaggccttgccaggtatggtggctcacgcctgtaatcctagctcttcgggaggccgaggtgggtggatcacttgaggccaggaatttgagaccagcctggccaatgtggcgaaacaccatctctactaaaaatacaaaaaattaactgggctgaggtggcacacacctgtaatcccagctatttgggaggctgaggcacgagaatcacttgaacccaggaagcagaggtttcaccgagcctgggtcgtgccacttgactccagcctaggtgacgcattaagaccctgtctcaaaaaaaagaatttcaaggctgggtgcagtggctcatgcctataatctcagcactttcggaggccaaggaccaaggagcctcatgagtttgagactggcctgtgcaacatagtgaaacctcgtctctccagaaaaaaaaaaaaaattgtccaaatgcactttctacaaaaagaaaaataaattagcagaccatggtggtgcatactttagtcctagctactcgggaggctgaggtaggaggatggcttgagcctgggaagtggaggctgcagtgagctgtgattgcaccactgcactctagcctgggtgacagagtgcgactctgtctctaaaaaataaaaataaaaaagaattttaagatgacgacagcagcagagtgtaaaaccaagtgcagagctcttgtgagcacagggcatgaggtcttgtgggacctcgtcagccgcatgcctgtgaggctggccctgtaggttacctttgaacaagcagtttcagaagcatgatggggaccagaccagatggtaggatgccagatgatatcatctctgaggatgtactcaccacagacttattcctgtgatgtcaacaggggaattttgcagactcacatttgtctaaggaatcagataactttctacacttaggcaggagaagcaacaagcaaaccttttctctgagggccggacactctgctgctggctacttggtgtccatttcgggactgtagctgaatgtgggacagaaagctgagcaatcctccctttccccctgttcctctctcacactgggcaggggctttaactgaggcacaagaattgagcctggctgttgatggagggttatttccttctaagactagggcagcttccaggaaaagagtggaactagggtgtccagcacagcagctgtgggagaagcaggagcccagctggagctgcagatgtggttaattaagggagtctgagtgcaaactcggtgaaggagggagatctggggggaaggaggaaccacacttaggacagtgcacactgcccactaggggctgcagaattggagcagaaattctctgccatccatttatttgtttattcattcagtgaggatttcctgtgagccttatgtgctagttgaaggggacatagacagggttcttaaggtgctgggtctatggcagggttctcaaaacaccctgcacattcaaatcacttggggagcttttacagattagttatgctggggcttcatctggaccaattacattaaaatctctgtgcatggggtctaggcac

SEQ ID NO: 1244297 - DNA, 4001 bp, Homo sapiens
gaggccaacgttattccagcgcaggtctggaaggaaacctgtagtcaccagacagaatgcacctggcagagggggagctggcctggccggggtgcttccctagggggcactgccttgcagtcatcaacagagcaggagcacaggccagtcccctagcccctcacttcccagagcagaggcagcctcagagggatgagggagcctgagggcgcctgggaggcctcacccagctgctggagggtggtgttgcccttcagggctagggccagctcctccgcgcccttgtgactgatctggttgttgcggaggtccagccgctgcagggcgccgttggccgccaggcccccgcagaaggtggcgaaggcatcgtcccacgtgcccaggctgttccactccagcgtgaggctgcaggaggggcagaagccagtgttcacctaggggactgcctagcccgtggggtccagggcttggggacgggtgtgggcttggggtctgatgggccggagcctctgcctacccctgccaacgtatgtgaaacatgggcacctggcaatggggaactcttgggctgcagaagcatgtgctcggggccaatcctcaaccacacagagacagggcctggggtcgggaccaccacccacctctgaatggacttgttctgttggaggagttttcccagagcctcggcccctgcagcccgaaggttgttgccctaggagagaaacaggccggtagtcactcgcgtgccctgactggctctgaattcccgcccatgccccaagggccttggtcagccaggggacaagcctggggtgcaccctgcagccttcctcagctcctgggctccctgtcttcagggggcttccaagggccggcttgtttgccaatgtgaactcttgctctggagatggtcacacacaggaggccatcagagagcggcctggggactcacagacagcttccagccacctgcccagaccccaggcccccgagacctggcatcttccacctctcctcttgcccttgggtggcacactcggacactcaagagtgcaggtatctcacctttaagtccagaaagcgcagcacggtgttggcacacaggcctcggagcagcagtgtggcccctgtgtaaggggggccggcggtcactctctgcccctgctgaccccaaggccctccccgtgggccccttttcagggcagctccctagacccaggaagggacaactgtcccgatggtctgggttggcgctggccaagagtctcgctgcgaagtcatgtttgaaacacctgcagcccctgccaggcaccaagccggctctgcacgcggggaaccaggtaagaccgcgaatgttaaggcctctcccccgtcatacagaggaactgccctctactcccaggtgcaggaaggggcgcccctgctcgctttaactacggcacagaaattggagagcctggagaggaagcgacctcgggctgccgaggcaatggtgtgggcagctaaggagcagagggatccaccccgccgcgcctgcccaccttcctcgctgagcatgcagtcactcaggaccagctccgtgcacagcgtctccctcggcagcagcttgcccagggccctgcaggtctccaccgtcaggctttgcgtggccaggtccagccggcccctgggaagctggtgcagctgctgcaggacagcctcctggggctcggccccactctccctgcacaggcggctgtaggagcgccggaactcctccatgacccgcggggccggcagggcctcctccgcatgctcccgcagctgctgaaagggagccgcgcggtgcggagcagtcccagcgccgggtacaggagacggggcctccgccgacccgggcggagagcaatccgagtgggctccgcgggcgggaggtcctgggagcgcggggctgggcggtagtcaaggtccgctttgggctggggccccgcagtgcttggggaccacccgtgcaggaagcaggcaggtgcgtcgcgcgcccccacccagccctgccccgcctgcagccccgacccccgccctcgcgacagccgcgtcggggcctcagtatccaggaagaacaaggcgcgccgggagaggccgcgggaactacaactcctagcaggctctgcgcaggcagcgcttggtgcgggccaatgagaacaaaggaactggcgcgcctttcgggccgcaagctgagagggggcagcgcgctccaggttcattggctaggggcatgagggtggggccccgggagggcatgctccgggctcattggctgagggtcgtgagggtggtgccccgggagggcgcgttccaagttcattggctgcgggacgtgagggaggggctgctggagggcgcgctccgggctcattggctgagacgtgggggcggggctccgagagcaggcgcttcggactcattggctaggggcgcggggcggggctccgggggcgcgctccggtctcattggctggaggcgcggggcggggttccggtgggcgcgcgttgaggctgcggtcatggagggagcaggagctggatccggcttccggaaggtgagggccggagggcaggggctaggcaggcgcggacgctccgtcccgacctcacgcgtgacactgtgagggccagacgccagcccccgcgccgccccctgtgcctttgaggttgggcccgttctcagactccatctccggccgggccgcgcgccccgcgccctcgtgggctggtgtctcgcagctggtaggagggggcgtggagcagccggggctgcgggaaggtggagagggtctgcagaaacaggcaggggtgggcgccgtcacggcggagtccaagccggcgaagagagaggaggagctgggccgccgccctgcgccctgagcctggggtcttttgttaaggggagatgaggccccaggacggggacagtgagatcgtccagcccgaggagccggcaggacctaccccagccgccaggcacagtggtttcccttttgtttgctccccggtgggcgccagcactgggctaggaacgcgtggtttcttcggtgctccacgttacacacacttgacagggattaaccccacctgccagtggagaaactgaggcacgggggcgttaagtgactcagcagggctagggtcagacctaggccgtctgagccaggatccgcccaggctggagggcgtgccctgctcttccctgttcctggaagtggagctctctgggggtgccatgtgcagaggaccccatcggtgcaggcagagtggtttctgaacctttctactgctctacctgaaggttggggcaccgagcttcctcgatgtcagcagggcctcgtgggcctctgtggcctgggaagggagggtctcaggcccttgtgaacccatcctggagggaggacttcagccctgtagaagcagggagaattctgtttctcctgaatcaggcccttctttatcacccaaggcagcaggcgtggggggcggggggtgtcggtgtggggaactctggtggtggagttgaagattcttgccggaattcagaaagagaaagtcactgaggcttgggccacctcactgggtggttgtgagaacaccaggttaaagtagccaaaaggccactgccggagacggggcactgggtacacaccccaggaggtcatgtgttctatcaagcccacctgacaactagaggcccaggggctctggccagagctggagttgtggtcattgcagagaatgagcgtgagaatgacggggagtggggggcccgtagccctggcgtggcgcccacgtcatggggcaaagctggctgtgtcctaggcaccctccacaaccgccccagtgctgggcctgccttccgaggccactgccgatgtacggggaagccccatggattgtcgaggcagacctggcatccgccactctctggcgtggtcttccttccaaggcctggggcagcagtgttgggggtc

SEQ ID NO: 1244298 - DNA, 4001 bp, Homo sapiens
atacaaaaaaaattagccgggtgtggtggcgcacacctgtagtcccagctactcgggaggctgaggctggagaatcgcttcaactcaggaggcagacgttgcagtgagccgagatcacaccattgcactccagcctgcgcaacagagtgagactccgtctcaaaaaaaaaaaaaaaaaataggaagaaggccaaacatctatgacaagtggataacagaggcaagtacaggggaaaggaagaaggaggaggaagaagggaaagaaggaggaagaggaagaagaaagaaagaaagaaagaataaggccaaacatccctgacaagtggataacagaagcaagtacaggggacaaagggagtacataggctgtgcactaaattcacagtaggaggaatcagggaatgcttcctagaggaggtgacagatgagtaggcattagccatgaaggtggggggatatggggagaaggcatttcaagcagaaggaatagtacatgctaatacagcccttccgaaactccaatatgcccatgcagattctaattcagtagatcgggtggaggggctgagatgctccacttctaacaagccccctgtgatgccaatgctgctgtcctacccctgcaccccctcccatccacacatactctgagtagtaaggtactaaggtgtgagtacacagtgtgggaaattgtacacttgtggagagtggccagaaataaggctgaaaagcagaagtcaactcatgcttaggcattgggatttatttgggaggaagtttctatcagtgaatgcctgattagatttgttatttaaaaggatcactttggctactcaggaggctgaagtgggaggattgtttgaggagttcaagaccagtctggccaacagagcaagaccccatctctaaaaaagtaattaaaaatactttactttttgtttgttttagaaatagggtctcaccctgttgcccaggctggcatgcaatggcatgatcatagcttactgcagccacaggtacctgggttcaagtgatcctcctgtctcagccacctaggactacaggtgtgcaccaccatgctcagctagtttatttttattttttagagataggattctgtctctattgcccaggctggtctcaaactcctgggctcaagtgatcctcctgcctcagcctcccaaagtggtgggtgtgtaggagagaggtgaacacggccttatctaagacagttgagtgaggatggtgaaaaagaaatggaattattttgaagaagggaaaatcagctgggcattaccactgattgaatgtgtggagtaaggagagaaacaaagatcagttgacaaatcagtacacgtcagggacctggtcatcctgagtgtttcagccttctagcaccccttttctcccccatgcactcacatcttctctgacagttccccatcttcagggaaagtcaagttccgcttagtgataagggcttcagtgatgcagacgcccccttcctctggaccctgggctgacttccctgtgaaaagatgagtccaactgtgacacttcctcactcttggaggccttaccccgctgttttccaactgctctacccaccgtcccacctccctactcacctccagacatgatctaaaataaaaggctgctggtctgaggcgggagaggaacgaaaagagaggtcttggcggcccctaaggatggcagaactcaggatggcaggaggagagagaaactcagagacttaggagaggaggaaagggggttgattcagagaaaattgctggggtgaggtcgaagaaaacagtaaattgatgtgaagggtctggagtttgaggggtgtggaggggctttgctggcagcaagctggggtgttgtgggcaggaatggttgagaaaggagcagttcctaggaagccggagtcgttgctaagagactggacgccgagtggggaggtaaaggcgggctccgttggcccggcctagcgcatgcgtcttacggctacagccggcgggtacgcccactgcttccggccccggggttcgctaccccacaatccttagctctttccgtctccactcggcttccgtccattcttccggtggagatggctgcggccgtggcggggatgctgcgagggggtctcctgccccaggcgggtaaggagtggcccaggtcctcacggcgtgtcttgcggccgctctctagtcctcatctgccctcctctactactgattcttcccataatctctgaccccagctagatcgctggcctccttaccccgtccagttccttgtgactcgactggtaatcacagcaacaacgtccagatgttgtctgtctccagcgtttcttttgcctggaccactcctcgcccagacctttgcattatgtctccatcttaatgtgtcagtctaaatgtcacctcaggtcttcccttgactccttagccccgtcgcaatctgtaattttgcatttgtttagttgcttgtttcctctattaaactccgcaagggcagaaccatgttcattcagcatagccagcaggtggcatggtgctggatgttagtaagcgtgcggtagatatttgtttagtgaatggatttgagcacttaatataggccaggcactgtgataactatttttatatgtgttagctcatttaaatcttttaaatcatttaaatctaaagcaccctgtgagaaagacattcgcatctcctctttacagacgcagcaactgaagttcagaccagttgggtggccaaggtcacagctagtaattggcggaagagagattaaaatccagtttcggctgggcgcggtggctcacgcttgtaatcccagcactttgggaggctgaggcggagggaacacctgaggtcaagaatttgagaccagcttggccaacatggcgaaaccccaactctactaaaaatacaaaaatgagccgggtgtggtggcgcgtgcctgtagtccccgctactcaggaggctgaggcgtgagaatcgcttacacccaggaggcagaggttgcagtgggccgagatcgcattgctgcactccagcctgggcaacagagcgagactccatctcaaaaaaaaaaaaaatccagtttaatttgattccaaagcctgcctgcagtcttaacagttaggttttgtggctgctggcaataagacctcttaccccagcaaatatccatactctctgactgttagagccgccttctatctggacctttttctgaggtcacatcccagtcttggaaatgactgaaagtgggaagttctagtcttggcccttgtgttgaggattaagtggtcactttgtctcagggcttttgagtgcctcccttgttttctgtggggtgctctgtagcattatctgtaaacaggaagagaggaggaaagagaaacttgtctgagagctgtgagaatggtgtaacatttttttctcctcttcaaatcataggacagggtgtcagagcagcggttagagtggtggttttcaaactttagcatgcgtcagcatcaccaggagggcttgttagaacactatttgtgacccgtcttggtaacatagtgaaacctggtctctacaaaacaaaacaaacaaaaaacactatttgctaggctccaccccagaattgctgattcagtaggtctaggcagggcctgagaatttatgtttatttttctttctttctttctttttttttttttgagacagtcttgctctgtcacccaggccggagtgccggagtgcaatggcacaatctcggctcactgcaacctctgcctcttgggttcaagcaattctcatggctcagccacctgagtagctgggactacaggtgtgtgccaccacgcctggctaatttttgtagtttagttagagacggggtttcaccatgttggccaggttggtcttgaattcctgacctcaagtgagctgcccaccttggcctcccaaagtgttgggattacaggc

SEQ ID NO: 1244299 - DNA, 4001 bp, Homo sapiens
caaatatttaactacaaaccatgacaatttgtaggtgtagggaactatgaaattgtacattaggggcacctggcctggccaaggaagacagggctgattggaaggacaagcaggaaagaaggaggaggtaactttgtggaaaggccctttaggtgggagagaacagacttgttgcactttggctgaagtgatgcaagtttggagaggtctgtgggagttttgttattatcctagaatccctggaaagcacctagggcttaataagggcagcaacattagctgggcatggtggtgcatgcctgtagtcccagctaccctggaggctgaggcaggagaatcgcttgaaaccgggaggcggaggttgcggtgagccgagatcgtgccattgcactccagcctgggcaacaagagcgaaactccatctcaaaaaataaaaaaaataagggaagcaatgtgatcagatcttagtttttaagaagctcactctagcaacagtactgagaattgcaaaagtactgaggtgagagatgaccagggtgttagcaagatgtagatgggagaaatttctagaaacttaatttacatgtagggctaatactcaccaatatccagataagaaaacagaagctagttaaaaaggttaattaacatgcccaacttcatacacttagcacgtggcagagttcattttcctaatcatgactcaactgtatccagggtactggggactatcattgccacagctcacagtgtttctcacagttgtcctgggttcagggccaaggcccaaacagtcctcttctatggggatcttatagtttaccacccaacctgggtcccctttgacttgcctgatgatagtgttgttgaagaccagagaggttggagctggggaaagcagcagagttttacacaactgtcaacggagtggcctcctcacagataacagatccagaattttcctgggaaatgataacctgaagtcaacaggatctgaaaactatagtccctattggccatgaattaataaggagaaaattggttgggcgagatggcttacacctgtaatcccagctctttgggaggccgaggtggaaggactgcttgagttcaggagttcaagaccagcccgggcaacataggaagaccctgtctccatttttaaaaataaaaaataaataaataaataaataatgaacaaaatttttcttaaaaaagaataaaatcaatcacttactgaatgcttactgtgtgctcagtgcacatgcattatttaagtacatgtaagctccggaggccataaaaagggagtcctaatgcccttatttcccagctagggaacctgaggctccagggaggtaaaggaacttgtccaaagtcgtacaatgagttactgacagagacggatacagaacttgagtagccgtattcacatccaaagcggtatatacagtaccaagatgaaatcatttgatagttatgaggtcagttatgatggctaaattctgggaaaagttatcagtggaccgggtacctctctttctatgaaaggaggctggaagacggaaccccttaaaaatccattctggccctgctccctcgggaaatgcttccttagtatttttttttttttttattcaaaagcttgacaagcccaggactaaagtgtcttggctgtctcacacgactgtaaagtggctgggagaggacctacgtgctcattttataaatgagaagggccgggccggcgttctccgagaaaaaggtcacaggaaagagttacgtcgggcactatctgtccctgcaagtcctccgggagcctcagctcccaggtctcaccttctcaagcgctgggaactcggcggttccacgcagcagacgcgtctcccggttgctggggaaccaagcgccgcgacttggttgctaaggggaagtcagaagggagacatcctgggtgaaagttgacaagtcacgtgaccacatctccgtgtggtgaaacactccttacaccaaccagccgtagagaaaacaaatgtttctccaatcagtactttctatgggcggggatattcctagattcacctctgttccgtccatttgcgtgattgactcgtcttttgtccaataatagtaagaatcctttagattgaccaatatacagaggaatcaaaatgcgcagcttcccctttgggggcgggccaggggaggtgccgccacggctgacagggactccggtgacctagctcgctcctccgcccaatcggacgctgcggggtgggtgggggctttgctgacagaggtgtaacgaccaataggaggcgggcttcgtaggtgtcccccaatagagacgcggcaagggggcggggccaaaggccctaagctcggcgttccagagagtggggagggggcaagtgtcagtcaggacgggagtccggcgggttacagcggaggcctaggtggcagacagggggcccgggccgctgcgtgttgtccacccaagatggagttcctcctggggaacccgttcagcacaccagtggggcagtgcctcggtaaggccgcgtgtggggcaggaggctgggcaacggcggccgctgatccggctggtgaggaccgcgggcctccgccgggcgccggtgccacttcacgagcgggctgggcctccgccagccgcgggtgccactccacgagcgggctgggcatcctggtcgtcgggcctttgccgggcgcttgtgccacctcacgggcgggctgggcatcctggtcgtctggccttcactgggcgtcggtgccacctcacgggcgggttgggcatcctggtcgtcgggcgttcgccgggcgccggtgccacctcccgggggggctgggccttcgccgggtgccggtgctatcccacgggcaggcagggcatctgtgtcctcgggcctcctcccgggcactggtgccacctcacgggcgcgccagtgccactctgccaggaggcacccctgaggcccaacttggactcggagatgccccaggcttccctgcccatcaaggctcagcccttccttttgctgctagaggtggtgccaactgctggtctgcttccccaatgcgctttgggagatgccactgcatgtgtctttatccagcccagcaggctcactgccactgccccaaggacccagttctcccaaaccctttgtgggatgtcaccttcttctccatctttgtccctcctcttcggtaccagcaaccctcagactgggcaccctcccagaaatgccccctgctccgggacttgctaatttgagctgcaactcagctgtgctgtaggagggactgggataggaggaggggctcttggagggtgattatcttggcagggggatggcatgcctgcagtgcctcccaggaaagaagggaggctgtgttatttaatgataagagccctggactgggaatcatggaagcctggactctagcagtggttttgtcagtgactccatatgaccttgtgccctttctggtttgaagttcccctgtctgtcaaagtgtttggagatgagatgtgatagatcccttaaagttctcaagttttgatattctttgtagtactctgcacattgactgttgcttcctcccccacctcatattaagtttaccaaagctgaaatcttttgttggcaatgtagagagaatggtactcagcattatctgttaatcctataggggggatgtggacacctggggacaccagagatggccagaatcatggataaggaaagcccaaagtgtaggtaaaggaatactgaaatggccaccatatgggacttccttactaagaaagcaacttgcctttttacccaaggcagtggcttatgccacttgatcagtcaagaatgctgattagtttgtttgaaaactggattcctcctggttggttgaaggactggtaaaacgtcttttatgagccaggatctttggtgttcttatgggcctgatttcagcagtagtga

SEQ ID NO: 1244300 - DNA, 4001 bp, Homo sapiens
caatatccatacatgttgcctgaatcatgactgatcgagtaagtagcggagtgaatgacagagtgaaaaaacaaggccctgccgggtgcggtggctcacgcctgtaatcccaccactttgggaggctgaggcaggcaatcacctgaagtcaggagttcgagaccagcctgaccaacacggagaaaccctgtctctactaaaaatagaaaattagccaggcatggtggcacacgcttgtaatcccagctactcgggaggctgaggcaggagaatcgcttgaacccgggaggcagaggtttcagtgagccgagatcactcctgggcaacaacagcaaaactccatcatccaaaaaaaaaaaaggccctcacagcccatctctattttcccatggtgtccaggctggacaagctcagcaaaactttctccctaaggttaatgctggactgttcagatgcctggagtatatggtttcagagagcagtcctagggcagggtgaaataaggctggccatctatcttcctggggtagaaaaggaggcatatattcagttaaggatcctctggcaacctgcactttctgtcacaaagtcgtaaaagtgaagtttgaccacctaaaaaagttttaaatactacagcgggaaaaacacaacaacagctacaagtatcagtatttgctccttccaagcattttccattacaatggtatttaacctcccaataagcgtatgagatggaaactattatcaccattgtatagatgaggagatctaggcataaaggctaactagcttgccaagggcactcggctattaagcaatggagctgggaggagctaggaacccggttctaaccactgtaatacccgtccacggtggaagaaagactgggcccagcgcccaaggcaaatgtaatttatcaacggcagaaagcaaagtgtgggtcacccaaagtgagtctagtagggcgttggcgcgggtgggagggggaacggagtgggaaaaggagggatgtgggaactagctccacgctgacaaaactagatgcctgctatctctctggagctgtaagcttcagtttacaggggaaaggttgggggagagaggggcgaaagggactcccgccagtttcagcggaattcagatgacagtttaccagccaagctggggggagactttactttcttcgagttaggctgcctcagggctcgggcagccagctggaattgccagcttcctagaagagccaggttctgggccacacccaggtctaccaggaggcctactcccctggaacaagtcactcattcattctcgaatacatccagtaactgctccgtgtgctcctactcagagtcgggcacggaggtgggcgctgtgaaagccccgcaaaggtgacagattcgcttcttagcctgtaaaaagcctagggccagagaagcagatcttccctatgttctggaactgcgccaaagtgacacgtgtacatcccgggaagaaccttgggctggacgcggcctcctaggggacttagtcccaccaccccgcttctttttaaagaaaaggaaactgatgcttttagagaagaggaaagtaagtggcccacgtaggggccagcgcccggcgaaggtgggcgcctgggcctcgcgggacgatactgaccagctccttcaccgggacctcattcaggtcgctgaggctcaggtccagttcgttgccgtccagcttgtcgcggaggttcccgcccttgctaccggccttggtcatggtaacgccggctgagcgggccccggctccggggttccggcgggtgaaaggagctgaaatgtcgcttgtcagttcagcggccccccacccaaacgacgacgcctgagccctccgtcgccgccgatgcgagaccgcctccgcccgctggccgcactccgagcctcgcgcctagctcccaccggtgccgcgacgacgaccacttccgtgtccacgtcaccttccgcgaccactgagatgggctgggccagagcggcccgagcgtgtgcgggcacgccccctggtgcccagggtgatgcactgcacgtcgccgccgccggaggggtggggttggaggctgcgagctcggttcacgttcacccgtggcccgcgggcattattgctggcagtgccacgaggcgaaagggcacggactgggcgccagaagactgggttgacatccaatactgacctcatcagatcaccccaatccccctgattaggagcagaagctgggtgtcctctaaaactgctccctgtcctctacttaacccccgaataaccatcatggggaaaactcttcttcctgaatttctcctctctcctccccactcactgcctcagtgcttgtctctgtccttccatccactttcacccagctccccggtgatctttctaaaaatctggccaagtctctcccctacgtaaaacccttcaaacttgcagctacctctaggatacggaccactttcctttggaagctgggtcctgcctgctttcgcagcttcctcacacgctccagtccctgcctggcctagatgctgtgtagatttccaggaggtggctcccacgtctggccctccccagcgatggccctccctcccccccactcacctctgtctagctaattccttagtccttcaggaaatctcccctgaacaccgtgaatgccagactgagttagcgccccccccaaccaacttaggtccctgtttgctactttatcatcagagacagtagagcttgatggccaagtgggacctctggcactaatacctatccactgggtattcatcctggctctgccacttgctacttataaaaccgtagacaatcaccaggcttcagtcttatctatgaatcaatctatgagacatgtagctaacagaggttggggagaactgaaggagtaaaacacaccaagagcttacagcagtcactggcacttagtaagtacccaataaatattagctacaattcatgatccaccttgtattatactcatctttatgtgtctgtccttcattctggactgtgaggacagggatttttgtcttaatcatcttcgtatgcccagagttggcataccctgatgcagggtagctactcattcagatgtctgttgaataaatgaatagatggatggatgaatgaatgaatgaatgaaggaaggaagcactttacccactccaaacctcagtttactcattttgaaatagggatattaaagcttatctcagaggggccgagcaggatagctcacacctgtaatcccaatacttgggaggccaagatgagaggattatttgaggctaggagttcaaaaccagtctgggcaacatagcaagaccccatctctaaaaaaataaaaaataaaaaatcttgtctcagagggaaactatgaacaccaaataaagtaagtgcaattgttacggggggtgggtggcaggggtccttgttcttagaactcccaagatggtggcgggccacttccaagatggcggcaagcctcttgttctctgacctgggtttcttggcctcacgcattccaaggaatggaatcttgggccatgcaatgagtgttatagctctattcagctcaattaggacaaatccaggcacttagccacgcaggaacaatggcaagcctttagcctgatccagagcagcaatgggcgcctcactggatcgggagcccagcagacaccctgccagatccagaggggtggaagtcagcagcgggtctgcgacagcagcaaacagcagtagtggacggtaaggaaaagctcagctcaagccgtaacaaacacggaccagaaaagtgtgcagttgcaagatttaatagagtgaaaacagagctcccataaaatggcaggggacccaaagggggttgctgttgccggctcgaatgcctgggtttatatcccgatcattgtccctcctcctgtgctctcaggcgatagatgattggctatttcttt

SEQ ID NO: 1244301 - DNA, 4001 bp, Homo sapiens
gttcttctgtatcccccaaagcacccattgcagggtgggggaaacagcatgtgatcaggaaaaccttactgtatggtgtgtaaataggataccatggtctggaaaacccaatattctgtttaaaagtgaaagagttactataaaggccatatgtcagcttccaattttcaaaagacaaagaaatacacactgctaaagttcagtggtgcataatgtcatctttctttgatgactgaactcagagaaggcacatggggatccagcagcgtctcgggcatcattctggaagttgttggggaaaacagaggcagaagcagaagtcccacatcttcccaagtcccctcgtctctgcttgcctctccctgtgcagtgcacagcttggggacacatactttagggtaagagcgcaccagatacaaaggtggggaagagtgctgcagaacccaagagggatgtgggtctgattagattttggaagctcctcccaagaaggtgctcctacagcctctttcagcagcgactggaaaaccccagaaaggtcacctgagattttccctctgccatccacggtagactccacctctaatggggtcagtctagcaagaatatggggcctggattgtctacccaccaaagccaggccaagacaacctgcttggtgatgcaggagagcagctttgcactcccctgcctgtcttatactcaacaaaatccatggcatgggccatgctcctctccccaccaaagaaactgacaaaggaaaacaagccacagagaggtgagtgatagcattagcctcagggcagccccaaagcagagggaactggccaattccgcaacatctgtccctagccagtgggacaggcacaggctaaggacagagtcctggcagtctcctgaagttgctgctggccaggtggtcacacagggcaccaaatccagctcccctgtctctaccgctttccgcaggggctcatggttgaggatctgctgaagttagtcaggggagaggaaacagtctcctccttgaactacaatccaggatgcctcccaggcgagtgaaggacctagggactggaatctcattggccccagggctgtgcccctggactcgctctcgggaagccaagccaggtccaactgataaccgcattccttgaggaccctcggccgggagtgactgccagtgggcagacaggaagaaaagagccctggcccagatcaggcaggcatccctgcttccccgcccaccgactgtccccggagaccagcctccttctctgcctgcggaggagagcagtggggacattatgccaacaggtccccttcggcgggcctcacccggccagccttcctccgccctgccctgaggccccacattcagcggaagcgccgaggcacctgctgccagacagggctccatccccgcggaaggggcccctgggcggtgcccctcggtgcccccggcttcctcggttagggatggggcgccccccccggcccagcacgccccctggcccggcgcgccccccgcgccccctccccgcgctcacctggcgcaggtgctgcagcagcgtccccgcctcctcccgccggccctggcgcaccatccgcagcagctcctggaccatgccgactcgccggtggtaggggggcatccccgcgcccgcgcgccccgccttgtccccggcgcgcagcagcagcgacgcccagaagtccggccgttcgcgtcgggggcccggcgcggcgccggggctggctctctccgccaggctgcccttggtctgccgggtgcccatgccgccgccgcccgccgggactctccgctctgggccgcgaggccgcgtccccgccaaccgcccgcccctcggccgcccgtgcgcgctcgcctcccgggctgcaactttgggggaactgttgcgcgcgggcgtcgcgggggcgggcgggcgggcggctgtcggcgctccccgcgctcctccctcttggctacccgggcgcgctccccgggcgctcgccgccggcccgcccgccggccccgccccggcccggctcggcccgccccgccccccgcctccgcgccggagctccgcggcgtcgcgcgcctccctcttctcgggctcccgctccttcccgccccgcggctccgggctggggaccaccaccaggcgccccctgcctgcgtcctctcggcagtcgcgcctcctgcgggcggcagtgctgcgcttcccggggccgtggcgcgggggcgaggggaacaggcaggccccatgggccgtcgctctcggtccccaccgggctccccgacgcttccaccaccgcgcgcccggtgcgtcgggcgagatggggaaagtttggagcatgggggtgtgtgtgttggggggctctcttaggcccagagtcgggtttctcaaggtgggttccgctgagcctcagcgcccaaatcgtcggaggcgctggttaaaaacgcaggctctaaggcctccaccgagacctactgaatgataatctcctcggtggggcctgggatccgcctttttagccagcatgttgggtgattcccatgcacgctcctttgagacctggcctgcttgcagggcgctgtagtggtgtggttggtgcgtaaacctggaaactgtgcgagcttatgggttgtgtgcgtgcccttctatggagagggcctgttgcttccatcatgctctcaaagcatctggaccggagaggtgtgaactcctgtgttctcttgttctcactctcacagccctggagaagggtccctggggtagtcctggtacaacaaagcaaacgcacgtctgcgagtaggcccagcggtacaccctgctggcccaccttcctccccgtgcctctgccaggcccagtctgtaagggaccagagccctgggatctcatggtgttgccagggcttgccagagtgaaggcgaaggcaggtgggggagcttctctgttgcagaccacaggccgccctggtcccagcgcagggcagaagcaattgtgcaagctcgcctctgaccccagctctgggtgttgcttgagggtgtaagggcacgtgggctgtaggggcaggaggctggatcccaaatcacagggagctgagccccactacttagtgagcactgagtatcaggcgagtcttcagcttcttgagtcctgattcttcctgtcaggctaggataataacactgccaagaattgggagagtaaactcggtggacactgctaaaggaaaaaattatttaatgacatgagttaaagcatcgtaaggaagactttattcaggaccattaccataggtgtagggacctctgctatgagattttgcagttgcagggagagagagattgagctcaactccaattacagcatgggcaagtgggaattcgttgctaaggagcagggtgggggtcagcggatagaaacttaataagggaaacatcagggctgagggggattctggctaaacaggttgtatggagcacccttgacataagtaactccatcttagaaaaagggtccattttacatttgaaaaagcctcatgccaacaggaaccagatgttcgcctaatcaataaagactacaccccaccagataaagacataaacaggcacactctttgctatcagtcctcaccagaggattctgtagccataaaaagagcaggacttcagcaactggagatgaccgtctggatagaccccatcttgcccacactctgcccacatcaaagactcttccttgcaagacactgaggactgtttggatcaggccaggagactccccttgtccaagtcactctccttggactatattgttaaccgctccttccctatccccttttctcttgatgttaaatgtactttgatgtggaatgtgtaatctataacatttatatattgattaagtatactaccatgtatggttggcagtattgactgacttgtggagtgacttgagcctgtatgcccacagctcttattaccaag

SEQ ID NO: 1244302 - DNA, 4001 bp, Homo sapiens
agcaggccaccttttccaatcagtttaacattgctactttcaaaagggaggctgctactacgtaaaaggactccatgtgctggactgatcaaggcagcatgagaacttcactctttcacctgtaactcacacatccccaaaccacataagcccctggcaagccctctctggaacaggtttccagtgcaaacatcccctaaacagcaacttccaaatgaccgagaagcctaaaaatcagcacagcccccccaccacacatacacacgcatcagcgaaacaagccactatccctagctcagatacaaactctgccctgaacttactctcccccaaaacaggcaaggaccaatttggtcaccatcccaccgcccttccttggacgaaatcccatcagtgcacatgccctcctaaattccatacctttgccctaccagcagttccttaccctaaacacccctccccataatatttcacccgcccctcctttccatccgggctccaatccatcagccccctcccaccaccaccccctctcctaattactgtgtcccctctcataacgttccccccaaaaagccatccccgtgtcaagccctcctccacccactgatcctcggtaaagccccagctcccgcaaagagagagagacaggatccccaaagctgaccgaagggcccgcgggagggggaggggagctcagggccgtgcgcatgcgccccgggcgccgcggtagccggtcgcccctaggcccggagagagccccagccgccgccgtcgtcccccaccccccgaccaccgcacctacacgccggcccggactcgggcttcacgcagggaaggatacttaaagccagcattttggattggtagtcaaaggctaccacctcgccctgcagccgctgctcctggcacgtccggcacgacacctggctcccaacgctgaagtactcgcccggaggagccgccatcttgggagtgcagccgcggccggcggcggcggcggcagcagcgggcgaaagccgggcccccagtgagcgccgcgacgcgacggcgcgcacggagcgtgcttgcgtcacacgccggggcgtggcctggcgctggttggggcgggatcctaggtggagtgggaaagaagaggaaataaaggggaatctgaaaagtatttgtatagctgcgtccgctcggttaagtgcttgtagagtccattttagaagttaaggataaatgacctacgtggaatgaaaaggggaaagaggagggagctgcagtctccattatatgcacaccttccacacaagagtttaatgaatgaattttataaaatatgttaaccccattttgcatatgaggaatcagagcctcagaggacttaacgatacttggacaagatgattataaggctgggagcggtggctcacgcctgtaatcccagcactttgggaggccgaggcgggtggatcacctgaggtcaggggttcgagaccagcctggccaacatggtgaaaccccgtctctactaaaaatacaaaaattagccgggtacggtggcgcgtgcctgtaatcccagctactagggggactgaggctggaggatctcttgaacctggaaggcggaggttgcactgagccaagattgtgccactgcactctagcctgggcaacagagcgagactctgtctcaaaacaaacaaacaaacaaaaaaagatgattataactactgagtgatagtggaaagaacattggctgtggagttagataagctggaaccagaatccgaggtcagcctcttactaaatcacctgaccttgagcaagcaaattacctgatcctgtttcttcataggcatttgtattgtcacttcttgagcatctaacagccctttgaggtaggaatcaatgtcctccttttacataaactaagttttagactaaacttgtccacggttccacaactagcaaaaacagtctgcctatttccaaggacggtgctatttactgctatactctgttacataataatacctacctcatagttaggaggtttaaatgcggtaacgggtataagtgcatggcatgtactaggtctttaataaatggtagttcccccttagtcacccatcactcttagaagtcaagacacttccccttctccctttttgccctctctcccagaaagccaggcaaaaggcaggaatgaggagcagcggatagtgacaaaaaggggcttggaggaggggttttgcgcccctgcccttgaatgtccgtctgatgtacaaaacagtcgttttcttaatcttatgcaaaggactatgagcgtgcattttcaagccctactaccaccaatggctgtcgctaacccacccaccgctcactatagaaattttggatcctcgcttcatgtataagaaacaggttgacctttctctagtccagagggaagcaaagggccagtcttggcgcggcttaacctgaacaaagttcaaaagtatttccttgccctccaagaaacataaacttcctggtgttggaagtattgatacactcattataataggaataaaaattctgctccttcatagtgtgctttttcagagaacttttttttttttttttttgagatagagcctcgctctgtcacccagactggagtgcagtggcgccatcttggctcactgcaacccgcacctcccaggttcaagcgattctcctgcctcagcttccggagtagctggaattacaggcacgagccaccatgcccggctaatttttgtacttttagtacagatggggtttcaccatgttggccaggctggtctcaaactcctgggctcaagcaatcttcccgcctcggctggcctctcaaagtgctgggattacgggcgtgagccatgtggccggcctcagagaactttcatgcctctcatccttgttctggcccccataataaatcatacataattgccattccagttttccactttttatatggaatcgtgattataggttttcatataagacttctaggagccattaggaaaggccttcttggaggaagtgaaaaatctctactgagacctgaaggattggcaaggaaaaagagtggccatgttccaggcagagggaactgcacgggccaggacccctaagaggagagaacttggtgatttcaaggaatgtataggtcagaaatattacaaagcggagtgtgggagtaggctgcttaaggttgagggcaaacctcaaagactcggtaaacaatgtaggctttctcttcggcaattaaaaacttcctggtattgtccgggcacagtggctcacgcctgtaatcccagcactttgggagaccgaggcgggcggatcacgaggtcatgagatcaagaccatcctggctaacatggtgaaaccccgtctctactaaaaatactaaaaattagccaggtgtggtggtgggtgcctgtagtgccagctacttgggaggctgaggcaggagaatggcgtgaacccaggaggcagaggttgcagtgagctgagatcgcgccactgcactccatcctgggggacagagcgagactccgtctcaaaaaaaaaaaaacttcctggtgttggaggtattggtataatcattgtaataggaataaaaattctgttcactacaaaggcaataaacgaagatttatatccagcttccctcctttacacctttttttttttttggagacggaatttctgtcttgttgcccaagctggaatgcaatggcacaatcttggctcaccacagcctccacgtcctgggctcaagcgattcacctctctcagcctcctgagtagctgggattacaggcatgtgccaccacacccagctaattttgtgtttttagtagagacacggtttggtttctccacgttggtcagactagtctccaactcctgacctcaggtgatccacccaccctggccttccaaagtgctgggattacaggggtgagccactgtgcccagca

SEQ ID NO: 1244303 - DNA, 4001 bp, Homo sapiens
aatccttcaatctagagtgaagtgcaatctgtcattaaggcattaaatactttagtaataaacactgaaagttaaaattagtgaaaagtactaaaactgaaagcaaagcagattacggctgagatgacataaaacctaaattgctattctgagggcctcatcattgaagagtcataaacccatcacatacaatgcaatgtggcaacaaattaccccgggaaagaaaacagtttctctaaaacgtgttcaaagtcaagggtgcagagatacaaggctgttccaactgataaggagtgcaatggaaagcatttttctcttgaattcaaaatatacaaataacctattgaacataagccaaatcgccataatgttttggttttttaccttacttaggattttgagcgttattcctaacacatttgcaaagtttagactgaaaggttacagagtcaggtagttaaaaaaaaaaaaagttacttcgctataacaaagatgcctacaaaagaaagatggtcaaggtaagcagttccttagtctcctattgtgacaaatggtcggggggatggggagcctaaatgttaaaaacaaaaaacccacctcttaaaaacaataaattctactctaagaatgtttcatactactttggaatcagttagcaccccaacacaacttgagccaaacttactctttcttaaagtcctaaaaggagtcatctagcaccaacttgctttcctacactgcaaaaaagaaattttaccttaaccaaagcctacgtttaaaaagagtaagaaaacagttttctaaagaagcatgcattacctgaactattccttcctattttgattagcaattgttttaaaattagcatgttagattataacctcaaagtaaaattaaattctgtatctattctccagataagacctaaagtaaacattacactgcatgttcaaaactagatcaaaacacttgaaatgctacagtaggtgcagagaaccagtttcataggattgtggaaagctaacagaactacaaagattagtttcctcagttgccaagactttgggtgagcctttttaagtctcaccagtgaaactggggttataatatttacctttactccccgggctaagagcatcaaatgagttttatgtggaagaaaaaaccttgacagctgcctctataagggacttcttagaatactgttaacgaacaatacttgtaaatcatcacggtaaaccctaacaagtaaacgacttcttttacatttctatttccccgtataagcgtcatgctgtaattacttaaataaaataccgccacgatttttaccatgaatcctggtcagaaattttagtctaaatacgacgttcaacccaaactatagaaaaatgtgcccttctccctatttcataatgaggtgaaacctcggagccgctagatttaataagacgctgctatccttctttcccgcgtttccccgcctcatcaaggtgcttttcaattatgccaagggctctcccggacccccttgatactagaacaacaaaaccaaatcacccccatccccgggtccggacagcatcctccctcctggctccatgggcaccgggtcagacgctcgaccccgggtgcggccctggccacatcgcgccgcggccaggagggccacagcccgcgcccgctcccctcccccacggagcccgggctcaggccaaggcccgcgggacttacgctctcgtggtcccaccgcacgttgctgcgcttctcgtccggggctaggtttcggtcccggcccattaactcatccaacaactgcgcggccgaaatcatggtgcttccttcgggcggctgttcccaccagcccaggcacccgccaacgaaaacacgggcgacaccgtcgccaatctcctcggcccgctctcaggccgaaatccctcctacacacaggagccgacaagacaaaatggccgccgcgcggacgccttcccagcatgccgtgcgcccgtgggacacgcccaggcccgggcggagagggcgagctcggcttccgccgtccgggggcggggcccgcggaggccgggtagggactccgcccctgtctagaggccgcggggacgggtagcctctgcccgcgcgcctccccaagcgcccggttttcccgagcttcttcacggtgagaaattggagcctaggtcttgaagcctggacaccgcttcaaaatggagaaagtgtctcctttagtccacgtggtgcacatggtgcctcatgcagcggaggaaactgaagattacggcttccgactccattttcctagtcgctgtgctcacgcctcttgcacctggctttgtcctcccgccctgagtctcctgattaacaggatgggaaatcgaggcaagaagagacaaggcggcttctaaaatacggggattcagtcctacaccaaatgtctcccagtgtggaattttttaaaaagatattgatccagtaggccaggtgaggtggctcacgcctgtaatcacagcactttgggaggccgaagcgggcggatcacctgaggtcgggagttcgagatcagcctgaccaacatggagaaaccccgtctccactaaaaatacaaaattaggttggcgtggtggcgcatgcctgtaatcccaactactcagggggctgaggctggagaatcgcttgaacccgggaggcggaggtcgcggtgagccgagatcgcgccattgcactccagtctggacaacaagagcaaaactccatctcaaaaaaaaaaaaaaaaaaaaaaaaaatatatatatatatatatatatatatacacacacacacacacacacacatacacacacacacacacacatatatatagataggtagatccatttattcaacaaatggtatgtgccaggcactgtgcttaaagctaaactcagaacctttcagacagtccatgctcccgcagacctgtgcattggcgaggggagataatcgctgaagaaataaagtcacaaatatatcaacgtatgttgggataatgctttagcacagttaagggtatggtctctaaagccagattgcctgggttcgtaatcccagctctgccgctctgtgcctttgtttccttttctgtaaaatggggtttacaatagtcctcccccggcccccagccacgatgctattgtgaagattaaatgagtttatacaatgtaaggcactacacattgataacaagcccaacacttttatttttggggggactgggtctggccctgtcacccaggctggagtgcaatggcacgatctcagctcactgcagcttcaacctcccgggctcaggcgaccccctcgcctcaacctccccagtagctgggactacaggcgcatgccaccacgcccggctaagtttttgtatttttggtagagacggggtttcgccaagttgcccaggctggtcttgaactcctgagctcaaataatccacccacctcagcctcccaaagtgttgggattacaggcgtgaaccaccgcgcccggtcgtggacacctctttttaagaaggaaagcagcaaaatagggtgagaactcaaaggaggtatgggacatgaagcctttttttttttttttttttttttttgagctatcgctcaggctggagtgcagtggtaccatcttggctcactgcaacctctgcctcccgggttcaagtttatcctgccgcagcctcctgagtagctgggattacaagcacccgccaccacgcccagctaatttttgtacttttagtagagacggagtttcgccatgttggccaggctgatctcaaactcctgacctcaggtgatccacctgcctcgacctcccaaagttcccaaagtgctgggattacaggcgtgagccaccaagtggggctggagcctttttgaagataggaaattagaggctagacatggtggctcacgccataatcccactactttagggaggcagaggcaggg

SEQ ID NO: 1244304 - DNA, 4001 bp, Homo sapiens
atgcggtccctaataaatagtatttcctacataggactgttgtaaggatgaaataacgctcctagactactaagcatgatgcctggcacacactacatgtttcctactaactgttattgttaataccatctctgaaacatgctgtgctttcccctaccttgacttcttcacctgcctcaagaattccccttcatccttagagatccagttccctgtcacctccttcaggctttcatcccatgctgttcacacccctattacagtcatcacactgctctgtaatcacttattgtgattataatcgatgtgacagaacttagagcaggttttggagacaaagaaccctagtttaaaagcctacctctgctatctactagctgtgtaatcctggccaacctggttgacttctctggacttctgcttcccccactgtaaactggagaaaagaataacccacctcacaggggttttgtaaagaccaacctagctaacttatggaaagtgcctagcacaggggctggcacatcttaagtgcttgaacatctttttttttttttttttgtcctgagacagggtctcactctgtcacccaggctggagtacagtagcatgatcagggatcactgcagtcacaactgcccgggctcaaacgattctacctcagcctctcaagtggccgggatcacaggcacacgccaccacgtctggctaatttttttaattatttatagaaacgaagtcttactatgttgcccaggctggtctcaaaattctaggctcaagtgatcctctttcctcagcctcctacggtgctgagattatgggcatgagccactgcgcccagcgttgaacatcttaccctttcctactttatttggctttctgttccttgctgactgtaagcttctgaagaacaagaaactatactgtattagttcaacacctgtgaaatgaagggaaattagtaagaaaaatatatatacggttattagtcactcctccacagtttatagtacctgaaccataacagaagttccatagatgtcaattgattcccaagttaccagaggaaactaaagccagcaggaaactgtcctgaagtcaagaacctatggcaggtgaacccagaaaacattacgctaagtgaacaaacccagtcacaaggggctacttaatgtatgattccatttatacgaaacatccagaataggcaaaagtacagagacagaagtacattggtggttgcctagggctgggagaatgggagtagatgggaggggggagtgacagctaaaggaggtgtttcttttggggggtaatgttctaaaacattatggtgacagctgcacaactctgcaaacacactaaaagacactgaattgtgcactttagatgggtgaactgtatgcttcgtgaattatatctcaataaaactttttaaaacaataaccacaaaaaggatcaatcctaggagcgaaagggttttggccacggagcaacttgctcttacgcagaagcataaatcatcacgacaaggttgctccggccaccgggtgccgcgggcagagggacggtggaggggacattctccttttaaaagtggccaggcccgtgagcctctgagaggctggcctccgggctgccccggacctcgcgcccctagctcgcgctgcaggcctttcctgctcctccgaggccgcccggccaggcctgcgtcaagcccgggcgccgcgctccggtgcactcagctctccggtggaagagcgcagaccgcaagggaaaaggtgccggcgcgggtcgcccctaggtcttcaatagatccgaggacacccgaggcctccacatccctagcccgcccccgccacccagtggctccggccgccgctgcccccgcgcccccgccctcggcctcggcctgcgcagcgcggctcaccagcctccaggggaacgccagccccggacgccgccgcggcgacgagtgcgcctgcgccccggggactgagcggcaccgcccctgcccggcgacggtgagcccagcgccctctgccggccgcgcgcgggactcggggtcctactgggtgcctcttcctagatccgaccccacccagttgaaagctgtccccactaacagccttcgttacctgttacctcaaacacccactctgccttctggctgttgctacgccggatataagccctaaaggcactctctcctccttattcctgaatatggattgtgctatgaatatggggtgttcaagatctctgaaaggcttgctggaggacttttcctgaacctctcgtgttgatgacaagaattgtgtttggataggaatctgcgttttgaatcatttcaccaaattacagtcccataacacctgtcaaaagaataaatatgacagtaataagcatgcttcctttcagacccatctataattataattgaggaaaataatacaaaatttaaacttagagctactgccagtatcattctttgaaaatgaaataatgctgtttattaaataggctctccctgctctctaatgtttaaagctcaagtgcttctctgaattgatttaaatacaagttttatatcctgaaagaaatcaagatgagtcattatcttaagacaaacccccctgttcaatgatgctgctgatctctcagctgatgtctaagcgggagttaggttgttagtggataatattgcttctgttcacgtctctcttctccagggctttttaaacctgtttgtaacgaaaaggctgatttccttcagactccatgtgtcgttgatttaacaggacaacttcttacaggtttttctttttcctttttctttttttttttttaagtaaaacattgctccccggtggcacctgggaatctgtttttcttctcttaggataagagaagcagggatatttcttaacggaagttttgttttgttcctaactccctttagagcttcctcttttctttttttttctcttcacctaacatactagacttccctcaaatcgggggtgggggatgggaaggtggggttccctcccttgaaatattcagataattgcttccatttattttaaagatgtagacttggacaaatatatctgaaagatacaattgtaccctcataaatcagccctcttatttacacatgcataatcaagggcacgtcattaatgcagagccaatcaataaatcattaagcttttaaagcccttattaagaacaatctgcagtaacatcatccactcctgtgctcagtcttaggatcatttaataattttaagaaatttcacagtctgttctgtagtctcatctcccttttgttcctagatagctgtattcctgcatcagaaacatggttctaatacctagatctcataaaatattgaagatgcaagctgtttgctttacctctgaaaggctccaccttcagaatcacttgtgcctcttccaattttacaaacgcacaagattttaactttcacaacaatttcttataaacatccaaatactaagaaaaaaaaatccaaagtaggagagatttgaacaataatctctaattttttttccaagtcacaatggaaacctagatttgaaaataattgaatttgaacctttcaacttgacagcaaccttaggttcttacagcttcaatagtaaaatgaaataatttttactagtccaaacattcacttaaaatgacaccagtctcataatctgataaaaccccaaccatttttaccatgtcattttcctatacactgaaattttagcagatgaacccccttatgtcagacagtgcatgatatttacagataaacaaaatagaaagaccttttacttgagaaattagtcacccactgtccaggggacatgttcgcacaggggagtttattgactttcctaagaaatacaccacattctcttgatttctgacattatgtcatttagcctgacaactgcagatttgtaaccagtatttgtag

SEQ ID NO: 1244305 - DNA, 4001 bp, Homo sapiens
cagagacctcttcctgacaataaaaggccaaccgataagtgtggaggaagtcatggagttgaaaaataatcaccattttgcaactatcatagattggtttgagaacaaatcatcattgcatgctaaatctgaggtggtgggaagaatgctgaagaactggatatatcatgatcttatagggtctccccacagattgcttattagttgcacagaaagaaaaaacaaaacagtatacagtggataaccagacagtattttgaccttgcaatcaaaattaacatctccaaagacggacagagggacattgtgtgcctccagatgtgattcccaaggaggacacatcgcttatgcaatattccgtccagggatgcataggctatgtctaatcctgaggaaacatcaaagccaaactcactgaaaatctgtaagataactggcctgtattcttcaaaatggccaatgccatgaaaactgaaagactggccaggcatggtggctcatgcctgtaatccgagcactttgggaggctgaggtgagagaattgcttaggccaggagtttgagaccaacctgggaaacagcaagacctcatctctacactaaaaagaaataatacttccaataaatctgaaaacctgggactatttctgtcactgagggaaggtgtgtttttccccttaacttaggtatatgctgctgagggggcagaagcctgagttcttccacccgccgccttcaagtgtcaggcggcttctgcttggacaagatggctaccctggtgggcttgtttcttctctggtcttgttataggaggcagaaagaaactacttaggtagacagttagggtaaagtgaatccccagcagaaaactttccttttaacgcaaagcagctcaaagatagctccctttctaacctcacgcagttcaaggaaatcacttttcttctaacaacaaccagcctgaaagagcaaagggtaaaaacagataagagctcaggcacagaaggatgggggaagtctcctgggtaatcaccaaacttcacacttatacaatgggccccagtaaaacagtgggccttaataactacattcctttctctttaggcgcgctaagatagggaagctaaaagcagaatcgatgggtatgcctacagctgcaagatgtgtgggaatagacacagaaactctcgctcccagataagcaagacaaagagacacagactaaaagttgatgtggtcgggaatggggtgagagcctattaaaaactctgctctatacagatagcacacctggtcccaactgaaccatcgggctctaggaggataagacatcccctcctcatgaatgcccctctctagcccatttataaaaccctgacgtttttactaccacctggcaacctgcctgggacctctgtctgtgacagagagctgttctttccttttgcctattaaactcctgctccaaactcactctgtgtgcgtgtgtgtctgcgacctcgatctccttaaacgtgagaccacgaaccttggtatttacttcagacaatgaggctgcttctgtctcttgttctatctgagactcgttccacaccagcctgagcttcgggccattcttttgcttctcccatcattctacccccagagctgacagatttggcaaataaaatttacaagatgccctgttaaattagaatttcagacaaacaacctactccacactgactcaggagggtccctcagagatagatgtcactgagcctcgggaagcaggaagctccatccctgcccattaagccccctctcagggtcccctcaaggaagacagtggctccagaaggtatgttcccaccccttccacagcttacctctctcccatccctctctgaccctgggttccacctggcccagagatttctgggaggatctgtagaacaaggctgtctacagtaggagcctcttcttcctcaccacatacacttcagccctgcccaactaacagctctccatgttctaaagaaggcttctggaaccccagttctgtgacgtcatccatctcctggaaatacactggttttaaccaggcaaattggccaagcatcaggcagaagtagcagctgggcctgggaggacaggtgacatctgtgaggaaaatggccgggtgggatagggtggagagcactggctgtttccttcatttttgggaacagcaccacctttggggggactccttccctcatggggttttagtgggggctgccagtcctggggtcctgccccccaccaccccccataagcataggaatgcttgtgtgccagtcactatatttgtaaacggaagctggtggagctgctcagcttccaacaggaagcccatgtgtgcagggccagaggacatagcccatctaaggtgctaagcctccgtgaagagggagcggagtctggacgggattccagccccagggtccaccctttctgggacccaaacacacccttcccctcccttcaattctgagattcaataaatgtccccactcacagaacaagtttgagttgggtttctgtcacttgcagccaaaagagccagttgtagtcggcatggggtcaaccatctgtgatatggtgacctgacaccctgtcccctccctgtgaaggccacaacatcccaacatcattagtcaccgaggaagtctgggagaaatttctaccaactgtagcaaaaaagaggcaagggagaaaacatcttgttactgacggcccactcttccctctgaaacagggaggcaggatctgacagaaaaataggacaaggggcttctgagtgggcagtgctgccccgtgcccctccagacttctcttcccagcagggcagcagtgcatggcaccctgggatagaaggcctgcaggggcagaggggaggctgaacatgctgggggcaccactttatgagaaaccatttgtggccaaaaatctacatgggcttcagatgacctgaatgaactcgtctctgtagagtgagagtcctgggcaggaggaaaggtttccatagccaaggaccacatgcttggaaatttgatctctgaaacttaagatctgagagaggatggtctcccaaggaagtcacatgagcctcagtttaatcctgttggtttgcagaagtttccactccctctggaggctgggttgggacctcctgctgggctgcagaatatttagtctctttgataggctctgaagttatggtcattcaaagggggtccagagggaccctccacctccagccccctagctgtggcaaacatgggtagattcctacccattcaaacaactggaaaacccaagctgggacccatgagtcaagtcagctcagggcaagaggacagatggataccataggccatctgtctcaatatttgcaagttataaattaaactaacagactgttaaagtatgtcctaccctcatactctgacaaatattcctttaaaaggataaaattttaaaatgtgtatgaagctatgatttgtatttttttttttttagagatggagtctcactctggagtgatctcggctcactgcaacctctgcctcctgggttcaagcaattctgcctcagcctcccgagtagctgggactacaggtgcatgccaccatgcctggctaatttttttttgtattttagtagcgacagggtttcaccttgttgcccaggctggtcttgagctcctgagctcaggcaatctgcctgcctcggcctcccaaagtgctaggattacaggcgtgagccaccacgcccggccgattatgttatgttatgtatgttaaagtatgtcctatcctcatcctctgacaaatatgcctttaaaaggataaaattttaaaatatatatgaagctatgatttgtatatgacagaaagttagcaaaatgtcaaagatcatgaaatttcatgtttattgcgcatgtctgggtgctctgttgatgggctgacaatattggga

SEQ ID NO: 1244306 - DNA, 4001 bp, Homo sapiens
tcctactcagggactctatagaatctcctaactggatgggcattagggacactactccagccctctgctcagtaaagggattccctgattttttgaaccatatttctggggccattcccaggctgtgggtgggaagagaagttctgtgagcagagcctggttgctgctctcatctctcccaccctggggccctggccagaccttgacagtctacgtggcaaaggttttccgagtaactcttataatcgttgcaccagtagtggctgttgatctggaagaggccatagtcaaagcttccgtctgcattttcatttatctttgatatgttgaacttgctttccacaaaagccaggcacagcccttagagtagggagaagaaggtcaggatttagaggggaccaagctgagtgagaagggagatggaggagaaagggaggcaaggtttcagacaaaaggaacaaggcctgggaggcaagataggactagagggcttgaaatctccattgacttgccctcttatcctgtggtccatccacccactcataagtacaattactcatctgtccatctattcatgtgttttgcacttactgagcacctactgtgtgccaggaactgtgcaaagcctagtgagggacatttcagttgggtcaaacacagatgctgccttcaaggggcctgtattacaagcttaaaaatatgtacctaagcttgtaatacaggccttgtaataagcttgtatgtacaagcttaaaaatatgtacaagcttaaaaatatgtatgccgggcgcggtggcttatgcctgtaatcccagcactttgggaggctgaggcgggcggatcacgaggtcaggagatcgagaccatcctggctaacacggtgaaaccctgtctctactaaaaatacaaaaattagctgggcatggtggtgggtgcctgtagttccagctactggggaggctgaggcaggagaatggtgtgaacccaggaggcagagcttgcagtgagccaagatcgcgccactacactccagcctgggtgacagagcgagactctgtctaaaaaaaaaaaaaaaaggtacctaaaaaacccacaaagcaagattaaaggacaaaagtgttgcaagacaggtgcacacaactcctgggcaaaagggagatatcccttccatgcaggaggagaaagcctttgtactagctgtcccctctgcctagagtgttcttcccccagacatttgggtgaccaggtccttcatttaattcagtgctgcttaatgtcatctcctcagagaggccttccctgacttccccatctaaagaattcaccattgctccccctgctttattcttcttcatagcattggtcaccaccaggcagtacgttatgagtgtgtttgttgctgctctcttcccctaggatgtgaacattataagggaagggaatttgtttatctctacagccccagtgcctaaaacagttgttggtacataataagtgctcagacaataacttgagtgaatacagcgtgttgggaaaggcttttttgaagggggctgctttttgaacttggctttgaaagatgaacaggagagaaagaagctggccatataggacatgactagcagaggagaaatggctggggaggggcggatggtactcacagtcactcagggagtaaccctcaaacccatccaagtcctccagctgcagcacctgggccaagtcacagcgactgatgaggctggcctgatttagggcaagaaagctgctgaccaaatagatgagtagcgcctttgtcatccttggaggggaggaggtgcagctgagggctgatggttcttagggtcttgcagactttctgctgatcttctctgagagcctggggaatctggagagggcagccaggtttccttactcactcactgctccaacctggctgtttccaatctcttttctcttgtttattattttatagatttttatttatcatggaaaattaaacctttaaaaaaggaaagagaatagtatcatgaacctccatatacccacttctgagcttcaacattcaaaaaccaaggccaatctttctttgttgttgtttgttttttatttttttattttttagagatgggggtctcactctgttgaccaggctggtcttgaactcctggcctcaagtgatcctcccatctcagcctcccaaagtgctgggattacaggtgtgagccaccacacctggccaatctcatttcatccataggtcctcttatatgggcacccagctatgggtagtatttgggtattgggatggggagtgaggttggcaaaggagattactgaagactatcttcaccagcatatgtgtgtgtgtatctgagcatgtgcttttagaaagagggccaggacactgggtgctaatctccccacaaccccactcccccagacacatgacacatgatttttcccaagggcataccctgcctggtacaattcttggtgggctggctgtagacgtaaccttcactttcacattgtgtatgtgtgtgtgcgcgtgtgtgtgtgttgaatagcaagggccctagattcacactgcctgctttcaaatcctggggtgctatgtgactttgggcaacatactcaacctttctgggcctcatttgtaaaatgaagatatgctaatacctacctaaaagggttgttttgatgattaaatgaaataatgcccagatcttggttcacattccacacaaaagggaaccaggactctaggaaatatggctgattcccaggctggagcaggaaagggttatgagatgtctggattatcttgctgtacaagaaatttaaaaagtgctcgaaatatgtattggggcatgtcaaatggacacaagagctagctcaaaggggcaccgactggccagatctgaaacgatgttttttggtaacagcattattgagatataattcatgtatcatacaattaattcagttaaagtgtacaattcagtggttttcagtatgtttgcagagttgtacaactactacctcacttgattttagaatattttcatcaatccaaaacaaaaccctgcacccatttagcagtcactgcccatcccccacctcccaacccctggcaaccactaatctactttctgtctctatggatttgcctcttctggacatttcatacacacggagttacagaaaatatggcattttgtatctggcttctttcacttagcataatgttttgaagtttcattcaggttggagcatgtaatgatacttcattcctttctatggttgaataatatttcattgtatgaatacaccatacttcgtctatccattcattagttgatggacatttgggttgtttctatttttggctatcatgaataatcctactatgaacattaacatactagtttttgtgtggatatatgtttttatttctttggagtagagttgctgggtcatggggtaaccctaggcttaagcttatgaggcctaccagatttccaaagtggctgcaccattttgcattcccatcagcagtgtatgaaggttccaatttctctacatcctcaccaacacttgttattatctgtcttcttgacaaaaggtatcctagtgggtatgaactggtatcaccctgttgttttaatttgcgtttcccagatggctacggatgttgatcatctttttatgtgcttattggccactgtatatctttgggaaaatgtctattcagaacctttggccagtttcaaattgagttgtctttttattactgagtgggaagagttctttatatattctgtatactagaccagcatcagatatatggcagatatttttttcccattctgtgggttgcctttcactttcttggtggtgttctttgaagccccaaagtttttaattttgatgatgtgcaagttatctatttgtccttttgttgggtgtgcttttggtgtcatatctaagaaaccatt

SEQ ID NO: 1244307 - DNA, 4001 bp, Homo sapiens
gcaggagaacggcgtgaacctgggaggcagagcttgcagtgagctgagatcgcgccactgcactccagcctgggcaaaagagtgagactccgtctcaaaaaaaaaaaaaaaaaaagatgtacataaatgtccctccaggaccccaaaattttcccagggcatcaaactccaggccaacggtcagctaaaacattgaaacatctggaatctataagccccggggctcactgagagtggacctgtgttctgtgtgtatgtgtggggggtgctcactgagaatggacctgtgtgtgtgtgtgtgtgtgtgtgtgtgtgtggcggggggcggggggcatccctgagggcaaaccacaaagtagcctaacccagccatgaaatgaactcctgggcaaaggaagtcaaccttcgtgaatctccacatacccaaggaaaggtggctctggccacatcactcccaagctgccactttctaagcgtcctgggctgccaggccagacacccaacagggccactccctttgctaacttcacacaacgctgagaccccacttcaggtagcgacaactttagggtggctgggtgctgcgttctgccaccctgtgccatccacaccagcccatctgctgcaccccaaggctaggcaccctgaagctcccaccacctacagtctcaacccagactccagggccaactggggagagaggctgggctgcttcctcccctttgccgtttcctggtagagctgcccctgcttcctccctgcccagcccactgtcacccagggcttggtacacacacccctctttctcccaggacctcgatctctggccaggggctgtccaaccaggccagtcccagggaaagccgacttcccctttggctagctcggcccaccgaagctcctcccctccctcactcagggaactatttcccagtttggaaaactgctccagacttgggaccaggaccagctgccggaaaagagccgcctgggaaggggtggaccgcccggggcttcacctttgaccccgggagaacacctgcagcgagccacccccacttcctcttcaagcacccctgccttcaactggatcgctcggcgctcacttaaacaggcaccccaaggcgccgggcctggccccctcccacatccccacggctccctcccacctcccgctggcggccttttagtccccgaggcccctcgctcgaatcccctccggtatcagcttgagcaccgagtgacctcacgctgatgactcagcaagtctccctccgggctctggcacgcgactgacggaacccgagccccagccaggggcagggtcttccccgcagcacccccatcgccgcccctcctcccgggctcgccgcggacccccgcgccggggagagctgacgcggccaccggatgaatcagcagctgcgggccgggccgccgggccctggcgcggacccccgggcgcctcgctcgaccccaccctttcctcccgccgtccagtgcccctccctccaggacgcccgggtctccgagtccgctccgcactcgcccggctccgcgggtccgccgccgcccgcggcccacctccagtacccgggcgccaggggcaggaggagctggctcctgaccgctggggaaatcgaggcacgggccgccagcagggtgcgcggcagacccgaaaccagcggcccccgccgccgggcccccaaccgcccgcctagctccgggaggagccctgcctgcgcgccccctcggcccccgccgcccccgccgcgccgcccccaccgcccgggcccgccgccgcagccgcactcaccacactgcgggcccggcgggccgaggccggggcggggcggggccgcgcgcgctccgaggccgcgcggggcagggaccggcgcgaggggtccgggcccggggctcggaggactcgccgcctgcgcgggccgggccgagcgcactgggaaggccgggccggaccaggctcgggatccgccgccgccgccgccgctccacagacgtcacatgatgtttggtcacgtgggctccattcatgaagcggcgacgcggccggccggcgcttaaaggggaaggcgcggcggcgggagggcaaactgcgcatgcgcaacccgcgcgccgtcgtccctggcaacactggctgctctagcgcctggcggggtctcacgggcgggcctgggcgcacggccaaagcgccaggtctccacccccagcccccggcgtcctgcagccggagcctgcctcgcctggctcctgcgcccgccgtccagggcccctgtccaagctcgcggacgccggcggcgttttccagctcgagtgctcagcctagggcaggctctgcgtgcgccccctcgagtgccggcctgggccctgccaggcagaggcgctcttgcgtcaggacggcgccgccggggccccgcgattccaactcgggggtcccggagcggcgcggggcggggacggcctggcagctcccagcagcgaggggcgatccccgcccgcgcagcagaccccgagctgcccaggcccttcctgcgccacgtgtacccagagctccgcccgggggagacttcgctgcttgttggagatgcccagcggtagggggcgaggactcgggaggaagataaacgggggatcccgtgtctggactttctcctccaccctcttcccttcgcagctgtgaatcctgggaggggaagggtggccgccccgccagcaggtgagcggggaggaaggggcggggacgggctgtggggtcctcctgggctccgtccatgaacaggccggccccaaagtcccgaagccgtgaggtgtaaggctcagaagcgtccctccgcctgtccctgccagaccccaggaactcctccgagccccacagcacgttgtcgccgtgtgcgctgtggggctgcgtgtggttcttacggtggtgtccttagtcgtcggggacctgctccccctgctctggacacagcccgagtctcacaggctctaggggcatgatatggtcctggcgtggcttccgaggcctcaaccttagtgtacaaaacagcacacggggccctgaggccaggagtgcagctccgtctcctgcctctcctccctgctcgcgtcctcatcctaccacaccacactgggctggcgaggggagggcgccctgagccgctgggcatcctgctccgcgggagggtgaagtcgtgcattgctgggcggtgagggctaggtccacacagcggggacctggcgggcccccgagtctcctcaggacccgccctccgtgccacacagcgggagctggagccacggtgccgtcaggagccaggggtgattggccctggggctggcagcccccaccccgcgggcagacgctcaccaggctgtccccactcactcccacaccccaactcctcctcacagggtcgagcccgctctcatttgcacctccgcgcgaatttggaacggatttatgaatcgtcctcactgcggtgctgtcttctcctgggaaggagcctcagtcctcccctccctgggcactgtcatagagatgggcaggacgggctggggaggacactcagggagctgcccaggctcctttgctgcccctcaccccagaatcttcttggggtgggtggggtcccaggcacctgcagagtagcatacggtggcttgtagaaagagtatcgagggaggggaggtgccacgtggaaacagcccaagccaaacccctaggacctgtctccctgtcctcctagagagctgaaggtgttccgtggtcagtgagggctggcactggctctgcacgaagatctcctcacctccccagcggctcctggccagctccccacggagagcccaggacacttgtccctggacacagtggtgcagccatgcttgggccaaaccatgaggccaccagaaccgcgaaaggctactgtactgagagggatactgcgagagaggcccacaggtttccaagcatccctctcact

SEQ ID NO: 1244308 - DNA, 4001 bp, Homo sapiens
tttgtcttttttttaaactaagttttataaataatgtctgataactctgtgtatataaaaactaaactccaacagccacaaagaggtgtccgtaagtttacaagaaagggattttttttctttttttttcttttttttttaactagcaaagtttctattatactttcttcccttttccattcatatggtcaaatggtcttcttgcttgttttttttctaaaagacagttttataaatactctgcagctcttttttctttaacttttaaacatataattaatttaataactttgtaaaaggaacttctctcttttaaataaagggctatataaccacacaaataggtcatgtaaacagtgacacgggacccatcgcagggcacactggacccaccctcacgttaagcgcacaaccagagatttggtcttgttcagtgcaacgggtcaggcctgagtgcacagcccctgggcccagctgcacgcccccagcaccactgcgcccaggctggtggtccacccatcagggccttcaagcccgccctactctcagagcagagcccatctcttcatgctgggctaagctgagctgctcccctggggctaaagagagtgaatccttcccagcccgcgagcctgtggccactcgggagtggagggaacactgggaccctcactgctcggggacacgcgaggcccagcgtgcctgctccttctctctcccgcaactctctctagtccgttcccacagcaccaactctggactccaagcctgcatggccctggtacaaaaggggttggggcgaccccacgtcaccgccgaactgaccaatcccaacatacaaaacacacgacgacaatgacgagatcaaaggggctcagcccggcgcccctggggtacaggttgtgctttgcagggaagagagaagggtggggaagagagggaggaaagagaagagaaggaaacagagggacagggcagccaaattcgccatgtgcctagtggccccgcaaagacccgcctgggcagacgcgcgtccctacgatcgggcatccgtcttggactttactattgtgatgacgctggtggcggccaccttgcctgggacgaggggccccaggccggcggcaagggggccccgggctggcgccacggggctgcgggccaccgtccgggcgaaggtctgcagcgcctcgtacttggagcgcagcgcgtcgagctccagcttcatgctggcgttctctgaggccagcttctccacctcctgctgcagctccgccttctgcttctccagctcctccttctgcgtcacccgcttcacgcggcagctggcagcgtagccgcggttcttgagcgtgcgccggcgctgcttcagctggacgatctcctccttggacaggccccgcaggtgctggttcagctcccgcaccgacatggtcaccagctcctcatccgtcaggctggtgccattctcacccggctcccgcttcacctggggcacagtgcaggtggtcacaggccaagcgggcacgcccactgtgccccccgaccccagcccacaggctcctgtccctgcccactcaccttcaaggccttgtttcctttattgggggtcgtcataacccgggggcacagcgagcaggcgctctctgcaagacacggagcaggtcagtaccctggagaccaccctcgccgcacccccccccccccgcccccggcccagttcacaagagcccttgccgcacagcccgccccagcctgctgtccaggtgcccagcccccaatacctgataggaggcagcccttggcctctcccaggctgggctgagctgcttcctgtccaccctgcccctagagaaccaggtgggaggtcaggaaggtctgacgggagaaggggaactgaaggctgttaggaaggcaggcgcaagacaaggggcaggggagagattagaaggaataagacgcgggagaggcaggcctagaaggaagccgggagctttaaaaataaccccggcactgcccagagcgcggctgttcctggcgagtcacgctgactcagcacattgcctctgcctccccgccgcgcccgcactccctggcccgccagccaacagcgccccacgagagccgcagcccccagcctggccaatagcaggtgagggccagccagtgaccctgtgtgtgcatcttccagggtcctaccttctacagccacctcccctgagccggcctcggacaaagccccctgctccctgggtgcacaggggccccacgggggacctggccagagaggaggctacagggaaccccgagtctcccagcctcctaactttgaaaagctgggggtgggccgtccatctagctctggtctgttggcaggactgaccagggagttcccccaccttccaggtggcaggccatcagctgggaggagcctggcccgaggcccctctagacctcccagtcggcctcctccactgatggagtaaccatcctgtggctttgggttgcaggaagcagcccctgccccaccccatccagggtatttcacaagggctcccacagtgagccaccccgggcctgcccaacgtgaaggctggcggagtcagcccctccgagctgcagcctgctctctggtccctgccccgggtgagtgcccacagggccagggagcaaaaacaaaagtgctggggtggccggacttaacaaccaactcttccccactcggggtccctccagcactctgctctcactttcttgctaaggatgtttctgggattcccagctcagcccagctcccaccagacccttgggcatggacccccgcctcatgctccatcccccactttccaggtttgatgcagacagatgggagactcctccagaggagctaggatcacttcaggaaattatgggctggggggcttcttactctcatcaggggagctgaagtgtggccaggcggatgcacacatcctcaccaggctcaagactccacctcacccagcctgggaccaggaggtgaggctgcaagcacagagcagggaggggaggccagagacccctccccacagccaagccagctcagaggcaaggtcccgaggctccagccactggattcttccagataaaggatggggaagacctgagctggaggtcagaaggcccacaggagccctttcctacacgtccggcacaacactgccccaggagacaggccctcagccaagcatggaggggccccccagccttgagtgcaagtcagggtgcagagacactgccctggcaccagcttctcccacccccatcgcccccacccctgctgctaagcacaatgacagtggtgacttcctgaagagatcacacggaaaagtgcctcctcgacagattttgccctccgcagaaggcctgaactcagcacaagtgcaagccatcgcctcctatcaaaggtgcgccggggggtgggggaggggcagccctgagcacagccagtgcgttccaggctcctggcctggcctctggacctgggctgagagggaccatgcagggatcccaggagctggactgaggagaagctgcccccgccctcctccagccctcaaggctgggcagagctggggcctgtcatgcaccctctgctcccagaggctaataagcccacctcacgcaggaggcacagatggtcacggctccgcaacctgcgagggtacctaggccacccattcacactgagagccaggaaagggagggagatttgggagctccgtctcctttggctaaagtagaaactcccgtgcctgaacacagacagccccacctggctgcaaagcccagcggccgaaactccccggcagtcatggcctctgctccataagctctcagctcctgaaagtcactctttgaacagaacctaaaacttagtttccactgatgcataagtgactgagaagatgtacataaatgggccgcgcggtggctcacacctgtaatcccaacactttggg

SEQ ID NO: 1244309 - DNA, 4001 bp, Homo sapiens
gacagtcagggcactcgatatagccgccaggaggtgtcagcagagccaggtgcaatcccggccatgggccacatggcaggaggtggtgccggccaccctgggcaggggaccagctgggagagggacagctggacatggcctccccagagaaaccagggaaggtggccctggagtgcagggcagggaggtgacaaggacatgtgcccaggactggggtcaggggaagaaagtctggggccctctctggagctgccgcagtcaggcttggtatctggaagctgcaaggggcccaacaaactgcttctgcctcccctggccctgtatggccttcatgcccctggcaagaggctgtttgaggtttccagggccactgcttcggggaggcatctgcagaagccactgggcacacaggcctgatggaggtgggcagcgccaggaggcgcggacaagggcaggcgtggacggcatgtgggcatcagtcgtggggccctgccacaatgctgtgtcctccatgctgctgcccagcagccctcctctgggaccctcccaagacactggcacccagttgctcccctcagcttggcccaccaccccccaacacccctgactcaggactgagcccctagaaccatgaccccaggccctcttgcttcccgggctggcccaggggcctgagttctaattcccagtcccaccccaccttccccatattcgtcctgttaatgctgcatgccaaagccaggggcagggcaggcctgcaggagcaggccccagctctctgttccccactcaccctcccaagggaggcccaggaggccaggggcagtccccagccccacgttggggaccagtgggttaagaggccctaaagcctggtaaattctggcctgcgtgaaaggaccctacagccaagaggcctcatgtcacagcgcctacgagcacattgtcacgaagccctgctactgtttatccacctaccaatgaactacacccacaaaagtaacaataataaaataataacaggtgccattcacttaacaaatgctatcttcaatctcgaccactaccctgcaagggagcatgtttactcccactttacagaagaggagactgagggctaaagagggcacaagacttgcccaggtaaggaagtagtggagccaggattcgaacccagggccatcccagcagagcccaggacccccggcttcctgcctgacagaggcatgcctcggctgggttctctgcaggcagagggcagtctcactatgacttgtgcctgacacttagcaagtgtggaatggaactgtctacatccagacaagcagggtccccattctcagtctgcagatgaggaaatggaagcttctcctctgagagctgggccatgcccaggggacagaaatcatttacagagtgcagagagtggaccagatgcaacttgtcccacgtcacatcgcaaaagggacagagctggggtttggacccaggcagtcaggctctggaaactgaggtcttagcctctccacatcaccatcttccaggagctcaggccgggtcccaccccagccgaccctgcaccacctctgctcctcaccctccctgagtcccagctgcacagctgaacctgaggtgtcccctgggccaagggtggtaaacagtcactgccacctgctcctgctctgtgagcaagaggaagcagagccccttgcctaatagaggaagttcctgggtggggcacagagggcctgcccaggggttcccagcccagtccgaggcccaggaaggggccacctccagtgccccagctcagggctaggtgccacctgcaggacacgtaaccccctccccacccaccaggctggcaggcatcgcccctttaagctgtaggcagccggctggcatgcccagcgggtgagtcagcacccagtgcccgctgactcaccgccggaagcctccgctgccccggccttctcctcacacgggccaactgagaactttgctccctttgggcgctgggccatgggttggctgacagagagtttcctgtgcgtcacaagaggggtgggggaagtccccgaggtgccacctccagtctttccgacagccaggggttgggggggtggccacagcaggcagggctaggatacaacagtgctctatgaaacctcagtgtcaccatcgggcagtcaggagtcctacagccacagtccaagctgtgtgaagattagccatgaagtgctcccacaggtggcactcttagggcagaaggggcagaacccatgttctgaacgacaacaggacacgtgtggtaccctccaaggacaaatgtggcttgcacacatgcccccacccactggccccagcgccagccacttggcctctaaccccagccagagatggccatgtgggcaaggaggccaggggaaaaccagcagagctgtgggcctgagggcctcacacactcatagaaaactccccaggcccatggcatggaaacagtgcagggcacctgctgccaggcaggaagctcaaaggtaaagctccagtaaggtcaagcgccagccactccctgctttgttcaaattcctttgagaaggtggagaagggatcagtgctgggaggcccagtgcccaggatggggtgggcacagagtgaggctctccacctatgggggcagtccggccactcctccatccaagctgagttctgcatctgtcaaatgagtgggattttgcagcgagaatgcaacaggcccagtgtaaagcgctgtgcacaggagaggcatcacctctgcctcagtctgtcctctaggtctgacgtggccatgaggacaggcccactgcacatgctctgagcaaggccaggggtgggggcaccccaccagctcagctcaggcatccagcatgggaggggcacataggggagcacggggaaggccactgtggaaacacagtcctagggggaaccctagctccgcctgtcacagctgtgtggcctcaggcaaggcacttaacgcctcagtttccttatcagtaaatggggctatgaggaataaatgagaaaatgcatggcacatggaaaaaaagaaggagctcatagggtttttggtgaagggcattgtggctctgccaccacatccttccccagaccccaaagagactacagagtccctgggcctgagggaggtccctgaccctccatccagccccctcaacctcatctaggacctgggtccacatctagaagttcattttggccctctcacagcattctcactgcatctatgacccctctcctttcacaactctgcaactggaacttttattttgatgaggcattctctgcctggagagctaaaaagcctccaaaacaaacagtgcttcctacccttccccgagctctccagagtggagaagtgtctgatttcctggttcccaagctccacgaggtctgtgcagtgcaagtccctccccagacacctcccccgtcgagtgcctcccgagttactcacagtggttgggcaatggtcagggatccggcctcccacttatgtaaggcataattatccagcccacccggctccagccaccatagcagccagcagcaggggccaggaagagcccatgccctccccaggcccacatagggctcccattggcctgcaccctccagaacagaagagcggctgacccctgatgaagtgcccactaggtgcccgctgctaggtgcttcctcctgctcactctgaggctgcacttccagcagtggaggcctttccagcaagaagaatggaaacaatagcgagatgtgtgcagccagtgtaccctggtgagcaccggctctgcgccaggtgctacgctgagagaacgcctcagagctctttactattcaccaccccacaccacactcccacgtccacagaagcaggtgcgattacttccaatttacagaaaaggaaactgaggcccagagacaccagggagcttgctggggtgaag

SEQ ID NO: 1244310 - DNA, 4001 bp, Homo sapiens
tgcttcctacccttccccgagctctccagagtggagaagtgtctgatttcctggttcccaagctccacgaggtctgtgcagtgcaagtccctccccagacacctcccccgtcgagtgcctcccgagttactcacagtggttgggcaatggtcagggatccggcctcccacttatgtaaggcataattatccagcccacccggctccagccaccatagcagccagcagcaggggccaggaagagcccatgccctccccaggcccacatagggctcccattggcctgcaccctccagaacagaagagcggctgacccctgatgaagtgcccactaggtgcccgctgctaggtgcttcctcctgctcactctgaggctgcacttccagcagtggaggcctttccagcaagaagaatggaaacaatagcgagatgtgtgcagccagtgtaccctggtgagcaccggctctgcgccaggtgctacgctgagagaacgcctcagagctctttactattcaccaccccacaccacactcccacgtccacagaagcaggtgcgattacttccaatttacagaaaaggaaactgaggcccagagacaccagggagcttgctggggtgaagcagctgcaggttcagaaagccaggaggcagcccattcattacggctatgtccggtttggaaatctctcgcacaacccagcctactgaaactccgacgcaccaaaaacatcctttcctcttcctgaaaaaaaaaaaattccccttttgccctccgagtttcatccttccccctccgcatgacaaatcctgctgctgccacctcacaaaaatttccaggaaggccagctacttggagaagagcaaatcccttgcacagccagcaccctggcctggcggctggcccagatcccaggcagccaggacaagaataagatggggtgagaacccccagtgcagggagaagcttgcaactcaagacagagagaggccggtagagagggggctgtaccttagggaggggtgggaggacaaggaaggttcctgggagcccagggctgcaggacagggtgcaggccagccagggaaggggcaacatagggcctataaggataagaagagctgggggagagaaggacggggagttccgagctggggtgtagccagagcacccgcatagggggtacagtgaggtccgcaacaacaggagcactctggggcccagatggagactcaagttaaatcccaacctggatacagccctgggacccgaagctagaaatgggactgggtgctgcccaaggacccaggtgaaggccagtgtgaatctcacctgggtcccgctgagggagaagactgggagagttcatgtccaggctgcagccataaggcccaaatgaggtcagaatgaggctcctgacttggatggggtgagcagaacaaagtcctagtctgggtccagcctgggtgatctcgggcctgagtgcagtcccaaggcctaacgtgggggtccaggtgagggcccaggcgggggctggtcccgggaccccgaacaggaaggggttccgggaccggacgccgctgccaggtcgagaacaggatggggtgggaccaaagaaaggtcggggtttgcagcccggccccagattaggcgcggggtcaggccgaggtcccggccgggagcgcctacctttggactggggcatgctggcgggctggctcgaggcgggcgactccatgctgcaagtgggtcctggacggcggtggagactaatctagaggactgcgggctccaccggggccgagcacgctcatggctgcgggcagacggcccaggccaggcggaggagcagcggcggcggcggcggcggcggcggcgactgcggcgaggactgcggcggcgactgcagcaaggacgagtccgcgacgggcggcgccggagacagactgggcagcgccggggagaccccggccgaactgcgctgactcaggccccgcccctgcgtgcccgattggtcctttcgtttccaaggcccgtcctctgcctatcagacgccggcctgtccctgcctgtcaagcacacgccccaccctccttaggcccaggatccgggcccctcccgctctctgtcaagtccgccagccgcccgaaaaacccaggtccggtcaggctccgccccctggactaaagccgcgcccctcgcgctgcccgtcaacatgcaagccccacccactcccgggacccactgagcccgctgctccctgcaggcgcccaggcccagcccggcacccccagacccgcagccccggcgggtgcgatgcgcgggcgcgttctcctgggtgcgtcgtctggaaaaaacccgagatccctaaaggtggcacggctgggcctgccgaagtgggcgggggttaaaagtgcgctgctgggctgcctcctggctctctgaacctgcagctgcctcaccctagcaagctccctagtgtctctgggcctcagtttccttttctgtaaattggacccgggttcggatccgagtcggcagctttgtagcggaactagccttggtcaggtggtgacacctgagcctcagtctacgcatctgtgagcgggcggcggtgacagctatctcccggcgctgctcgctaacacgcactgagggcctggcgccagcaaacgtcgcccgcgcccgcgctccaggcgcccggccagggcgcggggtcggtggtgagctcagcgatgcccggtgacgaggcagcacgaggagttttcgtggctggttactgctgcccctgttctacacagggggaaaccgtgtctcagagggagtgaggcggcatgcggtgcattttatcccgcgagccccgaggccccatcctggctctctcctggaccttcgttctctcctctcctcctaggatctcagtctgcccatctgcataatggctggatgggccagtcctccctctgctcccacacggaacctcgggggatttcaggaaccgctgaccaatctggcgctgggaacagatgactctggatgtaaagccagggctagtgaaggcagaatgtaccaggcaaaggtcaaggggtcagcccctggcctccaggcagacatgtgtaccctgtcagggacctcacgtgagggaagcagattccaccacctgctagaaaggcttgaggccgggcctgacctctgcttgcccaggtgtaaagtgggggtgatgcagggccccatgcacagagtggggagccacaggagataagagggaagccttgcagccatcaccattctcttcctgcgtctcctgttcacccttcccaggcagtgggatggaaaatcatgagtctggggctcagataggtatgggttccaataccaattcctccacttactagctggatgaccttaaagaagtcactgagcagctctgtgcctcagtttacctatcccatggggacaataaggtctctgaaagcgtttcatgagttcaggagtggaaacacctggcctagggcttggcactcactaggtgcccaggaaatgtgagtttgaaaacactgtgggctgcctccatccttgccatatcatccctggtgacctgtgcttatccgtctgtaaaatgggcatccaggagcagcttcctttctaccagaactgcaaggctagtccagcgagttttctgggttcaggcactggccaacagccttgacttctgcacaaggccacactccgccttgtgcactctgcttcttgggatgttcaagagtctcagtattgcccctcaaatgtgccagggatggtcctgccgcagcagcttcacccttgctgctcctgcccagaacattcttccactcaagcctcctggggctggttccctctcatccctcagaccgcttcctaaatgaacacccctaagaggccttctcatcatggtccccagactgaggcacaacacttatgctgctgatgtctttgttactgactcagtttttaacacagctct

SEQ ID NO: 1244311 - DNA, 4001 bp, Homo sapiens
ctattatcttctatcacaaaacccagcttgttacctttattacttttccaactagtaatttttcatgtttagctaaatagccttccctcccccatcttcacagggggataacctccatgaggacagttagagatgttcaattctctataaactcagcatgagcgttttatgcagatgctcaataaatattttttgaaccaaaaaaacacactgtatccagctatttcaaactgtcagcctccccaccaataaaacaaacaaacaaatcaccttgtttttataagctttgtaagtcacccatctggaacaagaaatacaatcctaaattgtcattttgccatttcatttcgccccaaccaccaccacctaaattgtaaagctgtacagtcaggaagtcaatcttatacttcatcagtataatgtgctgtgcaacacagtgggcatccaataactaattcaatttgaatgaattatctgagggcctgcacagaaagtgtcctctaagctctgacatcatcctgtctatatatctatcactggtttttatgtatattaaaattatttcatggggagggtgacagggatgtaaagataaataaaatcctgtctcttctttctgaattatggcatgctctataaacatgaactattcaataaatgtctgttgaacctaactaaatgctagaagccctttaagaggaatggaatcaaaaagtaaccatggtcacactgactaccaagggtaccccaacccttattctgttaataattcaacacaagcagtttgctaaagttgtcaagagagttctgagattccctgttttaaaaatagcattactactcaaaattccccagtaaatttaaggaaatggtccctaacaggctcgggcctggcctggtattttcacaacaccccctgtcaaaagccatacacagctaataagcattcccagtggggaaagtcattaattagcagagctgcctcaaatgtccagacactacagtatcactttgacccctgtctatttcctgtatctctccatttaaaccaaattaagtcttctttttttttttttttttttttcttcctgcacgcaatgctaacacagaaatccctggcctggaacaaaatgcctctcccaggccaatgcagcctacctaccttacaggtggcacaggcctgggcaacccgccccccacccccatcccttccagcgcacagaaaccctgcaaaagtttgaaaacgcaggttccaagaggcccccgtagcccgaggtcagctcggtggtccggctccagctgtgcccggcgacagccaagatggccctgagcggggcccactgcggcggcggggccgaggggcgccggccggggccgctgtcttcgccgcctacctgagcggcgtcagggaccagggggcaggcccgacgcccctcccgctccgccgcagccccgagccggcgcgttcccggaaacgggggccgggcgggcgccaggtaagcggcgggggcgatggggacggccgcgggggcggtcccggaccaggtgggccctgcgggcctgctgagagcccggtagggcccaggggccaagcgcaggcagaggccgcggccggggcctatgcgggccggagcccggatccaagccgggccggaggcggccgggagcggggcgggaagccggggagggagagagggagaagccggcggctgccgtggcttcctcagccgggtccgggggcgtccgctggggcaggccgcgacgacgcgggttgccgcgctagggggctgggatctcggcgcggccgcgttccttaccctgcatgctgctgacggccgggtggcctggcgccggggaccctacggggccgggggtgccgctgccgctgccgcccccggagccgccgccgccgctcgggctcggagccgccattgttgggagtgaagagccgagcggcgccgcggcggctgcaatgcagcaagctcggcctctcgcacggccgaggggcgaggcttacccccgccttggccccgcctccgacacgccccggacacgcctcctgacacgcccccgccagagcccgacgcgcagcccgggccagatgctgagctgcagaaccgcccggctctgggtgcgcgacctgtgaagcagacagctgtcttggaccagggctgcgggcccgcggggcctaaagtggtttgcagaattaaaggtgggcctgcatttgtgcggaaagaaggtacgcagctttcatcattcccatggaggtctgtgactcccaaaagtccactttgttggaatctcagaaccccaaatcagaatagtaaagctgaaaaggatcccagggatccctttctcctccagtcgctaacacatcacttccagaagggagttacctagagctatggttacagtctggaactcctcttaagcccaataccccaaccctctacacttctctgaggggaaaggggagtcccaaggggaactaaccaaagtgctgtccatggacccatcccaaaactactgaattagaggttacattttaataataccaccaggtaatttgtatgcccattaaatttgagaagcatatatttaagcactcgacacttcccagcctcctgaaatatgctatctacatcaccatcttcccctaaatgcacactggattccctctcccaaatcctttacatcttgtataagacgagccgtagtcattattgtaagttacataaaatgacaaccccaaaaaacaatatgaggtttcttccattgctttgcacagagacttttattttaggaagacagtagctaaaagaagaaaaagttctctatgaggctacgatttgtaagccaaccataatgtactcgaaatggtaagacatgggtttctggccaggcagccttgcctaaaatggaatagccagttatcctacttcccaaagaatctaagccatggagctggacattttctcccatttagaagcattgtgtgatctacagctagacttctttcccaaaacttcttccacccagatgttatttgatgctgagagttcttcacagcatgttggaaatgtgtcctgggtcaaaatagccctgccttcttgttccaaacccaatttcatccatcatcttgatggctcagatcctaaaagtggctagccgtaaacatcaagtggagaggcattaaaggcaaattgaaggtgagagcaggtaggtgtacttcagtggagagcccgccagaattctcctccatgggcctcgttggctgcccaatatcttcaagtccaggtcttataaacatggccagattcccatctggaaatcagtagcccacccagctcttgttgctcctagggcatcttaattatgagccatcataactggcctttaataagaatttaatatatattcttttaatagaaatcctagaagcagcactacagattaggcaactactagaaaattaatttaaacacacacacacacacacacacacacacacacacacacacacatccaatattataaataacatatattaaagaaggctggggatgttggctcacacctgtaatcccagcactttgggaggccaaggcgggtggattacgtgaggtcaggagttagtgaccagcctggccaacgtggtgaaaccctgtctctactaaaaatacagaaaaaaacaaaaattagccggtgtggtggcaggtacctataatcccagctactagggaggctgaggcaggagaatcgcttgaacctgggaggcagaggttgcagtgagccgagattgtgccactgcactccagcctgggtgacagagcaagactccatctattaaaaaaaatatgtatatatatagttatatttatatatatataggaaaaccttcaacctagcaaattcattaagggaaattgggaaactgaattaaaagagaaatacaataaaaatataactaatcttatttttaagaatacctaattctgagt

SEQ ID NO: 1244312 - DNA, 4001 bp, Homo sapiens
ttttcaccaacccgaaggaaaaacttcattttaaatatttttgtgtgtccctaaatcatgtgcacacatacacacacaatacatacatatacatgcatatatatacacacatacatatgtatatacatgcatatcacaatatattacacatatattaaactgaattgaatgaatgagcgaatgtttaccaaatacaaagtaactaaatgccatctctttaatacatcaaagcatggactgcctcttctgaactattatttctctactcaataaggagatttttaggttttccccacttgaggaacatctccacctgatatgtcaattcctaggttcttcagcactcttaacttttcagatttccattctcccctaatactcaaagaaaagcagagtgctactttgaatgcttgagattactacttccttcttgggctgctgagatatatgactcccatcaggtagaattaaaaagcggtgcaacaactccccacactccctcccaaaaaagtagcaaaaagcttgttagaccctttaatttcaccatgtcttactcaaagagtgccccgggtagcctaattcaatagtatctaacacctctcttcatcatcccatacttctcatatggcatatgctttctctatggtaaagaaacaattgttctgaaacaagtgacttggggtcccaggggcacctgacagcacctagtctgctctttgatgtcatatcaggaattttttaaatccccttcccagggtgacattaagcctgcaaaatacaactgtgtttaaaaacaaaaattaagaaaagaaaataaaagaacataaagaaaacaaccataacgtgaacttccaacctattacagctgactaaatacacgcagttacacacttaaaatatttcattatgcttgtcaatgaaacagtgcagtcccttcacactactgtaatgcttaaaagtacagttttacccccaatattttcccccaagatgcaaagcatcccccaaatgggcagacataaaacattaggtcttcactgctgcttctaaattttgcgagccaataagcaattggtgtaaagtgcaaaatctcagaagagcaagactcgtctgcttttttgtgatatgctgttattcacccttcacctttacttcctttaaaaatcaaaagttacctaatgttcaaggcgatatcaatggaaatttagctaaatactggcaccgcaacggtctatttcccccaaagaatataagattacattaatttcctagtagtttaactcaagttttacctttcatcttcacctatagagtttttaaaagtttctattcctgttgcatacaaaattacttacaatatctgtgcatagtaaagaattttacaattatataaagccttgcacatttagacgctaccaacctgctctgtctctcctgactgtgcaaaaggcaaaaagagctcagtaatcctagcagaagaatgcaaataacgtcaatgcacagctgaactgcaagccctgccttacaggaactctctgtgtctgcaaaaaaagacacatactaaacaggaaatgcaactgagctgtggaaaacctcaaacttaaaaatgcactcgccaggcgaaaattgcatccatgcattcataaatgcatgcacaaccctttgcatttttgcaactaatgcaaacagcctcttacctttcgactgagacattttcccctttcctttgatgggggaggggagcacaaaagactttgccttgcttctcttctgtagctagttttgcaacaaagatgcaagctgcaggcgtgcaatcttcatgcaagtggagtttctcttgaccgatgcagcagatggactttcagggaatcaagatggaaatgcacaccttgcaaaacagactggaaagtgatttttcccccagttgcaacgttagggaaggctgtgctgcagctacatgatgggccagggctggcagctaaaagctccaaacttggaactgagtatcttagtgcgcagacgtccttcctgcgaagggcgcgaaggccgctgggtaatgtagttctccggcggagtccacggggctctgatttaaggaaacgtggtcgccccggtcgctgagcgagataactgggtgcgacaaagattgcgtccagataaacaagtcagacacacactcagtagagtgatgggtgaaaagcggcaaggccaagacggggcggcagttttgttctcgaaaagcctctgaaacaacagctaaagaatattaggttagctaaagagcttttggcttgtcgagaaggtctgtttgggagtttagtgtgttgattttgcagctcagcacctgttgtgctgttcttgcctgtagacgttttaccctcacacctccgttttttgtttgtttgggggtttttttgttgttgttgttgttgtttttttcccgagagggagtctcgctctgtcgcccaggctggagtgcagtggcgcgatctctgctcactgcaacctccgcctcccgggttcaagcaattctcctgccttagcctcccaagtagctgggattacaggtatgcgccaccacgcccggctaatttttagtagagacggggtgtcaacatttagccaggctggtctcgaactcctgaccttatgatccgcccacctcggcctcccaaagtgctgggattacaggcgtgagccaccgcgcccggccacacctccatttttaaaaacattttttctagtaagaaaaatgtatggatgattgggttggctggaggtaaggttacctttgctctgtggagaagatgcaaagttttattttgtcagaaacaatccaggtcagttatttccaaggaacccgaaactcagtagggggtaggtgtggggaagaagattggaggcttctcatttctcacagggttacagaggaagttctgctttttatacatcaacgctaactttatcaaaattaaggtatctagatgattttttctcacctgggaggagagtccctggcctagggggaaagtgggtggaaaatgaatacagtcgaatatcttgaatttattcattaaaattaaaagatacttgttgagtgtccaggatgtgccaggcgcctttctagggccctgggatgttcattcattctgtaccgctcacacatagtgggtacacagcaccctgatggagaacggcatcacctttttcacaaggaagccagagatgcttagcacaattcactgcaaggaatggagaggagtgagcagggcatgggcaaaaatgagctcggacttatacttcatggagcagacagactcagaaatgttcttttaagacagagggaggaattgaggaattcaaggaggtgtggacaaagcactgtggcagaaataaggacaaccttactcagaagctgccaaggagaccttgttgccttgtgtgcaggagtggtgagggcgggggagatttacaggtgaggactccacagggccttaaaaggtgggctagaggtttggactttattctgcaggtacttgcggggaggtgaaagggtcttgcaaaggggcgtaacttaatccaagcattgttttaagaaagtaaatttgccctcagcaatcaaggtgggttggaactgggagaggctagagataggttaggtcagtagtgaaaggcaaaaagaggcactttgaaagaagattcagctagatttgatgattactaatgaaaactattggaattgtatttaggatgctggaagccaggaccatctgcataagggatgcattagagggaaggaagccgtcttatttcagctgcaaaccagcaaatcaaatcttaaatatgcaataggttgtgagactaacattaatttacttaagttggtcccctttactgacattcttgacaattagtgaaggcaatctaatctccatattagcttctgcccctaagaggaaggcattgctggtctgtgaacacaggtgcaaggactttctaac

SEQ ID NO: 1244313 - DNA, 4001 bp, Homo sapiens
agcgcaagccatcttctcagcagtaaatgatatacacatattccaggcagatcacaaaggagtcagtgttcaacaggagaaccaaaatgaggaaccaaaccttcatctgttgaggcgaaacagcccaaccagacatttttgtttaatagagggagactgatttggcagggtctctgtggtgccgctcccacaaactcttaacagacaataccaatgacaaaaaacccccttcagaactgcttcttataatcagaaaacactcagaagatggcctgaagcttggcagcgtcttgctgtctgatttcacaaagagctggtacacatacctgggtacttatctctaaaattagagtcagagacgattacttttattttgagatcttctgagaagttctccacacccttcaaaataaataaggatgtccgaaaggtgtctgaaaaattcagaggtctggcatcgctccaaagaaactgattgatatcacttaaaaaacaccaagagtaaatccaaacacaaccaaagtaaggcaagcactttttaagtgtcctctcacattaagagcataaaaaccacaccaaaaacttctccctcctttctgcatctcagttctataatgtggtcctgatctaggattctgggaaagacccatccttagtcccagctatgaggcatcaggcaagatatataccacccccactccctcatacacacctgcctcaggtgcctcgcccataaaacaagacactacaatctgtcttaccacacagccatctgaaggaaaacggagctcacaggtatgaagacactaagcaaaaaacacatcactaatgttaagatactgtctccttctaatctttcagaaagaccatgtttctagtcaaggggtttccaacatttttcttggaataaactccagactcctattttatatcatgacctcactctaatcatttaatttcatgtgcttttaaagtccttaattaagtcattggtgttcattgtctccagcgatcaaaagtagttttaccatttactttgctgatgtatgtaccttttcaccacttatcctctccctcattcatacctccagtccaccctttagggccgagagcaactttttaacctcgactaggaaggaaacactttttctgaagctacccagcactaaggaggctcccgggcaggtgggaaacgtacgtacaagtggcccctctctgcctggtgcccagtggctgcaagatgccagggccacgatgggtttccaagatgggaatgttatatttgaaccgacagataaagtcccgagttggagagcccagaagaattacagaggaggactggggtccgagggcggagggaggatgctgcgggcggccagcactgccccgctgcatgctgaggacaggcttagctcctgctccccgccttgaggtgtgacctgagaacttcccatgaaaggccgggagggtttcacgccagggcagatgccagggcgcactcctgcaggagacacgtccgccccgcggcaggcgagctccatcctgggggcactggggcgcagagcaggcgggcgggcctggcggcggcgcggggcactagtgaaggggaagcaggcggcccctgcgcgcgctcggagccagcgtgtggccagcaggagtgcgcggcctggaggcccggggcgagcgcggcaccggcagcgcgtgcgagggcgcgcccgcggaccgctgcgagtgggttggacggggtacgtcggactgcgctggcctggccgccgaccccactgctccggggcgaggggccaggccgcagcccagcccggggctgagaggcgatccatcccagccgctccctggtcgcctcgcaccgggccccagggtcccgccccgtcacctaccggccaagcgccgatctccccaaccaagcgagtgttgcgctccgctcgcccgcgatctcccgccgccggccgccgaccgctgagctcccggcccgtggtcgccccgccccggtcccgggctccgccccctcgccttctcggccgcccccggggccacgcctcccccggaggctgtaactttgcctcgcttcgcgcctcctttctttggccgcaccgcgacccgtggccccgcccactcccctacgccaaccaatgagacggtcgtcccggcaagcccgtcttcccgctccctagcaacgattggttaacgaggcctggtttccagaaatgggcactatttccggacgatgtttgtagaagggagatcgctgggcgggcggactgacagaaggcggaggcgactagggtgttggtggaaccacacatgcgccctcggcttctggcagtcttaccagctgcgttctcgaggttacgggaaggaagggcgagtgtgcgcatgcgtgggcactccctgccactgacttcggttaccttggagacagcgaggcgctctccctcgtgggtcgcgcgcgttccgcttcctctctgctgccaagcggtggcggctgaggcgggaggtggtgggggtagagacgtttttattgagctcttaccgtgtgcctggtcctgtagaatccctggaatgagtaaagaaggttacagtgcctgccctcgagaagcttggggagccaagggcttacaggggcccgacctgtgggttgaaacccaggtacaaagagagcatgtgggtgcgtggcgtggtacgagcgctgagcaaagcatctgctctctgggtttgcagaccacagagccagcaagaggatgagagcttgatgtatgcaaagaaaggacctggagttcagaatatgcattgaagtgtcaacagtgcttctttctgaatgggggtcgggggtggggagtagggaaggtatagaaactttttctaacttttgcccctctgtattatctagtgtttccacactgagcttgtattttatttgtaataaattccaggccaggcacggtggctcactcctgtaatcccagcgcttttgggaggcaaaggcaggaggatcgcttgaggccaggagttggagaacatcctgggcaatatagcaaggacctcgtccttgcaaaaaaataaaagaatagccaggcgtggtagtttgcacttgcagtcccagctagaggggaggctgagagtctgaggttacagtgagccatgatcgtgccactgcactccagcctgggtaacagagtgaggcagtcctttaaaaaaaaaatccaaacttttttttttattgcaaaataaaagatgtactcctaccctgggcatcccacttccatgaagggtccatggtaggtgtggtgagtggctctagtccggggataggcaggccccacccaaggctgtcttgaaaagtaaggaacaccccatctctggaagtgtttgagcaaagaccaccatctgcttgagactactttgcagacagtccgaagctgaactcttctttctggatatctgtgccaaacagtcatctctgctggggaatagggaagaccatttatttaggcagtggtcaaaaactcacaacctgagggcctcattcactcacccaggccagaaatatgctttgtttggctggcccaatatttttttaaatttgaatttgaatgccttagagcagagcctgcggttccttacagttcccgccacccaaccatctaaccttatgtcacctgtctggcccctggagcatttgaggttgtggctcccgtagagtccgtgctttagagccaaacagtctctggcgcccaccctggctctgccactgactagctgggagatggcagacaagaaagaagctggactggtggcccccaaatctctttccacccctagggttttgcatttcagtgactcagggaaaggcagagcttggccagatgtacaggttggtatcggcaatcttggatgcccttattgcctctcccaccacctgtttgcctctgggcacaccacttctcaggaaagatgtgggcacacctccagagtctgcagacact

SEQ ID NO: 1244314 - DNA, 4001 bp, Homo sapiens
caacacatgtgggcactctaactggtgtagcagtcaacaaagtaggaagtggatggtctacatacccttaagtatttcacactctcctttgggactaacagctgcccccacaggacaagaaaaaagacttgtaagaaagactatcacaatacaggctcataaatcaattcgaagatttattcaaaatctataatacaagataaatgtttgaatcctggggtagacaagaattctgtgtctcatctataaaaaaattcaataaacatttcttcaattatatatttaaataccaggccttactgggttccttttatgtccactctcacagcagaccttccctcagaagagcacgcacttctgaaggaaagcatgagaaggaaacagtaagcccagcaaatgaacaaacccttctcatactgtatgagggacagcatgaactagaacaaggcaattcattcaaagccagggtgtagagatgggtcacaaaacaatatctggcgaatttgacatagcgtacagttaacctcctacaaaaaggacttgaccttgctatagggcaaggcaaacattaaggctccctcttcacatggggcacttcacagaagcaacggaacgttttgcaaacgatcctctcactgaagtttacccttttattattatttagggcaataccaaatattttgcaaaacttgtgacaacagtatcacaacacctgtctgggcaggagaagtaaagaacgtttaaaatgttatttcttagtctagtccagtagtcatttgctaaactaccaaaaaggatatggaatataattcaactcaaatgctacgtgcggaagacattaaaagctttccttagattacatcttcacagtagaaattgtaaatactgacaaaaaggaagtgatttcagagaaattcttttgtgtagcaaatgtttctttcaaaagttacataatttcagggataccgcaagaaaaaaataatggattaaacccctgcaacgggatttttcaaaaagtaggatgtgaattctaactggcagcatccgaccaactcctgacccccagcaatctgcgtgcagcacgcatttgtcaaccgcgcgcttgatcacagctccagtttaatcgcctcctagccgagccccgcacgccctcccccctgcgctggggcgcgcacagggctggagagcaagccccgggaactctcacaggccggcctgtgtgagcaaagggaaggaaatgacacaggcaggaaaaaaaagcaaatcaaggaaaagacacaacagcagctgggcctgcggcagcctccagcccgggccccacactgcgctcttgctcccccgccctcgggctcgcggtccggctcgttcggaccaggctgccccgcggagcacgggccctcggtcccgccgccgcttccccgggatgcgcccgccgcgccgcccagaaggagggctgccgagcgggctctgccggccgggccgccccgcggagccagaacccccgcccgggccgcggcgcgcgagcggggcgggcggccggccggccggcggtccgcagccccgggccgggcgggctgtccatgcctgtcaggcggtggcccagggtcctcctccctcagcctggggcggggcgtcgcgaagcagcgcgggcacaggccggggcggtggcgacacttacccatggtggcgatggcggcggcggtggctaaggtccgtgagtgtcacctccgcagccggggctgcatgccgggggcccgggcggcggggacggcagcgggcctggctccgcgcggggggcgcgggctgcgctctgggcccccgccgcctccccaggctccggctccggctccgcccgcggccgggcgctgtggcatcggcagggtggcccgctacatcccgggcgctcctgggctcggcccagcccggcctcggcggcgccgctcggcccgcccgcccgccagtccctcagacccgcagtctctccgtccggccaccgttctccacctcaggaacgctccgaaaaacaaaccgctggtcgcgcagctcgcccccctgtctgtcactcacgccggcccccaccaatcccaggcagccgctgggccgtcgcaccacccccacccacctcaccagccaataacaagaaggaagtcggcagcccccgccgtccccctccaactctctcccaacaccctaactctcagcggccagctaatcatcagcaccacacgatgaaccaatcccgcctactctcacaggatgccaatgggcgaagccaaggcggtttccgagggctgtctagcgcctgccaatcatcgggacagcgcccggctccctgcgctgttagccaatcacgtagaggcctctaagcccccgcctctgcgcatccctctctggtgctgtctccctctcttgggagagattgggaggtgttggttgttccaatcacagctccggcgtgaggctccgcccacattcccacctcccgtcagtcaccgaaggctcggcgggcgcgcgggctggcgcagttccccgccggctactttagggctggggtgaggagtaggcggctgcagggggccctcaggccttccgccctccgggttctcggaggccccagcgatctgggtggttccagagggtggcgtcctgctcctccccgtgcccagcacagggcgtgtaacgagtggggagggtctggcctgagcacttcccggcgcgcggccacctctgcggccccatcccccgactggtcctccggtcccgacgctgctcttgccccgggcaggggcggccggcccagcccagctttccctgtctcacacctccagggccacaccctctggtctaggtacctcagacacccgaggctgggatagtgctggcatgtgggtccctggaaatctgagttccgccagaggttctttcagaaaataacttttttcttataaaagcaacacgagctttttgtaggaaaattgaaaaatgcagaaaactatgaaaaagaaaagatcccaccccagagataatctatttcctacctagataggcgtttgacaaaaatggctttgtattgttttgtagtatgcttacattttattctgttttcccgtgccaccaaatatccttccaaaacaattgtactgattgcatgatgtttcaaaattaaaggcaccataattaatttccccaaccttttcattgttcaacattttatacactcagatcttcagattccaagtccaccacaattaatgtgggctcctttctccggcctctgttccagtgtaatatgtcaggctccagaataatcttcctcagatgtcattgtccactgtccactaagaacatttagtggtggctttgccttgagtgtcaaatcccttaagaattaccttgggctctcccctatttcttttctttttcttttttatttttcgagatggagtctcacactgtcgtccaggctggagtgcagtggcgcgatctcggctcactgcaacctccgtctcccgtgttcaagcaattctcctgcttcagcctctcaagtagctgggattaacaggcgtgcgccaccacgcccggctaatttttgaatttttagtagagacggggtttcgccatgttgtccaggctggtctcgaactccagacctcaggtgatccgccagcctcggcctcccaaagtgctgggattacaggcgtgagccactgcaagcagcctcccttatttctttacactcatctccgtatatttaatcagcccccttgtcctgttttctttttcttccaacaagcttaagcctgccatattcccacttgatttggtctctacccagtttactggagttccttaactataataatctctattcttgaaagcggggataaaggggaaagaaaattagtatttatcaatataacaggcacgtcattgcatttaatttttccaataactctaaggttattatgctaatactgtgggcatttaaatgatgaaagtga

SEQ ID NO: 1244315 - DNA, 4001 bp, Homo sapiens
gagcatcacgttttagattctctacgacttttccatgaacttggttaaatcacttttgtctccagacctagtttccccatcagataaaagatggggttggactacaccagggctggccaataggtttccttttggggctatctccattgtttggtagtggcagcttgaagaactatgatgaaaattgaccaggcttgtccactgtctgtaggaaagtgttctgtgattgattagtgaagtctgctatgggaataggagggtgtggtcatagtaggaatgtcctacatttgacatcctatatactaagattctataaaactgtaaaatcatctgtacacttcttgaggaataacagttgtccctggcaaaactctaaagaactggtcctagaactgcgggaattttcccagcctgcttcagattagattcagctgcctttccagaacttcggcaacatggttgcagccttcagaaaagtcccaagtctggctccctctcccatcccgcttcttacacagatttgaattcgccatagggcacggtgggcctcaggatgtccttgatggcgatgatgttgtcgtgtttaaagtgcttgaggatcttcagctccctgagggtccgcttggcattggtcaccacatcgaaagcattagggatcttcttgatggccacctgctggcctgaggagcagggaaaagggacataccagaggataccttggagaaactgcagagtcgactcagcccctatcaacacctcccttctaggatgcaaatgacaacagctaccaagtattgggtacctactatgtgccaagccctgtgctaagcatgttacctacattattaaatgttaccttcacaactcccctgcggggcaggtcccaataggtcaacgttaaagagaaggaaatatggcttagtaacttgttggaggttgcacggatgcccagtggtgtagctcagcctcttatgcctacaccctctccatctcagacctcacccatcccaccaccagttccttatgccagtgtctggctccagaacacatttctctcttagacacgaaggactggctctccattctggtctaactgggactatcattttcctaaggaggaagtaggcaggcaggatggcaaaaccaccaggccggagtttcagagaaccgagcctccccggagcctggcaggcagaaggccctggtcagtgtgtgttgactggagccagaactcgcaccccgctttccttcccggctgtctgggacaggccggtttcccactccctgcgacgctgccacatctgggaggcgacggctcaggaagctcaccggtgaggcggcggcgggcggaggacaccactccataggccccgttgcctatggtctcgatgatctcgtactcgtcgcccacgtcaaaggtcacatcgaaggagcgggctttaagcagggccaggttcttggccgctacagaggcagcggtgtgggcgggttcggccttcacgggcccggggggctccgcagagccgtcctcgccgtcttcctccttcagaggctcggccatggtgtctgtgtggagactcgggtgaggagaggaccacctaccgtgggcctcagtgtcccctctgcgggctggggagcaggaccagggaacttcccagtttcctaaaccgacaagggcagaagcgcgcggctggttcgtggcagactagctaccccaggggtccgggcccagagccgggggcccgccagggtcgggggaggggtaggcgaggcgcgggccaggaagaaagggaggggcggggcacctgggtttcctcagggccgcactcacccccgcgcctcctcaaggctttcagaggtcccgaggctcgccggcctcccgtccccagcgcgggggtctccgagggtggctcacttacttgttcaaaggccgcagccaccacctcagcgtcttgagctgccctgtccgtccccctccgccccgcctcccaaggccacgctccctccagctcctggccaatcgctgagctactgctgcggagggtcctgccccttctacctactgcgtccaatcctagcccaccggccgagaaagccacgcctggcgcgcgccgctgtccagctcgccggcgggagccgcccaaagggtgcccggcacttcgcaggggtgtgctccccgccctgcaccgccttcaaacgcatgcgcactggcagtcgggcgccaagtgaatggaaggcaacgcccctgcacgtagcgcgcgcgtccccatgaagctctcaacctcatccggccaatcacagctagtcccgtgagctcggggaactgcccggcctgagatgcccaggtctgggactgttaccttggctactggctcccgaagtccccttccgcccagggaattgtgtccgccatttgcttggtcccaggagctctgggaatgtgtcatccccggtagagggtgcccgtcacggccaaccacagagatcccggtcctccgggattctagagcgtccggccgaaccctccactgacttccggtggctgagcctctccgcagcttccggccaagttggactgcagctcgcggtttcctggcttctaggtatcttccctccgctcgtttgtctgtcccgcgattcccgtgctttgggctgcagcggagttaaccgaggcggccgcccaacctctgctcctctgcggagcccgcgggtgggcggagccctcgctggaaccgagctgtcccgacccaccccaaaatccgatagtttattcgttcattcatgtagcaaatgtttatggagcaccgcccctctaaggctcagtgccgggaggcgaaggtggacatggtggatactgtgagctggaaggaaaggttttctaaagggagctcgaggtagggccgaaaagaagtgaagaattttggtttcactcctaggcggcttctagaaaaaagcaatatgtatgcatattcgtacctacctcccctttggtgtacaaaaatgtagcatattatgctcttttcctgaagatcattccatatcaataactggaggggtccctcacttttaaacaacttttaataacataccataaaactcatccttttatagtgtacaattcagtgttttttggtatattcacagttgagcagccatcatcactacctaattttaggtagagtggtttatggaacattttcatcgcccctaaaagaaacctatgtgaaccaagtatctgagacaagtctcaagtcaatttagaaagtttattttgccaatgttaaggacatggtggtgacagcctcaggaggtcctacaacatgtgcccaagatggtcggggcatagtcagcctttatacatttcaggaagacataatacataagtcaatacatgcaagattgacattgatttgatgtgcttattggccatttgtctcctttggggaaatgtctgttcaatgtctattctggaagggcgggacaactcaaaggggaggggcttccaagtcacaggtagatttaaacatatcctgattggcagttggttacaagagttattatctatagaaaggaatatctgggttatgataaggggttgtggagacctagggttttttggttgtttattttattttattttattttattttattttattttattttattttatttgaagagtgagtctcactctgttgcccaggctggagtgcagtggtgcgatctcggctcactgcaacctccccctcctggtctcctgcctcagcctcccgaatagctgggatcacaggcatgagccatcaagcccggctttttttttttttttttttttttttttgtattttagtagagatggggtttcaccctgttggcctggctggtctcgaactcctgacctcaagtcatccacgcccccctgctcccggcctcccaaagtgctgggattacaggcgtgagccactgcacctggccaggagacctaggttttattatgcagttgaa

SEQ ID NO: 1244316 - DNA, 4001 bp, Homo sapiens
cagcccctatcaacacctcccttctaggatgcaaatgacaacagctaccaagtattgggtacctactatgtgccaagccctgtgctaagcatgttacctacattattaaatgttaccttcacaactcccctgcggggcaggtcccaataggtcaacgttaaagagaaggaaatatggcttagtaacttgttggaggttgcacggatgcccagtggtgtagctcagcctcttatgcctacaccctctccatctcagacctcacccatcccaccaccagttccttatgccagtgtctggctccagaacacatttctctcttagacacgaaggactggctctccattctggtctaactgggactatcattttcctaaggaggaagtaggcaggcaggatggcaaaaccaccaggccggagtttcagagaaccgagcctccccggagcctggcaggcagaaggccctggtcagtgtgtgttgactggagccagaactcgcaccccgctttccttcccggctgtctgggacaggccggtttcccactccctgcgacgctgccacatctgggaggcgacggctcaggaagctcaccggtgaggcggcggcgggcggaggacaccactccataggccccgttgcctatggtctcgatgatctcgtactcgtcgcccacgtcaaaggtcacatcgaaggagcgggctttaagcagggccaggttcttggccgctacagaggcagcggtgtgggcgggttcggccttcacgggcccggggggctccgcagagccgtcctcgccgtcttcctccttcagaggctcggccatggtgtctgtgtggagactcgggtgaggagaggaccacctaccgtgggcctcagtgtcccctctgcgggctggggagcaggaccagggaacttcccagtttcctaaaccgacaagggcagaagcgcgcggctggttcgtggcagactagctaccccaggggtccgggcccagagccgggggcccgccagggtcgggggaggggtaggcgaggcgcgggccaggaagaaagggaggggcggggcacctgggtttcctcagggccgcactcacccccgcgcctcctcaaggctttcagaggtcccgaggctcgccggcctcccgtccccagcgcgggggtctccgagggtggctcacttacttgttcaaaggccgcagccaccacctcagcgtcttgagctgccctgtccgtccccctccgccccgcctcccaaggccacgctccctccagctcctggccaatcgctgagctactgctgcggagggtcctgccccttctacctactgcgtccaatcctagcccaccggccgagaaagccacgcctggcgcgcgccgctgtccagctcgccggcgggagccgcccaaagggtgcccggcacttcgcaggggtgtgctccccgccctgcaccgccttcaaacgcatgcgcactggcagtcgggcgccaagtgaatggaaggcaacgcccctgcacgtagcgcgcgcgtccccatgaagctctcaacctcatccggccaatcacagctagtcccgtgagctcggggaactgcccggcctgagatgcccaggtctgggactgttaccttggctactggctcccgaagtccccttccgcccagggaattgtgtccgccatttgcttggtcccaggagctctgggaatgtgtcatccccggtagagggtgcccgtcacggccaaccacagagatcccggtcctccgggattctagagcgtccggccgaaccctccactgacttccggtggctgagcctctccgcagcttccggccaagttggactgcagctcgcggtttcctggcttctaggtatcttccctccgctcgtttgtctgtcccgcgattcccgtgctttgggctgcagcggagttaaccgaggcggccgcccaacctctgctcctctgcggagcccgcgggtgggcggagccctcgctggaaccgagctgtcccgacccaccccaaaatccgatagtttattcgttcattcatgtagcaaatgtttatggagcaccgcccctctaaggctcagtgccgggaggcgaaggtggacatggtggatactgtgagctggaaggaaaggttttctaaagggagctcgaggtagggccgaaaagaagtgaagaattttggtttcactcctaggcggcttctagaaaaaagcaatatgtatgcatattcgtacctacctcccctttggtgtacaaaaatgtagcatattatgctcttttcctgaagatcattccatatcaataactggaggggtccctcacttttaaacaacttttaataacataccataaaactcatccttttatagtgtacaattcagtgttttttggtatattcacagttgagcagccatcatcactacctaattttaggtagagtggtttatggaacattttcatcgcccctaaaagaaacctatgtgaaccaagtatctgagacaagtctcaagtcaatttagaaagtttattttgccaatgttaaggacatggtggtgacagcctcaggaggtcctacaacatgtgcccaagatggtcggggcatagtcagcctttatacatttcaggaagacataatacataagtcaatacatgcaagattgacattgatttgatgtgcttattggccatttgtctcctttggggaaatgtctgttcaatgtctattctggaagggcgggacaactcaaaggggaggggcttccaagtcacaggtagatttaaacatatcctgattggcagttggttacaagagttattatctatagaaaggaatatctgggttatgataaggggttgtggagacctagggttttttggttgtttattttattttattttattttattttattttattttattttattttatttgaagagtgagtctcactctgttgcccaggctggagtgcagtggtgcgatctcggctcactgcaacctccccctcctggtctcctgcctcagcctcccgaatagctgggatcacaggcatgagccatcaagcccggctttttttttttttttttttttttttttgtattttagtagagatggggtttcaccctgttggcctggctggtctcgaactcctgacctcaagtcatccacgcccccctgctcccggcctcccaaagtgctgggattacaggcgtgagccactgcacctggccaggagacctaggttttattatgcagttgaagcctcccagtagcaggctatagagagaatagacaaatatttcttatcagacttaaggtcagtgttgatgttaatgttggaggggtataataaggcatgtccaactctcacctcccatcgtggcctgaaccagtctttcaggttaaattttagggtgtgctggccaaggagggagtccattcagatggttgcaaagggccttctaattttatttttggtttatacccattaacggtcactcctcattcctctttcaccagagcccttgcaaccactgaactactttctgtctctatggacttgcgtattgtggatgctctatactaatggaatcacacactgtgtagtcttttgtgtttggcttatttcacttagcataaagttcatgttgtcatattagcactaatttttatggccaaatatattgcattgtttagatataccatattttgtttatccatcagtttatgaacatttgggttgtttcaactttttggctattatgataatgcttctgagaacatttgtttacaagtttttttgtggacatgttttcctttctcttgggagtgggattgctgggtcacatggtaaactattaacttcttgagaaagtgccaagctgttttctccagcagttgcaccattttacaaattcaccagcaatatttaagagttccgatttctccacatcctcaccaacacctcttttctttttctgatactgagtctcactctatc

SEQ ID NO: 1244317 - DNA, 4001 bp, Homo sapiens
gggctccccacccatccccggatgggtagccagcgtccctcgctgggcaacctggtgtggcgtggccctcaggacacttggggtgtagggaggggcgagatccctctgccgccgcccgcagcgcgcacggagactcgaatcccatcccttcagaagcttcccggcgccggcagactccgagacgaggctgcgcgcggtcacgcccgttccatgcgtgccgggggtcggggggttgactcgagttcatcgaacccagcaagcctcgagatccaacaatgggctcggaaatgaggagcgaaaaaggaaagagaggcgcatgggcgtaggggggaggttgactgaacaccctcagaataaaagccagaaaccagggctgggagcgcagatcacgtaacctctacagacaaagcaaagagcccccgaagaaggtgctgggcgaacgcccccagtgctcacgcccgcagcagcaaaacgccaagatttcagcgctgattgtccccctccctttaatgccaggccccgccctgtcctatgaagcccggccacccggtttggcatggcaccgtaaagacgtgacacgccgaaaaaagatggcacctcgcgttccgagggggaaaaaaaggggggctgggggcgggagtgggaggaggcacagcctatcctcccccttcctcgcccaccagggtccacacccactgccgcagtgaggggcgagccctgcgcgccagccccgcgcctccggcagggagcgcacacgccgggcgccctgcgctccgagcgctgagaaagaaatccgccccgagatgcacctgcagccccgcgcccatccgtgcgtggctgcggctgtgcgtgcccgcgaacggggaccagcggccgccgagtccgtccacatcgccaggccaggtgaaccctgcctttgcgagcgtgcacagtgggatccgcgcactgttctcaggcacggcgctgctcgcgtctctgtgccaggcgtgcgcagggggaagggcaactaaagtgacagcgcgtggacccctccccatctcctcgatttctcccagcccccaaatgtcccctacgggtttctgaaggaggaaaaggggagggggccggcccccgcctaaaatcaggggcagtgaaggccctgtcggaatcactgctcgggaggtgcagggaggggcgtgcagggagtcatcttttctagaacccgatccacgtctttcttagagctgatggcgaacagcggcagggacagcggatttcagattcggtttcgggggtcgttatcggacccctccacacacacacacacacacacacacacacacacacacacacacgcccattgcggcaaaaggctgcagtcgagagtgaagggcagccccctcccccaagtcaccgccgccgcgccccaccctgccggcacagcctccacctggggtctgcgcgaatctggtggtgaagaccctccagcacacacacacgcgcgcactcacgcgtgcgtgcatcccttgctcaggtccctttccaggccgccctggccccagcccccgagcaggggaggcagggaggggccctgcggtggccccgaccgatgcccggcgcacgaagccccagtctgcggagagggagggcgaggggcggcggcgcaggggtgcacagaggcggacggcgaggcagatttcggagccgcggcgcttacctgatagtcgacagaggcgaggacgggagaggacagcggaggaggagaaggtggctgtggtggcggcggcagaaggtgggcggtggcagcggcgctgctgttggtgccggagctggtgggtggcggtgactgcgagggcgcgcgccggcgaagagggcgcgttcctgaggccggcgggcggcgcaggcgcgagcagcgggaacgcgagcctccccaggggagggggcgggcagcgcggcctccgcgggagccttctcctccggccactagtgggcgcgcgcgagcgccctgccgctcggccgtccggcgtctcccggctcgttcctctcggcgctgccctttcgcggtccccctcccgctacgcctcaggccgcggcgctgaccgcagcgcgcacgcgcgttccgtggcgcacgcgctttctccacctcctgtagttggagtctttgtgtcgttgcgggggtgggtgtcctccttcgggccatgcggggtcggggcaaggccagtggctccgccgctgggtccgctgccctttactttcagtcagcctggggcggtgtcctctcctacagaagtcctgagcggccttccacgtggccggccctcgagtccgtccgccccgacccttcgtagtcccgaaaccgcccccctggctaaggtctctttcccccaggctgcttcctttctccttgcttttttcccaccttttttgttactgaccaaggtgaatcctttccttaacaaatcggcttaaagcaagctaactcagttacaatacagtagaactgtacttaaaaaaaaagaaacgtgaatctaaccgttacgtcagaaaaaaaaatcttaaattagacgaatttcaaacagtgcttaacacatcgcagagcatttgcagttatttgtatcacgtcttttgaaacacctttatgctgtaaatagagcttgaagtctgaatgtttaagggccagctagagattgtcccctggaagacgcacctcagcctgaaactgaccagtggtcctcattctgctggtcgcccaggccccaggcttcggccttagcttggatttttcatttccccaacatcaagtttaagcccaagcagtgggatgatttctatgtaggggggtttagggcagccatctcctcctagggagatgggaagttgtcttgaagctccaatttgcatagctcttatattctttttaaaaaatcaacatatgttatagattaatagaaaaagcaagtaaaatgctttattcacacagtttctggaactgacctttttctcctttttttttttaaatgcatattaactttatttttaaacagaggggcatatacccaaagaagtaggagtgagaaccaccatgggggcttgctcaaagcaatctgccctagccttctgactacagaatgtctcatgagccaatggcctggagatggagctgccccttgatggtgtacaccttagaaaagtcagtggaattgacctttttttggagacaaggtcttgctcaggctggagtgcagtggcacaatcgtagctcacggcaagcttgaactcctggggctcaagcaatcttcccacctcagccttctgagttgctgggactacaggtgggcaccaccacacctggctaacttttttttttttttttttttagagaggaggtcttgcagtgttgcccaggctgctttctaactcccacctcagcctcccaaagcgttgggattacaggcatgagccactgcactcagcctggaattgactttttgttgttgttgttctaactgccaccatcctagttcaagacctctatcttggttctggacatgtagggaccttagtgatctccttgctctccagtttctccctatatcagcccaccctgcaacccctagttagatcagtattcagaagtgatcattttatttatttatttttggttttttgtgtgtgtttgttttgtttttttgagatggagtctcgctctgttgcccaggctggagtgcagtggcacgatctcggctcactgcaacctgtttcccgggttcaagcgattttcctgtctcagcctcccagctactgggattacaggcatatgccaccactcccggctaatttttgtatttttagtaggacgggatttcaccatgttggccaggctggtctcgatctcctgacctcaggtgacccaagctcctcagcctcccaaagtgctgggattacaggtgtgagccaccacacctggcccagatcattttaattatgtcactctcttgctcaaaaatatgtaaaagcttcta

SEQ ID NO: 1244318 - DNA, 4001 bp, Homo sapiens
actggcatggcccaaatttatggccaagatatctaagctcacaaagggataaaatggcactgttaataacgacccctcatctatggggtcatcaaagcccccacactattcctgtttgttgtctactgaagctctttcatttatttctacacacacacacacacacatattttttacaactgctgtgtgtgacaagggctgctaggctctggggaaacatcaggatgggacaggcgacatctctaccttcaggtgtatacgttctgcggcattccctcgctcctcctgtttattcagttgtgcagatattggcagagtcaggccgccccggactcatggtgacccagcgtctggtctggtagttatgaaatctcacatggtttatcatctggccctgaacaatggggaaaacttgtgctcgtctcttgggggctattttctctggagtatggaaagttggtcttttgacagtcagaatctgaaactacaatccaatgtgtatttccagtctacacacaaaacatacattttgtctctaagcattttaataatcacttatgggactatgttttaaaagatcacttttagcttttcatctgaatgtgtacctgcatagaatgaagttacctttgcactcttttcagaaaacgatggtgttaaaacaggcagaaggataagctcctgctgctactgtgggaaagagaagcctgtctgaatcttattcaggcagagaccataaagactcataataaaaatatgttaatggtcactaaaggggagcatcccagagtccacttggatgatacattttggttgccaaagttaatatagaaagccggttaatctatcacggctttagagcagggttaatttaaggaggcttctaagtcaagaggcatgaaataactttgtctaaataggaagtagcaccctttgaattacttgctaagttacctctgacttcacaatcacctaccaaataaaggactttaaaatgcctgtaatcccagcacttacagaggccaaggcaggtggatcacttgaggtcaggagttcgagatcggcctggccaacgtggcaaaaccccatctttactaaaaatacaaaaatttgctgggcgtggtggtgcactcctgtagtcccagctacttgggaggctgagacagaagaatcacttgaacctggaaggcggaggttgcagtgagccaagatcgcaccactgcactccagagagagactccatcccctcaaaaataaaaaaaaataataataataataataaaataataaaaataaaattgcctacaaaagtctctcttccttcccataaactctctattacattgtattttacaatatttagaaacatcgtggtgccacatgtaattttttatttaaatacatcaagtcttcatgagattaaacaaatattacgggaaccaagaaaacggtattagtgtcagaccaagaagatggtgggttacctcagtataagcaaacattctctgtgtttgcttgaagttcatactgcactcagtcagtttgaaaaactgaccaggatgaacaagaaacagaaataacagtatggaaataaaactacatgagataatgcttaattcatggatctcagctttgtgggcctactcaaccagatggccacttgaagccaagaatttttccccagcaaacacagagggttggggtgggggtgataataaaatgtgagcaaggcgcatgtttctaaaatagcactctgtattctcttctatcgctcacctttgaactgcttcttaatttaaaacccactcatggttatgcacacttctgttttaagtctttctggtgataatgtcttgtgccaaatctgtgctttagaaatcaacataagaagccatattaagtagggagagagaaaggaggagggagttggaggcaggtggagaaggaaggagggggtcctgccttgctgaaagcaagagcgagtaattcttcttggcctcaaaattctacatatctgtgaaattttaatgggggaatattctaagaactttgtgacatacacgttcttctctagtgtaattttccagtgaattccaaccaagttttcctgactgaggggaacagaatctgattgcagaatgtttttcagtgctctaaaagtcatgcatacgtaccatccctctgttttatgaccacatttgtcaaaagaactgatttgaaggagcctgttcttaataacaatcaaagtcttattggtttcttactatgttctcataagagaaagacatcactaaagttaatatgctgttaagcaataaaggaaatgtaaacaatctaacctcctccttagacggaaggttgctttgaaataaaatctaaatggctattgttaataccggacaatcaggctcgaaaattactccctttccacaattaggtgattggagaaggatttcaggagaccttattcaaccttttccccaattgattaatttgtaatgtcagacattataggatttgtttaaatcttagctctaaaaaaaactttgcattttaaagtcttagcttataaacatgtcttgagtataagcaacaaagtttacgatttgggcccaatttaagaatactgtgactgcagagaaaaagggggaattggttgggaaaggtaaggagatctttcaactcttccagccaatttggcttaagagttgggggcggggtggagggtggggaacagacttgtgtttggcggtgactcttcattttactgtgaaactaggagagataggtggtcacatttcgaccatcaagcccagaagagaggagaaactcaacgtgtaattgggaaactctgggggaggaaacgtcacaggtttgacaagcaattcagtgccatcattaataacaatatccagccagagaaacataacgagaccccttctttacaaataatttaaaacattagccagacatggtgttggcctgtggtcccagctaccaccgggaggctgaggcgggaggatcgcttgagcctgggaggtcgaggctgcagtgagccctgactgcaccgctgcactccaacctgggagacagagcgagactccttctcaaaaataaacaaaatcaatatcgaccatttcgcattcagaagcccagtgggccatggtctgtgtataccttttctgaccagtggcgtctgcaggaaagaatgtgggtgccagtgagcaaaggttcacggtctcccccaaacctgtccctctgagacagaaaaatgctggggctggggtcagccgaggggaggggacggccaggccaccggatgtcaggcccggtttccctccagaatcttgtaagtcgaaagggaaggttgtcccccatcctgggagaactggagcggagcggcgggggcgagggggccgttacctgtgggtctgcccttcctcccctgccggggctacaggggtcgaggggctgggcgggcgggccggtccagggcgcaggagccgcccattaattgcgcggggacggccctgagctcctcttcctcctcctctttttgcttcttcactccctacacctgcccctcttcctcctccttccccgaggctgctttccgcggcgccggccggccttgcctggggcggaggcggtgggggcggctaccgggcgtcctccggtttccctagcaaccgcgcctccccgcccccgcgcgaccaggtgcagccgccgagagcacggggcggggcggggcggggctgtggccccggggtcccaagccagtcgtgggcgcccgccggttgccgtgggaacgaggcgggctgcagtcggggagtcagagccacgctggtgggcagagaagagatgcccaaggaggaggcggttggctttgtctgggtgcccaagcccagacccagatatccaggcctctgctcccttccctgaaagggtgctgtgcttcataaaaaatgagattagaaaacgagagaggaaaatatttttaa

SEQ ID NO: 1244319 - DNA, 4001 bp, Homo sapiens
aggcgcatgtttctaaaatagcactctgtattctcttctatcgctcacctttgaactgcttcttaatttaaaacccactcatggttatgcacacttctgttttaagtctttctggtgataatgtcttgtgccaaatctgtgctttagaaatcaacataagaagccatattaagtagggagagagaaaggaggagggagttggaggcaggtggagaaggaaggagggggtcctgccttgctgaaagcaagagcgagtaattcttcttggcctcaaaattctacatatctgtgaaattttaatgggggaatattctaagaactttgtgacatacacgttcttctctagtgtaattttccagtgaattccaaccaagttttcctgactgaggggaacagaatctgattgcagaatgtttttcagtgctctaaaagtcatgcatacgtaccatccctctgttttatgaccacatttgtcaaaagaactgatttgaaggagcctgttcttaataacaatcaaagtcttattggtttcttactatgttctcataagagaaagacatcactaaagttaatatgctgttaagcaataaaggaaatgtaaacaatctaacctcctccttagacggaaggttgctttgaaataaaatctaaatggctattgttaataccggacaatcaggctcgaaaattactccctttccacaattaggtgattggagaaggatttcaggagaccttattcaaccttttccccaattgattaatttgtaatgtcagacattataggatttgtttaaatcttagctctaaaaaaaactttgcattttaaagtcttagcttataaacatgtcttgagtataagcaacaaagtttacgatttgggcccaatttaagaatactgtgactgcagagaaaaagggggaattggttgggaaaggtaaggagatctttcaactcttccagccaatttggcttaagagttgggggcggggtggagggtggggaacagacttgtgtttggcggtgactcttcattttactgtgaaactaggagagataggtggtcacatttcgaccatcaagcccagaagagaggagaaactcaacgtgtaattgggaaactctgggggaggaaacgtcacaggtttgacaagcaattcagtgccatcattaataacaatatccagccagagaaacataacgagaccccttctttacaaataatttaaaacattagccagacatggtgttggcctgtggtcccagctaccaccgggaggctgaggcgggaggatcgcttgagcctgggaggtcgaggctgcagtgagccctgactgcaccgctgcactccaacctgggagacagagcgagactccttctcaaaaataaacaaaatcaatatcgaccatttcgcattcagaagcccagtgggccatggtctgtgtataccttttctgaccagtggcgtctgcaggaaagaatgtgggtgccagtgagcaaaggttcacggtctcccccaaacctgtccctctgagacagaaaaatgctggggctggggtcagccgaggggaggggacggccaggccaccggatgtcaggcccggtttccctccagaatcttgtaagtcgaaagggaaggttgtcccccatcctgggagaactggagcggagcggcgggggcgagggggccgttacctgtgggtctgcccttcctcccctgccggggctacaggggtcgaggggctgggcgggcgggccggtccagggcgcaggagccgcccattaattgcgcggggacggccctgagctcctcttcctcctcctctttttgcttcttcactccctacacctgcccctcttcctcctccttccccgaggctgctttccgcggcgccggccggccttgcctggggcggaggcggtgggggcggctaccgggcgtcctccggtttccctagcaaccgcgcctccccgcccccgcgcgaccaggtgcagccgccgagagcacggggcggggcggggcggggctgtggccccggggtcccaagccagtcgtgggcgcccgccggttgccgtgggaacgaggcgggctgcagtcggggagtcagagccacgctggtgggcagagaagagatgcccaaggaggaggcggttggctttgtctgggtgcccaagcccagacccagatatccaggcctctgctcccttccctgaaagggtgctgtgcttcataaaaaatgagattagaaaacgagagaggaaaatatttttaatggaatcagggaatgtgaaaagcggtacatgcgaagaggaaaagatactgcagtcctggagttcgacctctgcagaggacatctggaatgctctggtccaacacgaaaaagaagaaataagcgatgaagccaggcacccagtcagtggcagaaccgacattagagcccaggcctcttcgtaatcagtcgtcttcaccccctttccaaggagagaggtgcttagaggcctagaccaggccctacagctttggagccagggcaccagaaccgctactaccctcaccttctctgtgccaggttgatttctttctttttcttttcttttcttttcttttttttctttctttcttttttttttttttagacagagtcttgctctgtagctcaggctggacagtgcagtggcacgatcttggctcactgcaacctctgcctccggggctcaagcgattttcatgcttcagccgtccgagtagctgggattacaggcatgcgccaccacacccggctagtttttgtattttttttttttttttaagtagagacggggtttctccatgttggccaggctggtctcgaactcctgacctcaagtgatccgcccgcctgggcctccgaaagtgctgggattacaggcatgagccaccttgcccggctttgccgggttgatgtctgtctgtggttctcatgggcaaagatgactcccctatttactttgcatatttaggctctcaacttgtcaactgatgtcaagttagggtatttttgattgagtggagagtaaggtaaaggaagaatagaaattcttggaactttcatcagtgcccggaatccctaggtgtctgtggtttgaccgtcttctcaacacctccccttccccccattcagttggtgccaagtccttggcagcgtcacattcttctttctattcttatcactctagttttgggctccatgacctagttttgggctccatggattattctgagggcctcctggtcacaccctgggcgcctgtcctccacaccctatcttcaccatttcccccatcctataagcagcctacatctaatgttgctggccccctgcttaaaaagccctgaaaggttcctcaccgcctgtggaatgaagtccaaactcgtcactatgactttccctgtgccctcccccacagtttcctttcttggtttttccccttcatcacttcttcactcatacttcagccagatgggactatgtgttacacactgaacatttttccttgccttcacaccagcttcaaagacatatcatgagctgggcagagtctagacaaatgtacttagctgaagtctttccactgggcactttcccatctgaacttcgctggtcctccagcagaccctaggatcttttcatctctagtagcccagtccatattctgttcttgttctcagctgattatcaagtattccttagtaaagcattaactgataattgaagtattaactgataaggatgtaacctaagaacttgcctcatggtttttgcctttcaaaaggatatgctttgggccaggcatggtggctcacgcttgtaatcccagcactttgggaggccgaggcagggggatcacctgaggtcaggagttttgagaccagcctggccaacatggtgaaaccccatctcaactagaaatacaaaaattagccaggtgtgctggcagccacctgtaaacccagctactca

SEQ ID NO: 1244320 - DNA, 4001 bp, Homo sapiens
aaatgaaaaataaaataacagtctaagtccacaagagcaaagcaacagtctctaagttataagaggaggagagaaaaattgagtctaaccttttaaataggagactggggcttaaggtgaaatttatttgctggcttttaaatcacatgcattatttctacattatacctgttatgtcttgacacccacttcaccacattagagagtaataggtatatccaagattcttaggccaataaaactacttttagaggcagcatagctcaccaaatgaaggagaatgttagaaaaacacccagtgacaatagtttcaactatctcaaccacccagtgataagtactggtgcatgctaatataaggagaattaaaaatattgtaaactctaaacaagtattaaaatggttcgtaaatttcaaatctcataaaagatagttacttaaaaaaaaaaaagaaggagtaaaagcatttggaagagaggcccttggaggaaagactagcttccgaggaacacaggtcaaatacgggtgtgggcggtaatcatctaatcatccctctaccaggtgatgcttctaaccacttcagttttagacatccttagaagtgatttaggtaataaacaaatgtgttttgtgatacaagaaccacggagatgacgctgaaatttctaacttcaaaaagatgcactcctaagagaaaacaggcacgaaattcccatattgtaattctttagcttcctgtagaaaaacatcttcaggcatgtaagccagcacacttgacactgacccagcaaagttttcggctagccctcactatctctcaaccccccttcctccacttccctgctgttctttcttggcacacaaaatataggccaatgagcagtgggtgggtgaggaggatgtgagagaaaatttgagaagtaaaaaaaggagcaacttaaccaggacatgaatgagactgaagggtctaataagggtaggcagacaacaattagaactactgaaatatgggctttcctgggcagtagtgagctctcagtgcttttaggggtgtaagcagggttcagactacctaccacttgtcagagaggctgcagaggggacggctgctttggatgacctctaatgtctcttccgactctgaaatgttaggattcttatttcacaaaggagaacgcaatggtcacagaagtccaccgacttgaaacccttttaaatatgcagccttggaggctgcttcccaaacaccactcccacctctcccgcacgtgcccaccccgccccctttcaatatttccacctccacgtgcaaaccgcctcgcggcactgcccccaaggcagatagacaccttcccctgcaaagcaacgaaactgtgctccccctccccgccaagaagagaggactactccactctcccaccctgggtggctaaaaaaggaaaagtctcggatccagcctttcccccctagccagagcagggggcgggggcaggacgcagagaaaaactttcttctcgaatttttcttccaaagggtggaggagatggagagaaccccaacgagtccaaggctgacggggtggggggaggggaacccctgaatcgtttaacggctggaagggggaggggggctccggaggttgagagggcgtgggatggagaagcaggccagggagcggggtcagggagctgcggggttcctggggtcggagagctgcaggcgtcccccccacctggcacacaaagcggctgccgcgctcggctctcaccagatcctttgtgttttccatcagggcctcatgggtaggggttgtccgtgctccccgagcccgcggcgccccctccccgggctgggggcaggtgcctctccccgggactgcggcgactacagggggcccccggctgggcccagaccggtggcgggtgcagcagcccccggatttcccccctttaactcgggtggccccaggatatcaacaacattagcatagccctccctccccagcgcgcctgcgccgtgacccgcgccccgattggcccacttccctacataccctcctctctcgcttccaccgtgggaccctctgcaggctccgtactccaaggaccgtaccaagacgaagggtggaaagcgtattggggcttgtgtcaagtcaagtggttacagccaagaggaaaagcagaagttccattcagccgtcccagtgtatagtcggggtttcttgcgctcctttcaatatgttgcagctgcgaaattgtgttggaaaaattttccactccagtcacgccgcttccccctacacccggaagattggccctcccggaggaactcccacacggggcggggctgggtaggggagcgggagttacgtagagggagggagtgctggtcacgtggcaagaggctgcgcaggctccttccggcccccggggcttcggcggcggcggcccgcgaggggcctgggcgcatgcgcagcgaggttccacgtgagcgcctgcgtttctcctcaaacctaacgatgccgccggagcggaggagacgaatgaaactggaccggagaaccggagcgaagccgaagcggaagcccggaatgaggccggactggaaagccggagcggggccaggcgggcctccccaaaagcctgccccttcatcccagcggaaaccgccggcccggccgagcgcggcggccgctgcgattgcagtcgcggcggcggaggaagagagacggctccggcagcggaaccgcctgaggctggaggaggacaaaccggccgtggagcggtgcttggaggagctggtcttcggcgacgtcgagaacgacgaggacgcgttgctgcggcgtctgcgaggcccgagggtgagggaggccgcggcgcgcgggctgggcgcactcgggcggggcgcgcggtgggcggtgaagctccggggggcggagcctgggcgacctgcggcggcggggagcgctcaggtgggagggagcccgagaacgcgggcgcggagggtcgcagctgcgggtccctcgcctccctgctccagactgaaagtgcctggagggcggggaccgcgtctttctccgcccctggaggcgccgctgctcgggtatctgctttgcgaactgtggtcgtgagcatctttcgctgctgctcgactccgctagcctcttcccaaactgagggtggtcttttgatcacctgcctcagttccttgtgattcaggaattcgatttcgttgatggaatcaattcgtgggcacgggcctgggcatctccgttgtaactatgtccccatgtgactatgagacccaccatgttttgagaatgatcgtgtattccgttcatttagcaaatattggtgaacctgttagttgccagataccctttctggcaatggcaaaccctgcgtgattgatcatactttttgcacacattttgctatccctttaaattctataccaggcttttcttgagagagtcccggacattgttctaggcactggaggagacacagcaatggacaaaactgacaaaaatccctgccttttggcgcttgtgtgctagtggcagagacaagatagaggagataaacgagtaaacttcaggtttgttggtgacaagtgctgaagagaaaaaaggacattcgggaaagggagatgggcgtgtgtagaggcctgtgaaattttagataaagggggcagaggaaagctcaccgagaattacccaggccatgtttattacacaaatgctgacctagttaatgtcagctgcttaccagagccgccttcgggtgcttgtaggagaagtggcagcaatctttttgggaagtacagaactattactggaaacatgctgaactgtgcgacggttttgtcgtctggaaaaggaacagtgtacggaggtgggagctgttgggtttgaaggctattagactagtagtagagcaagtagaaaccacttggacatttctatcattggttttgggaagctcaaactcacttcaagg

SEQ ID NO: 1244321 - DNA, 4001 bp, Homo sapiens
gattcaggtaatcctcccacctcagcctcccaagtagctgggactactggcttgtgccaccatgcctagctaatttttgtatctgttgtagagacaggcttttgccaggttgtctaggctggtctccaacttgtgggctcaagtgattcgcccgcttcggcctcccaaggtgctgggattacagccttgagccactacctggagctaattttttattttatttattttcaattttttttctttttttttttttttgagacggagttttgctcttgttgcccagactggagtccagtggcactatcttggctcactgcaacctccacctcccgggtttgggtgattctcctgcctcagcctaccaagtagctgggattgcaggcatgccactgtgcctggctaattttgtatttttagtagagaaagggtttcaccatgttagccagtctggtcttgaactcctaacctcaggtgatccgcccacctcagcctcccaaagtgctgggattacaggagtgagccaccacacccggccttttttttttttttttttttttgagacgaagtttcgctcttgtagcccaggtaggaatgcaatggcgcagtcttggctcaccacaacctccacctcctgggttgaagcaatcctcccacctcagcctcccaggtagctgggattacaggcattcaccaccacgcccggctaattttgtatttctagtagagacgggttttctccatgttggtcaggctggtctcgatctcccaacctcaggtgatccacccgcctcaacctcccaaagtgctgggattacacgcgtgagccacagtgcccggcaatttttttattttttttgtagagacagggcctcagtatgttgcccaggctggtcgcgaactcctgggctccagggatcctccagccgcagcctcccaaagcgctgggattacaggtgtgagtcactgctcccggcctcacctttcgacctctgctccaaaacacactctttgtttttcttgagaaacctgctgataaatatctgtacttcgatgctccaacactttttgagcgactattacgtgccagaaactatacaaaaataatcaggcaaggactctaatctgcaaagctcagaggaaactggagaagataaacaataacacagttcactgtatcaacagaactatgcccaaaatgctaaggcagcatcttagccggagtgtggaactttagaaaatcttagtaaagttccacagaaaagttgtttttctgcagttcgtagttcggtcaataaaagaacgaaattcagcgcactttaaaaatacacaatggcacaggatctgaacacttgacattgtagagaactgctggctgctaataaatataaggacctaatcatttcattgatgccaaaatagtctccagtacgtttacacacagccctaaatttattcaggcgtctcttctggaacgagatgtaagctgattttgtattcatttgccccgtctcccaccactttaggccaaaagtgccctagtcgagcatgaaatcttcacagaagttgagagtccccatcgccctaaagtcgaagctctataatcaccaaggagggtatagtgacaatctaaaactaatacacattccctctcctggactctatgcccctaaagtggcccccatgggacatctgcaagaacctcctctcacaaactggctcccccagttgtgtcccgccccctcctttcccctacagtcacttaccctcggtttccccctgagctttcatcctgaaggcgaggagaagctagatccgccacaaaaggataagcccttccccaccactaacggaggaaacaagttggctcgggatcccgggacgcagggcaccagcagtccctactcttcccgggaaggatcaatctgaagtccccggcggcaagaagagaagggtgctcgaggccgccgccatcttccccaacggaacttcccaaaattcgcgagataaaccgtggtcctgccagagagaggaagaggacagggcatcgaaatctcgcgaatattggtcaatgcgtcggcctcgcgagatttctttcagcgcagtcttccctttgatctgagctgtctcaggcctcgcgccgctggatattaaacctgccggccggtagctttcggctcccctgcggaaaccgccattttttttttattttagcagttaaacagctcgcaaattaaaatctccagatccctgtactgaaagactagcttttcttttttttttaatttttttttttttttttttgagatggagtcttgctcttgtcgcccaggctggagtgcaatggcacgatgtcggctcactgcaacctccgcctcccgggttcaagcgattctcctgcctcagcctcccgagtagctgggattacaggcacccgccaccacgcccagctatttttagtagagacggggtttcgccgtgttggccaggctggtctcgaactcctgacctcgctgtccgcccgcctcggcctcccaaagtgctgggattacaggcatgagccaccacacccggccatgactagattttcaaaggctattggtatcaggagtgtcttatgaaagataagtttaacctgagatactagatgcaataattacatcctaagaaagatagtggcgcattgtaacatgacgttcaaagcgagcctatagcacagttaattccccttttctcatttttttagtttcaaaactatttctggctaggcgcagtggctcatgcctgtaatcccagcactttgggaggccaaggtaggtggatcatcaggtcaggagtttgagaccagcctggctaacatggtaaaactccgtctctacgaaaaatacaaaaattagccaggtgtggtggtgcgctcctgtaatcccagctactcgggaggctgaagcaggagaatctctggaacccgtgaagcgaaagttgcagtgagcagagatcgcgtcactgcactccaacctgggtgacagagtgagactgtctcaaaaagaaaaaactgtatcctttactatcctcaaactaagtgttcttcacttagtaagcatctgtggagtcctaatatgtgtatatttggagctgctaatacaaacatgaaaacacggctggtcgcggagctactcaggaggctgaagcaggagaagcgcttgaacctgggaggcagaggttgcagtgagccgagatcatgctactgcactccagcctgggtggcagagcaagactctgtctcagacaaataaacaaacatgaaaacacaaccctagcgcttgataggctaatcttatttagagttccgaaaatatgattggtcactataatcataggggctcaaaattttttcattaattattatgccctaagtaccaatgccagatacccaactacactttatcatggaaactctatacaaataaaaaaaaaagtctgtactaagtgttgctaggaaatttttaactttataaagcttataaataaactttactaacttctggttacagaatggaatgagaagttatcatttgtcatctgaaaatgcagatgagagacaccattggaaaagttctactctagaagataagagagcaatgtcctttgggaggctgaggcaggtacttgagatcaggaggtcgagaccagcctggccaaaatggtgaaaccccatttctactaaaaatacaaaaaattagccgggtgtggtgacacatgcctgtaatcccagctactggggaggctgaggcaggagaatcgcttcaatccgggaagtggaggttgcagtgagccaagatcgtgtcatcgcactccagtctgggcaataagagcaagacggagtctgaaaaaaaaaaagaaagccatgtcattaaacaagaaaagtattcaaggtacatataggaacagtatacataggaaaatgggtacaatgggcaaattgtaagtgactaagctttgaagga

SEQ ID NO: 1244322 - DNA, 4001 bp, Homo sapiens
ctgagcctgtcagggtgtttctggagtgcagagcaggagcaccctgctggagaggccaaagcatagctgtgggcaggctcgggcttcagtttttccatgcccaccatttgcccctttgtcctagggtactttgaccagcagggtatgttggtgctcatactccccaccctacatgttcccaggttctgtcccatggcacaggtgatggtctccctctcagctctgggtccatctccctggcctagttctccagcatctgctcacaggttcgagccacatcactgagcttgaggcgggcatagtccactcgcttcagagccatctgacagtccttcctcgaagagtagctggagccctcatggggctgccctgtggccacctacaagacagactatcaatggagcaccatctcctttaccctaactccaaccaggcatcaggtctcgtctcatttcttccctgagtttgaatttgttaggccatctggtagctgggtaaataaatcatttaacttatgttaatcttgtctgtaaaatgggggtgacaataactacttcctagagttgttgaggattagataaagtaatgcagagtatctggcacaccgtaaaaattagtaatggtagtggtccctgcgacgatttcagaaccttctcaatcctgtccctcttctcaggatataaggatttgggacctcgtggcctggaggtcaggccaagtttccagtgacaaagttctgtagttctagcattatttacacatcttctgctaggcacatgtgatgttacccagtgaggtatgcagggccacctttaattctttcattttattatttattattttttgagacagagtttttgctctgttacccaggctggagtgcaatggcatgatctcggctaagtacaacaacctccgcctcctgggttcaagcgattctcctgcctcagccttccaagtagctggggttaccggtactcaccaccaagcccggctttttttttttttgagacagtcttgctttgtcacccaggctggagtgcagtgctgcaatcttggctcactgcaacctccacctcctgggttcaagcgattctcctgcctcacccttccaagtagctgggattacaggtgcccgctaccagcccagctaatttttgtatttttagtagagacggagtttcaccatgttggccaggctggtctcgaactcctgacctcagatgatccacccgcctcagcctcccaaagtgctgggattacaggagtgagccaccgagcctggcctaatttttatatttttagtagagacgaggtttcaccgtgttggccaggctggtctcgaactctgtcaagccactgcgcccggcccattctttccttttagaggaagaaacccgctctggatggccggctggggaggtctggtcctgcccagttaatgctccaccctggatcacccaagcctgaggctttgacccagagctggggttcgctcgcagaaccccccagacacaccgacctgggtgaggtagcggatctgagctgacagctccgcctccacgtgttgcactgaagcggtgaaggccgccgcctgccggtctaggagccgctcgttagttttttccttggacaattctaggatcacagtacctgccagggcggagagagggcggggacacacggagactgccagtgtagcctctccctaggccagcccctctcagtcccgccctttcgctgcgcacgcacgtaggattccctccccaaccctgctccaagtcccaggtcaggctgccagtgcagcccggtcacgctttcgctccccgctgtccaggttgtcgcatcccgaacctgcattctgaaggatggcgccgatttcccgttcaatgtcttccagagcgcgtagtctctcgttcgccaggctgtaggtagccattatcactctgggaattctcaccaagagtttctcctcagaaacgcgacgcttgttccggaagtggctctcggtgtgcgcctgcgcagagggcaccgtgtagcgagcactacgattcccaggatgctcagcgcagcctcgcctcctcggtccgcttgatgaactacaactcccagggcccgctgcgcctcagccacaggaccacccgtagtcagaggcgacagtggaatatcccctagcccgaggccattcagacctgtccatcttcttgacactgtctgtggcctctagtttattctacacaagtttatttatttatgagacagtcttactctgtcgtccaggttggagtgcagtcgcaagatctccctccctgcaacctccacctcccaggttcaagcgattctcctgcttcagcttcccgggtgcctgggattataggcgcccgccaccacgcccggctgatttttgtatttttagtagagacggggtttcaccatgttggccaggttggtctcgaactcgacctcaagcgatccaccctcttcggcctcccaaagtgctgggattacaggcgtgagctgaatcttaaaggtgaactacgtggatgaaagcttgtagtggaaaagggagacggcataggcaacagcatggtgctgtgacgggaacagcgcatgtggagtccagcaagggattctgcctgcctggagtgaacggagcgtggtgggggttaggtatgacaatggtgaggctggagagaggagcggaatcaggaaaaggcttgcaagctatgtactttggacttgagtctgaagacatttgagcctttaaagggtttttaagaagtgtgttatgaccagaattaccttttttggaaagatcgtttgtaacagtttatagtagattatcaagaatgaaactagtttgcccaaggttagcacatgaaggttagactcagttaaactgaatggtctagcctggggaacatagtgagatactgtctttataaaaaaatttgggggctgggcatggtggctcactcctgtaatttcagctctttgggaggctgaggtgggaggatcacttgaactaaggacttcgagaccagcctgggcaatatagtgagaccccatctcctatatttaaaaaataaaggctgggtttggtggctcacacctgtaatcccagcactttgggaggccgaggcgggtggatcacctgaggtcaggagttcgagaccagcctgaccaacatggagaaaccccgtctctactaaaaatacagaattagctgggcatggtggcgcatgcctgtaatcccagctacccaggaggctaaggcaggagaatcacttgaacctgggaggcggagattgcggtgagctgagattgcgctgttgcactccagcctgggctacaagagtgaaactccatctctaataaataaataaattcaaataattttttaaaaagtataaattaaaaattaaaaaaaatagccagtcttggtggctgatgcctgtattcccagcttcttgggaggctgagataggaggatttcttgagcctgagaggtcgaggctgcagtgagccatggattgtgccactgcactccagcctgggtgacagaacgcgaccctgcctcaaaaaacaaaaaacttgatgggtctggcatttgacttaatccttccctaaatgctaataaaataacagaaagttgctttttttaaaaaattttattttttgagacaaggtctcactctgctgcccaggctggaatgcagtggctcagtcatggctcactgcagccttaaactcccatactcaagtgacctctcacttcagccttctgaagagtcaggaccatagatgtgtgctaccacatctggctaatttttaattttttttgtagagacagggtctcattgtgttgcctatgctggtcttgaactcctggactcaaaggatcctcctgccttggcctcccaaagtgccaggatttcaggtgtgagcgtactgtgcctggcctaaagttgttttaaaaaggagtcaaagggagaggagtt

SEQ ID NO: 1244323 - DNA, 4001 bp, Homo sapiens
taattcctgtcaagtcagcctgaaggaaagaaagcattaagttttattactgcatattcactcaaagtcaaaagtactcaatatgatgtctcttatttcattaagacattacaatttttcaatgtatgcttgagatattgactgcaaattagaacaaaaaaagactttataattcaacaaccaagaattttagggagaagaatacagttaaaaattaccaccaccatgtcactgaatagcaagcaaatatgtactccaagtagaaacagaagaaactgaatgatgttaaatatagacacacacttcaatatgcaaacagagtacatttttctctgtcctaactggtcacatttgttcactggtgtcaaacttttaactgaaaatcaattattaaagaccctatcatgggtttttattccacatttacagaagtaacgtctctaatgaaaagacatctgaacaagttctgaaaaaatctatgttaattcttcacacacacccctgtcggaaaagtcaaatagctactcacaaagaactgtcagatttgtgctagtctatcttcaaagaactgatcctaaaagtaccaaaaatagactgagttggataagatagaaatataaaacctggtgtatgtcttattacatgtgaagagatgctgattaatggacattgaaaagaaaaacatactgtagacgaggatagagtattaaagatctcaatttagcatgggcgttaagaaattcgacaagaggaattcagtaatttaatctaacttaaaggagcaaagcataaggtgccaaaaatgaaactgctgatacatgactggcagtttacacttgccaactagttgtgctcctcccacttaactcacttacctatcatatactcttaatatttctcatagcacaaaggagaaaatgaaaaagtaaagtcacccaaacttaaagtcattgatgaagctcagctactgtcccatacaggacaagttatttgcaacagttggtacttctgaaagccttaactgttggatgttaccagacctgggctaacctacacaatgatcatccctacatcccgcttctctcgactttccatttcaatcaaacaagggagcagcctgctcaaaacattctgaaaaagcaaccaaaacacaataaatatagaaacagtgcaaaaccacagcacctcgtccactagcccccttcactctcacaaaaacatcatgttctaataaaagcaagatggctagaaattgtcaaaaatggcaaactgttttcaaagtttaaaaagaaaacatatgaaatggcacctactggcttttacagagagatcttaagtcacccaagaaagaaactaacctggcgttagtttgactcatacaaaaaaaatgtaaaaccaagacaggtttctagggcttaagttctggggtcctgtttacatggggaaaccaaattaaaagggtaagacataaaggcggtggggagcaggggcaataatgtaaagtgtgaagcagggatacagggccaataaggagaaaagcaacagttaagcaagacaagagggaaaggttactgtcctgccagataaggagctcaagttgaggacgagactacggtgagaaggagagtccgaaacaagacgagaaaaaatgccaacactcccctaaacagagcccgggaccgtaggagagcgaacgccgcctcccggggctggccgcggagcttcgcagggcgccggctccggctgggcctcgcccgggaactcgggcatctggaccagacccggccccctcccccacggcccaagggcgcacctcgcggcccccctccctcggcgcccgccggccccggcactcaccaggcagaagaggttacagtgacaatcttccaggctggccccgttcggcacgaaggaggcactcatcgtccctcacagcagccgccgccggcgccacaacccaccatccgccattaccgccgcctccgaccagagagagaaacacagacaccggggagggccggggggggggtagtggttgggggggcggtggaagaggaggccgccgggcgcccgccctccccacccacccccccgccgccgccgccgccgccgccgccgcgagcagcccccgccgcccggccggcacccagccgcccggggccgagggccggaggcgggagggccgcgccgcgctcgcctggcgggccggactgcggatcccgcagacgctcgtccctctctgggggacggaggggatgtgtgcccctaccacaagaaaaataataaattacacaataaataatcaaaatcaagtccgagacggcagagcccaagcccaggacggttctcccgggcggagaggcgcccgcacaggagcgggaagggcgagaaccgggagagaagcccaggcccccggcgcggcagcggcgatgtccttaagcccagagtctcctcagcggcggaggtggtggcggcgtctgcgggctcagaccattctctggctctgtcttcgtgtcgttcctgggccaagccggcctaaagtttgccctcctgtggcctcaccggctggacgccgtagtctcccccattttgtgggcccagcgggcggtgtttttccccctttaatccgaattcacgggttttcccttcgctttaatggcggccacagggaccagctcgccctctctgctcacccattggccgccttgaggtcacgtgggcccgggctcggttgggagggggagagagaagtgagcgagggagggccgggaagctttcggcggaggcggtgagctcgggggacggggcagccagctggtggccactaacatagcgccatctgctgggtgccccggccagtataaaacgacccggggccctggccctctctttgcggggaaatttacagtccaggaaggttcatttcacaaatcagtgagaattacgtggaaatcagtttgagttctttggaagagaaagtattggcaaaaattccaagacattctcatttatttcgcgaggccgctggggtgcaggtgcaaacctctggatttgggagtcagatgatctggatggggataagactcctcaacctaaaagttgtgatatgaagatataaatttaagaaacaaaatattgccctgtagttaatagactgggaattagagccacactgcctgggttccaagcttgagcaaatcacttcctgctctgtgtctttactcatctgtaaaatggggaaaacatatcccttaccccacaagcttattgtaatgagttaatacaaattaagcaggtagcccagtgccccgcacagataagcactgttaagagttaactattattgttgtcatcattacctcatatagttattgtgacgagcaggagaactagtgtatgtaaaggtctcactatttttttgttgtttacttctgtctctctagtgcctaaaaaaaggttcctagcacacagtaggtgcttgatatttgtatagttacaaatgaatgggtggtaagaagtaagaaccaaacaaaaggtttattctctttcccataaaacacccagtgcttggatgggttacacttcaatatgagttcaaaacagtttctctgacggttttaggattgcaagaaagaaagaagaagaaaaagatgattcagaagttagaaacatcagtgagttaggacttactgtaattttatgtattacagatacataattatgtattatgtattacagatacataattgtatctgtaaaatgaatggtagactcttccatgtcacttcttcagccacggaatgaaaagaagtcctcatttatccacttgttcatctgtggtggtgaagagcccagatctgaagcccaaagcctggagaaaaagttctgcccctcactagttagtcttagatcatatttgaccttagatcaaattaattttgctttctctcggttattgtaaaatgggggtaataaaagtacttttcttctaaaatgactgg

SEQ ID NO: 1244324 - DNA, 4001 bp, Homo sapiens
tgttgcccaggctggagtgcagtggcacaatcagtgctcactgtagcctcaaactcctgggctcaagcaagcctcctacctccaccttctgagtaggtggggccacaggcctgtgctacctgctaccactcccagcagaataagtgaatgtaatattcatcacaacaaatgaagtattatttttatgagaacactgaaactcactgaaatgatctgttcaaacagatcaatctagaatcttactctttcatctagaaagagtaagctgacaattgtacaactgcaccccaaattgtgtttgtttgtttctttcctgagacagggtctcactctgttgctctggctggagggcagtggcaggatcatggctcattgcagtctcgacctcccagggctcaggtgatcctcccacctcagccttccaagtagctgggactacaggggcaccaccacgcaggggtaactctttgtatttttgggtagagactgggttttgccatgttacgcaggctggtcttgaactcctgggctcaagcaatccgcctgcctcagcctcccacaatgctgggattacagccatgaaccaccggggcccaaatgcactccaagttttttacccccagaactctcacttcttggtgggggtttgcgggaagcttacctgggaactaatggcatacttcaggtaggacaagatgagaggattgggggatggtccaatcatggcctgctctagtaacgcatctgcaagaggaatagcaaaacacaactgagtgattacaacttctctgggtttatccctcccatctttctttcccagttcacttgagacctgccaggttgagaatatcccaggtggctcctttaggaaagaatttcttcatgttgattgcccattggtagtcactccagcgctccttccaggcttgcaaaatggcttgcttcaggttgaccaccttcattatttcactctgagcaggtggcagcggtggcggccagctttgaggtgaaagaaatggagctaaagaaaaggacatgaggttctaaggagaaccggggaaggcagaattaaatagaaaggagaagatgcgggaagatttaagcgagacagaggaatttgaaagaaaaagagctaaagggataaagtaagatcctgtcagactctctcctcctgaaccgcccttccttaaactggggcactaagaaagtatcggccgagcgcagtggctcgcacctgtaatcccagcacttcgggaggcagaggcgggcgaatcaccggaggtcaggagttcgagactagcctgaccaacatggagaaacctcgtctccactaaaaatacaaaattagccgggcttggtggtgcatgcctgtaatcccagctactcgggaggctgaggcagtagaatcgcttgaacccgggaggcggaggttgttggggtgagccgagatcgcaccattgcactccagcctgggcaacaagagcaaaactccgtctctcaaataaatgaataaagaagtatcaaagggactaatagattaaacagggcatcaaggagttaaggcagtcctggttgcctaattacgcccttagctctaaaagcgtcccttggccaccaccattccaagtccagatttgctccctcatttcctccaccttctccagccctgtaactatacctcccaatttccttttcatccaccacctccccaaatttaagcctaccgcacaatccagttctaggtggtaggcatcgccattttggcacttgtcaagaagctcactttctattggctgggagtaacaaacgccaaccaatagaaatgcagcaaggaacgccccgctgtcttctgggaatggtagttccttggactgaaaccgtatttgtctgcgccggcgaggaaactaagggactcgtctagtcggcccgcattgttcttctcctttaagggaggacatccaggagctgaggcactacagagactcagggactcgagggagctcgaaaggccgctcacaacccggcgtcgcccacgacgtcactgtcgaccgggcttctccatcatattccgacaccctttcattcgttagcccctagttagtaggtgcggcaagggtgtggcgtgggggcaagggtgtggcgttcagcaataaggtctttctcctttcctgggctctttctgttctcctaagcccctggagctaccagagctattctcatttccacaactatattctaaaagcgacaccgaggtgccttagttgcacacatatcaccgtccccgaatcttacagtcctatcagaatctccaggccctccatacagcttggatacaagggaaagtaaagaggaaactaaggtgaaggtgatcaaaatcaaaggaattctgagaaactgtcacaactaagagggctaaggagacctgatgactaaatgtaatgtggttttctgaatgcgatcatggaagagaaaaagaatactgggtaaaaactaaggaaatctaaataaagggtggactttaattaataataatgtatcaatattagttcattagttgttacaaatgcataatactaatgctaagatgttaataaaaagagaaattgggtgcagaatatgtggggaccctctattaccttccatttttttcctgtaaattaaaaacttgtttttttaagtttcttgttgttgttgttgttgttgttgtttaaatcttgcttatcccaaagatccatatataaattatgcccagggctttggccatagcctttccttcccccagtgagaaacccgaaagcaaatgttacccacctctggaggctccaatgtctgagccttcttatgcatagccctcatccctccccatgctatggactggtcatccctaacatttacaaccaggaataagagtaaattactcgggaggctgagaaaggaggatcacttgagctcgggagttcaaatccagcctgggcaacataatgagactctcagctctaccaaaatacataaataaataaacatggaggcctttagccagggcccaatatcctagttcacaagttcaagctcaatctgtattcctcaacaaagattctttttttttttttttttgagatggaggcttgctctgttgcccaggctggagtgcaatggcgcagtctcagctcactgcaacctctgcctcccaggtttaagcaattctcctgcctcagcctcccaagtagctgggattacaggcgtgtgccaccacatccgactaatttttgtatttttagtagagacagggtttcgccatgtcggccagggtggtctcaaaatcctgacctcagccacccaccttggcctcccagagtgctaggactgtaggcatgagccaccgtgcctagcctccaacaaccattctttgctcaccctttgagtggcaaaatcagtcctcgggaggataaatctgggagagcagcccacttaaggctctggaagcaaaactgtggccatttgggcagagaattacagcgccctgggtgtctggagaatggtctaaacagggagtcaagaacttctgttccaaaggggagagtgtggctgaaggagggtcagatcatgtcctcctgcggttggtactgcctatggcctttcttcctccccatacattcaatccacacccctctcttaggctccctttgtgcctgcccaagtgacaccattggggaatagtgtgtatacaaaacagctgccaaatatatgttgccaaagcttctaaagcaggaaggagggaaatacggattcctcacctcaccttccagatgacccccggccactccactcatacttgagactgccacaaaccctgcttctcctcagtctctcacatatctgacttcccctgttctcccaggcccctcactctacctttgcctgctcccctgctgtcattctgtgcctgtagccacagcctaaggccctccacctggagccattcctggatcatcctggagccc

SEQ ID NO: 1244325 - DNA, 4001 bp, Homo sapiens
ggattttattctgcatggaatggaaagccattgaaaggttctaagcaagaaagtaaagtgttctgatttatatttttaaaagattaagctggtttctgtgtagaaagctgttttgcttggtttgggttggggtggagatgggggcaggaaggtaaaagtggaagcacagataaccagggagtagattactgcagtgttacaagttagagatgagggtgtcttgtattaagacggtgataacaaaaagaagtggagagattccaaatacatttttgccaatgtgaaactaagaaatctattatataataaagtatacacatgcttaggattataaaaattaaacttactttagatacttggcatattctgggtctttccagtaaagcaagtatttaagataattaacaaaagctttgtctttgaagtaacctctttgggcaagaactgaaaagcattaaaaaaaaaaatctgtaggtcaaaccaatccttaaactgtgatttgttacccctaatataaaggatctatttacataacacccccaccaccaacacacattggattcaaaacacaagtcccagtacgcaattatatctatataccagcataagtgtaatgtcattcaactgagaatgtgtaaaagtagatactattttgaactgcaactcttctgtcagaaatcattaatagctactcaatttaatgaggtgcttaacaacttacaattaaggtaatttgggttggctaaacattgcacaaattccaactccaactgaaaccgaagtcgatttccagcatcatctaggagacaagacagcaaaaatcatggaaaacaaaggtcactgtatataatactgatttgtagtaaggaaagagcaataaagaaacctgactaatgttgagatggtcttcctaaactaggagtgggaggagataaaccttccttcgaaatctaagaaaagcggagccctgattaaaaggagtaagttagaagtttctctaaagttaaagagaaatcatcaaagaaaacagcaacacaaacggagaattcctaccactcgtgggccactatgtaggaattttaacagtgatcactaaggtaggctgtaataactgtggcttcccctattttaataatgcgttgtaacaactgttaacagtgattaagtttcgcaaacgctaggggctgaatcagtaaagaaaaacttaggatgcaagagactgcggagagcctaaaagatcatgcagcgcatgcatataagaagcaccagggtcaggagatcgagaccatcctggctaacacagtgaaaccccgtctctactaaaaatacaaaaaaaattagccgggagcggtggcgggctcctgtagtcccagctacttgagaggctgaggcaggagaatggcgtgaacccaggaggcggagcttgcagtgagccgagatcgcgccactgcaccccagcctgggcgacagagccagacgctgtctcaaaaaaaaaaaaaaaaagaagcaccagtagcagaatgatacacaagtctggcgacgatatttcaaacttaggcaagctcatgtgagaagcagaaaaccaatcaaggaggacacggtttaacacacaagtcctctcccttagtctcacccacgccagggagctggtggggtggtgtctgaatagcaaagatgtgcgaacaaaccaaatcaggaaaactgcaaagagtaccttagtctttctagacgctacaagagccttctctcctctctgtccaaatattaaccctgccaagagtaaggcctggaaggaggccacggggaagaggtctgggtcaaggagagttccatctgcgaagactccaagatcagagagctactcacctgtctccatagcgacagcagcggccataacaaacgaagacaccaaaacgccaccagcctgacagagcaaaagcccagagacgcgggcgaagttccggaaaccacggctccctcttccggtcccggggcactgtgggatatggggcggggcggctccgcccatccccgaccagccctgggatggctccacccgcgctggctccaaaatagcgagggggcggggcccgggccgtgggagcgcctgaggggcaggagtccagtgttttagccttcgaaggaccatggtgcttccacgtcatcgtgttgtggcgctcccggctatggcagtaccgtagttttcctctcttctgcctgcggtgaccattgggctgtagggtgccccgaggcctccctggccccctcacgccggcagaatggcctcagcccgaggggccaagcagtcttcgccccgggtggggaccacccgctacacagagacgtccacggtccgcgtggagacctcgtcccaccgcgtggagacgtcgtcccggcgggtggagacctcccagcgccgcagcgaggggccctccctctccccctcggggaagcggctccctcgcatcctcgaggcgtcctcccggcacgtggaatcctcctcgcagcgcacggaaacgacctcccgccacgtcagagcctcgtccctgagggtggagacgtctctgcactgcgcggagagcccgaccccgcgggccaagccggccgcccgccagaacgaaaaaacggcccgatgagatgctgcttcccaaaggccaccaaggggccagggccctcagccaggacagaaaggcctccagttgccagccagccagccagctgccaggtggaccaatcattttcggtttcatggaaacaaaccataaatcaatgtaagaaacagccaagccgcagtttctgaacacagccaacgtttactgaccgtcctgcgtcttggaccagcctacttttgacccagtgaactattttcacttgaagccagcacagaaggttttcaggcccaggatgctgtctaaatcgggttgatggacaaagagaggctgtttgagcctctgagccaggtgagtttgggatccacagccctcagaaaaccttcaccccttaggaacagagaccaaactgaaataatgacctgtggaatgattccatgcctgctaaaaactcgagggacaaggaacagactcataaattattaattggcctttgtttatgtttcaaagtaaatggtcgttttctttatgctaagtctttgtacctggcacccccatccatacacttttttaaggtaggttagatgtggttaaaaatgacagtaaacccaccagcaagcaaaaataatcttagaaagtgagaggaggtcactgaaacctggcctgaggtttgaagaagatggagaagagttatatttattgagaaccggctctgtgccaggcactagatgttcctccacttacgatggggttacctcccgttgaaactattgtaagttgaaaatatggtaatttgaaaatgcacttaatacccctaacctactaaacatcatggcttagcctagcctaccttaaacatgctcagaacacctaaagttgagcaaaatcatctaacagaaagcctgttttataataaaatgttgaatatctcatgtaatttattgcatactgtactaaaagtgaaaaagaatggttgtaagagtacttaaagtactatttctactgaatgtcacttttgtaccattgtaaagtcgaaaaatcataagtcaaaccatcttaagttgggaactgtctgtattctgggaacttgggctatagcagtaaaaaaggcaaagtcccagctctagtggagcttacactctggtgaaaaggcagacaagcaatgatgaaacaagacaattttctattgtgattagcactatgaaggaaatacatgggtaatgtgatagagaatggaagtaagtggcttcttttgataaaatggtcagggaaggccttgctgattagttaacatgtaatctgagatatgtgtgaatgaacagtgatctggaacaggtgcattctaggcagaagaacagcaaatacaaagggtggatgggaaccagctttgaa

SEQ ID NO: 1244326 - DNA, 4001 bp, Homo sapiens
ctttataatccagcactgccctaggattacaggggctccatatgtatttctgtctatgatcattatcacaggctcacgaaaactgaataggctgccttatcctataagcattactttttttttttttttgaggcagagtcttgctcttgttgcccaggctggagtgcaatggcatgatctcggctcactgcaacctccacctcccgggttcaagtgattctcctgcctcagcctcctgagtagctgggattacaggcagccgccaccacacccggctaatttttgtgtttttagtagagatggggttttgccatgtcgacgaggctggtctcaaactctgacctcgtgatccgcccgccttggcctcccaaagtgctgggattacaggcatgagacaccatgcctggcccctataaacagtatttaaacaccaagtgaaaccaaatgaagccagggtctaatgtgagaacaaagcctttgtagttatttgaaaagtggcagaagagcatcaggtcatcccacagcaagtgaatctaatttgcttaaactcaaaagtgggtgggccactaacagtcaagaccttcacgttgtaacaattccatttcagtaaaacagtgaagagcacattcatgttcacctgaatgttactggaatcgtaattttcttttaatttactttgttttggtctttaatggttgagtaagagttacaagcctaggggtttacacctagtatcacgtggatatacagtgaagtaacataatgaaaataatttacagcctgggcaacatggtgaaactccatctctacaaaaaatacaaaaattcgctgggtgccatggctcatgcctgtggttccggttacttgggaggatgaggtgggaggatggcttgaggccaggaggttgaggctgcagtgagccgagatcacgccactgtactccagtctgggtgacagagcgagaccctctctcaaaaaaaataataatttaggcaaacataaggatcagtgagacttttgtgtttttgtttttggtttttcctctacagagtcactttgaaaactcaggctaccctgaaggctggccaaaaggatgacaacaattatttcctttggtactgttagaacaaagtcagtacaagtgggtctaatcatctgaggcaacttctgtgtttctgcttagtctaatgtttcccatcgccaccactcccgtctcaatctttttgaattgtgggttattcccaatcatgtctttttttccttctatctaaacctttgggggtgaaaagttggccccttttactgcgtccatcccgtagcacttggcacagggaagatgatgcttatctgttgagtttgctgaactaaggaactaaagtgagtattaccaacattaaaggtgagaaaactgaggcttaaagagatttaatttgctcaagatcgctgggatgaacatttgagccgctggacaagagtctgcatttagtctctaagctggcttcattcttaaggatatcgcacctctcgaggctcaaatcgtttgcttaactcatggaatgtctctgtggtcttgggaaaggcctcttcccgctctgggtctgagtttccccatctgtgaaacgggggcgtgccccagagcgccaaggcctcttgcagctctgaaacggctgagaggagaagctggagggagtatggggcctggtcctctcctaggttcttaccatttgatgatgttgtgaaccaaaggtaaaaaggagtagttctcttcctccctcgcgcgggcaggtgactgaggccgtggcgccggcgactgctgcggttgaggcgcagggaccggcggcggctgaggaggcggcagcggcttggtgtcaggcagcggctggtcggacgttggcggcaatacatcctccgcctgtcgcccggctgccaccccagcagaggccatggctccgggggtaggttagccagaggtcgggtcgccaaaagcgtcgcgcactctacacgtcaccaccgcgcgccctgcaggggcggggtgtggaggaaggctctgagcgtgcgcactgggcagtcggcgggaaaaggcgcggaggcgggggtggggaggctgttgctaggcaacgggccgtgggtgggtctggggtgcctggatttggattgtgagtcaagattgctaaattattaaatagtgagaaataggggtttatttcagaaataacaatcttttttttttttttgagacggaatttcgctcttgttgcccaggctggagtgcagtggcgcgatctcggctcaccgcaacctccgcctcccgggttcaagcgattctcctgcctcagcctccctagtagctgggattacaggcatgcaccaccacgcccggctaattttatatttttagtagagacggggtttctccatgttgatcaggctggtctcgaactccccacctcaggtgatccgcccgtctcggcctcccaaagtgctgggattacaggcgtgagccactgcacccggccagaaataacaatcttcttattcctattcacacgatgaagagggccccaaagccacaaacacaggaagccttgagattagtaaggtgcagcctggcccagtgcacccaagtctggagaggagccactggacctgtgggaggcgtagacagcacttacctgctgggtgaggcaccaaacccggcccagcccacagtgcaagacatcgagacctcgagtttagccctaaggacgcagaggcaaagggattgcggtcccttcaatgctgcaaggttgcttagaaagagtctaataattcaactcaacacacatttagtatgcacctgctggatggccacctgtatgtgtggttgcaggcaggctgtccttgctttcagtacaaggtagaggggattggtgccaggagtaaatatcatatcctggaagaacgacaaggtcaggtactctccataccttcgggccagttccccaagcccctaggtcccagtttcctcacccctaaaatcatatttagttcagattcatggcacagcctaaactgcattctaacttcacatgcgtggctgaccccaaaaggtcttgttggcatgaggactccctaggatcataggccaaagatgggtttatggttatgcttctcaaaacaagtttgatatgagggctgtgtagtaattttccgggcaatggggacacccaccccaagcttagctagtgagtagaagacatgagtggggaaagctgtcaactggtgagcccattctgctgtaatccaccatcatgggcagtacagagaggcgaggaggtccacatccacatagcatgatgaacaggagccttaagagcaaggtggccagggaaaggatcaatgctgatattttcaggcacattgggagggctgtgcggaggcagatccttggggagtaggaccatagatggaagtgctgttggagggtgcgctgtacaggttctgtagtaaagggcctcagcacagctctctgcagcaagagctgcccacggtgccccagagagagagcaaagggagggagtgggttgcggagttttcttccttctaaccattgacctctccaactaagggaaagttcaagagttctggttgagcatggaggagaaaaaggccagatgtgcttgaagagactgtatacccttggagtcatctggggaaagatgatatagtaatagtaataataatagtaattaccacaactaccatggagtaaaagtagatacagggaacagagttacagtcactgtctcaatccacagacagaggtctagaagatggatgtcaggatccccattttctagatgagaaaaccaagacttacaatggttaagatcccagcctaagggtcaacgcagttgctgatgccaagtctatgatcttaaccaacactaaagagacttcggatccctaccagttctgtaactttatgattcaaaatgttaaagtgggtttgaattcagaat

SEQ ID NO: 1244327 - DNA, 4001 bp, Homo sapiens
tttattcatctcagagcattcctgggcttggctaagagcagaaactcgggaaagctgtgcttataaagcaaagcacaaagcattcccacctgttggttggtgtccttcttttctgtcctgccctggttagccccatgggaaggtcctctacaggctccgacagacaggcgtgcccctgagggcggctgtcaggaggaaaacagggcagcacgggcaggaggcttggtcactgctttgttctgaacgaggccgggacaaggaaccagacaaaaggtggacaggtatagtgagcaaccagggagggcctggtggggaggtgaggaagcagcaggtccccaccctggggaagagaagggctttagctggaatcttaacaaataggccaatctcatcctccagcctctgggactccagcacggactcccttggctgcctgcctccctgactctctcagaggctgcccatcccttgcagctccttgcggggctgccttcctggggggtcagccagatctcagcatgctgagttgtctgtccccttggcctggacatggcccagctccgcagggtgatatctggtgggcagtctgccccaaacctcagccctccatctccccctcaccccttgattctcccatcccagccgcaggcctgcttctctgcctctaggctcctggacacatagggtcttggctttgggtggccacccagggtcccagcttcagtcttagctctcagagccttaacctcagctgaacttccctggtaagcgagccctgtggctctaggaccacttggggctggccaaagcatggtggggaggaggatgactcaatggcagcctgattcaggaaagcccctcaccagccctcgccagtctgcacccagaggatccatttcacgtgtcctccaaatcctggctgatcctgtttcattctcttgctggacaccctttctggggcccaggagtgctgggacacagacatggtccccatcaccagagaatcctagaactctcagtggaagaaaccccaaaggtaactggtccagtctcctgcatttggatggactagacagaaattcatgctcagagcacctaggcacagagagggtgagtaacttccccagggtcacacagtaaaggaatgatcagctgctcctgagccacctacctgaactctcctttctccgcctggatgatttcttctctgtctcattggcagtgctcccaagcaccccgtagtcatcgcctgggcctcctgtggtgtccaccaggcccaggctgctggtccccatttccttggaaccccctgccgggcctgagttgggcctgcgccgggcgtctgagacagggaagtgccagttgggggactgtgggaaagcggggtgctgctcagtgaagatgtgctcctcctggggcaggctgtgtggggtggctgccaggcaggaggctgagaagtcagggtacgctgccgtcgctgtcgccaggaagtctggtttctggtggaaggagaacggggtgggcgggtagtggggtagccctgaggccccattgccttccgagtgggggtttcgaaggcagccccagacaggggctgggggctggaggctcctcatgcagctgctggccgcgggatccatctgctgtccgctgcacgcctcggtcctttcaaagatttgattctttatactttttatgttcaaatttttaaaaatgcaaaagaaaaaaaactaaataggagggaaaaatgttcaacagaaaatttaccccaggaaccaaaaaaaaaaaaaaacccaaaactaaagtctctccttaaagtacacacacatgtggccagctactcctatgtgtgtgcacacacctatgtcgggcttgctcctgcccctccaatgcaccagcctacctactgggatcccctgtatgtgtatttgtcgccaatgacactaaacattttcactgtcccaacccagacgcaccagctgacgaggagttcgtcctggagcccagagcaaatgcctgcagagggctggaccagggctgctgggacacacttttaaatcctgcggtggggagagagtgacaaatttctgaagtgaaatgtgagagaggagagggaggggttaacccacacacacaagatcccctccaaccaaaaccctagcaggcaactattaatcatcagaaaccttatatgcacatctaatgggatttgcagatggagacttttaaagaaacattgtctgtattttttttttaaggaaagagagcagcacacacacacatacacacacaccgtctttaatgtgcctcctgtaacactatgaagttatttttattgcactgttaacaaaattccccaagtcttggatttagaaaaagccttaagtcagatccagaatccatcaaatgccaaattccagggagtgaagtgaggaataagagcaagagacaagcttggtgattgcatttgatttaaaggcccttctactgctgcctgcgaaaaaggaaggtggattaaaagaaatcttttttgcaagtctcagcggcccactgtggtctgcagtacaaagaaaggcacactctagaaaaaaagaatttctctctgcccagagtgacattctcactttctcagtaacttaaaaaaacaatcagattcttccttccgctctttaacctccaacatacatgccaattagccacactcttctctagagaggtttcaagtcatttttcttcacagcaatggcaaggctcttaaataaggtccttgaagtttcttcgggtctcctcccacctgctccctgcccccttcacctccacccacctgcttccctttctcatcccccagaggcggaggcttccgaggaatttggggtagggaaataggaatcaggggctcctcattccccaaaggagcctctttggcaagcaggcacgtgggtctccgggctggtgcacatcacagggcagccagcccaagtgccatcttgatgcccagtcttcctcatggctgcgccctgctggtctctcagagggttaatgcaatttcttggaggacgacattcctaacacccaggggccagaactccttccccactggttattcccatggcccagagcagcaggatgggggcagaaacaggcatggaccttaacagcagcgtctctgctggctgcttccaaagacggcgagggttccctgaggaggggcccctaggtcttagctctgcagcctggaggtggggccctggggggtgggtgcaggagatgctcctaggaggagccgaagggcacccagggatgtggaatgaagccacgactggcctttaatccagaaactccagtcagatacacatcctgggagcaggagcagctgtaaaagatggggaggggtgtacatatgaaaagatgtgccctcttctggaacaagcggtcagagtgttgtagaccagtagagtggatggggtcatagctgtcaaccagactcatctttctgctttgcccagggcttagctgtggcacacacaattctctgagcctcacaactttcctaggatgggtaagtaagaattatgtctccattttgcagatgacaaaaccgaggctcagatggatgactgggctgcccagactcacacagctaagaaatggtggaatcagcacttggcctcaggtgtcctgctgttcagtttggagcaggccagatgcagaggaggaggcatggggtttgaggttagacgggtctgagttcaagccccaggtctgccacttcctggctgtgtgccctggaacaagtcaccttatctctctgaacttcttttttttttttttctttttgagatggagtctcgttctgtcgcccaggctggagtgcagtggcatgatctcagctcactgcaagctccgcctcccgggctcacgccattctcttgcctcagcctcccgagtagctgggactacaagcacccgccaccacgcccggctaattttttgtatttttt

SEQ ID NO: 1244328 - DNA, 4001 bp, Homo sapiens
ctgtttgcctgggactgtggggtttcctacgacaggattttcagtgctaaaactggaaaagtcctgggcaaatggagatgagctgctcactctagtttgaccccattctttctgtgttctcaccaactttcagtctttcattttgcagattgagagaatcaaggtactaataaaacctgctgtccccatctcccaaacccgtgggactcaaaagagctgacgtcagtatcccatggcaccttaagcctccccatcagggcacatcccactgctgacacacctctgcaggcctcttcttcctctcagtttgagctttcttgggtgagacccctttattcatctcagagcattcctgggcttggctaagagcagaaactcgggaaagctgtgcttataaagcaaagcacaaagcattcccacctgttggttggtgtccttcttttctgtcctgccctggttagccccatgggaaggtcctctacaggctccgacagacaggcgtgcccctgagggcggctgtcaggaggaaaacagggcagcacgggcaggaggcttggtcactgctttgttctgaacgaggccgggacaaggaaccagacaaaaggtggacaggtatagtgagcaaccagggagggcctggtggggaggtgaggaagcagcaggtccccaccctggggaagagaagggctttagctggaatcttaacaaataggccaatctcatcctccagcctctgggactccagcacggactcccttggctgcctgcctccctgactctctcagaggctgcccatcccttgcagctccttgcggggctgccttcctggggggtcagccagatctcagcatgctgagttgtctgtccccttggcctggacatggcccagctccgcagggtgatatctggtgggcagtctgccccaaacctcagccctccatctccccctcaccccttgattctcccatcccagccgcaggcctgcttctctgcctctaggctcctggacacatagggtcttggctttgggtggccacccagggtcccagcttcagtcttagctctcagagccttaacctcagctgaacttccctggtaagcgagccctgtggctctaggaccacttggggctggccaaagcatggtggggaggaggatgactcaatggcagcctgattcaggaaagcccctcaccagccctcgccagtctgcacccagaggatccatttcacgtgtcctccaaatcctggctgatcctgtttcattctcttgctggacaccctttctggggcccaggagtgctgggacacagacatggtccccatcaccagagaatcctagaactctcagtggaagaaaccccaaaggtaactggtccagtctcctgcatttggatggactagacagaaattcatgctcagagcacctaggcacagagagggtgagtaacttccccagggtcacacagtaaaggaatgatcagctgctcctgagccacctacctgaactctcctttctccgcctggatgatttcttctctgtctcattggcagtgctcccaagcaccccgtagtcatcgcctgggcctcctgtggtgtccaccaggcccaggctgctggtccccatttccttggaaccccctgccgggcctgagttgggcctgcgccgggcgtctgagacagggaagtgccagttgggggactgtgggaaagcggggtgctgctcagtgaagatgtgctcctcctggggcaggctgtgtggggtggctgccaggcaggaggctgagaagtcagggtacgctgccgtcgctgtcgccaggaagtctggtttctggtggaaggagaacggggtgggcgggtagtggggtagccctgaggccccattgccttccgagtgggggtttcgaaggcagccccagacaggggctgggggctggaggctcctcatgcagctgctggccgcgggatccatctgctgtccgctgcacgcctcggtcctttcaaagatttgattctttatactttttatgttcaaatttttaaaaatgcaaaagaaaaaaaactaaataggagggaaaaatgttcaacagaaaatttaccccaggaaccaaaaaaaaaaaaaaacccaaaactaaagtctctccttaaagtacacacacatgtggccagctactcctatgtgtgtgcacacacctatgtcgggcttgctcctgcccctccaatgcaccagcctacctactgggatcccctgtatgtgtatttgtcgccaatgacactaaacattttcactgtcccaacccagacgcaccagctgacgaggagttcgtcctggagcccagagcaaatgcctgcagagggctggaccagggctgctgggacacacttttaaatcctgcggtggggagagagtgacaaatttctgaagtgaaatgtgagagaggagagggaggggttaacccacacacacaagatcccctccaaccaaaaccctagcaggcaactattaatcatcagaaaccttatatgcacatctaatgggatttgcagatggagacttttaaagaaacattgtctgtattttttttttaaggaaagagagcagcacacacacacatacacacacaccgtctttaatgtgcctcctgtaacactatgaagttatttttattgcactgttaacaaaattccccaagtcttggatttagaaaaagccttaagtcagatccagaatccatcaaatgccaaattccagggagtgaagtgaggaataagagcaagagacaagcttggtgattgcatttgatttaaaggcccttctactgctgcctgcgaaaaaggaaggtggattaaaagaaatcttttttgcaagtctcagcggcccactgtggtctgcagtacaaagaaaggcacactctagaaaaaaagaatttctctctgcccagagtgacattctcactttctcagtaacttaaaaaaacaatcagattcttccttccgctctttaacctccaacatacatgccaattagccacactcttctctagagaggtttcaagtcatttttcttcacagcaatggcaaggctcttaaataaggtccttgaagtttcttcgggtctcctcccacctgctccctgcccccttcacctccacccacctgcttccctttctcatcccccagaggcggaggcttccgaggaatttggggtagggaaataggaatcaggggctcctcattccccaaaggagcctctttggcaagcaggcacgtgggtctccgggctggtgcacatcacagggcagccagcccaagtgccatcttgatgcccagtcttcctcatggctgcgccctgctggtctctcagagggttaatgcaatttcttggaggacgacattcctaacacccaggggccagaactccttccccactggttattcccatggcccagagcagcaggatgggggcagaaacaggcatggaccttaacagcagcgtctctgctggctgcttccaaagacggcgagggttccctgaggaggggcccctaggtcttagctctgcagcctggaggtggggccctggggggtgggtgcaggagatgctcctaggaggagccgaagggcacccagggatgtggaatgaagccacgactggcctttaatccagaaactccagtcagatacacatcctgggagcaggagcagctgtaaaagatggggaggggtgtacatatgaaaagatgtgccctcttctggaacaagcggtcagagtgttgtagaccagtagagtggatggggtcatagctgtcaaccagactcatctttctgctttgcccagggcttagctgtggcacacacaattctctgagcctcacaactttcctaggatgggtaagtaagaattatgtctccattttgcagatgacaaaaccgaggctcagatggatgactgggctgcccagactcacacagctaagaaatggtggaatcagcacttggcct

SEQ ID NO: 1244329 - DNA, 4001 bp, Homo sapiens
ggggggtcccctgtgtgtgtgtgtgggggggtcccctctggggagtctgaggccaggactggcaacgatggcgaagagggcctccaggtagacaggagggtgcgcaggtcctggagggcaaagcactcctgtcccgctgctgtcacctgcctggaggagccgcccgcccctggaggtggaggggtggcctccccgccaccctcggctgcctaccgcgccctcccttcgggctccgggaggcgccccctcctaccgggcacacagtcccctgacaccctgaaaagggcgccggccccttctcgacacactcggcctgggtggcgggggcggcgtttctggcttcggtctgctggagcggaacgccccgggcctcggttcggggatgcaccgacccgccgggcagaggcagcgagccggggctgaatcactccgcgggggcaggggcggccccagaagagccgtcggcctcggaggctcccggcgccggcgttcccggccgaccccccccagacctccatccgcccgcggccccgctcggccgagaagggaggcggccgctcccgggacagccgggcaccgcccacggccctcggggcgactctgccccccagcgccacgccccttcccccggggaggctccgccgggggcgctggggggcgactgtggcttcgcggggacccggaacggaggctgcggctgcggggagacctgcgcccgccccgcggacaccacccgccccgcaccggctctgccccgaccttctcggaaaacagcttcgctcgacatcaccgcgtgactcggcccgcggcgggggcgggggcgggggcgggggccgcgccgaggggaagcgggacccaggcccgggccagcccggccacggctctccgggaggcgcgcgtcactcgggtccccgcgcatctgcgaaccccggaactggcgactgcgaggctcgcgcagggcgggttcggccgcggtgccctcggcgccctgggcttcgcgtgggagcggcggcggctcccgaggggcagtcgcggtcggcgccgctctcggcggccacgcttgagtcaaaaaaaaaaaaaaaaaaaaaaagtcctcggccgccaccgcgggtggggggggggggggtcgcccagcgcagcgcgcgccgcggccaagggcggcctgaccttcacggggcaggggcggggggcccggccggagccacactcggcccggctcacaggtgcccgcccgcggctccccgagacggaagtggcccccgctgcggtccgcgcccgatccccgaaaccgccgctccctcccgcggccgtcccttcccgctctggcccggggcggcctcggggcgcgcaactcccggagcctgccaggaagggcccgaggaccgacccccgcctgcccccgggatggggtcgcgggaccggcggcccccgaggctcggacacgcgcggagccgggacccacccggccgcgctgcaggcgcgcctcccccgggcgtcctccgggccgggaaccgggacgccgcgggctcttttgttctagaaccgggggcgggggacagcgggcaccggactgggcctggagagcggcccccggagcccctgccccgcgcccgcccccggccgcgcccccgcacgctcggccggcccgggacgggaggggacgcgaggggagggggccgggccggggtcgcgccgcgcacactcacctccccttccagctgcaccggtcgctggagtactgcgcgcccgcgccgcccagcagcccggccaggagcaggagcagcagcgggagcggcggcgggggcgggcccggggcggggggtcgcggccacggctgccccgcgcgcccccaggccgcccgcgccgcgccccgcatgctctggcgccggctccgccgcccggccccgcgtccgcgacccccggagcagaccccggagccggcgagccgggcgggggcggggcgggcttcgagtccgggtggtcacgtcgcgcgccccccgcgtcctccgcgcggccgcccgcccatcccggcccgctggagccgcgcgcagagctccgcgcccgccgccgccgccgagcctctgaagttggcgagtccgagtccgcccggccgggctcagctggggggtggggcccacccgccgccccgccccgcccccgaccccgcccccgaccccgccccgcgccggaaactcctcccggggcgcccggccggacgcgcagacaccgagtcagcagcgaatcgggggcgcgggcgccggggcggggggcgctgcaggaggagggggccgcgccgggcggcgagcggggtccggagggaagagcccggcctggaaagcggagtccggggccggaggggttgcaaggcgagggcggggcggaaacccgagacccccaagtagtggccgacgcgagccgcggtcgccccccgcagacccccgcgaggcggtgccggggccgcatcctgcgccccatcctgcgccccatcctgcgggcagccccggcgcggagcggtaaaggaggctcccggccccgccggttctgggtcccccgcgcctcgccagcgggcggtgatcaggggcgatccgggcgccccgcgttccgcagagttggtgcctcgggagttcccggctccctcctgaccgggggggaggcccggcggtgagcccggcttccctccctcctcccggaggacgtgcagccgccgcgccggggcctctgccgagcgctgcccactcctcgctccggatacgcggggccgggtggttcttggggtggggacgtcctgcgcatggtgggatgttggcagcaccctggcccccgcactctgggtatcagtagcaacccccgccccagctttgacaacctaaactctctgcagatttggccaaatcccgcccccaccccgtgcccgcggggcagaatcacctgcggagcgtcctgctcgagtgtgttcctcggagtcggcgccttccccaggtggtcaccgcggccaccacgtgcctgacccagtgggggggacagcggagacccccgcccggactggggaggccctagagactcaggccagagaaggggagccagagggtgccgagggccccccaggcaggagagggcggagctggcccgcccggcggtccccgctgcgatggcaaagctggcttctgtgtgctgcgggtcagtggccctgcccgagacgcctggtgtcagttccagagccgagcgcagcatccagcggtggggaagcttggccttgtccccttttccagccaagataccttccaggaggacttgcgaacgacctgtgcaagtctgaataactgggttgtgactaccagaggaggcggggagagggctttgaaaattgtgagtctgcagggacggaagtcaccggcaaaggcaggtggagcccagcccccagcccaggaaagctgggacaagggtgagggtctgaagaactggaaggcgatgacagtgaccactgaaggtagtttcattgtaaggatctgttcagagcacccaccccatcgaaagcctggagccaggaccttgcccagcacatcaagtgacatcaccctgaggctcaaggtctggtggaggtgcatttcggagcttggagactgccccacccacccccgtctgctctaggagtgcacctccccccacccccatcactgcaggtaccagggtgcccagtggaaagggacctgctgtggaaagggacctgctgtggaaagggacctgcggcttcacacctgtgcgcagcaactgctttccatgcccaccaagcataagatagcagcccccccaggcccggtccacccttgaagggccacatggcctatcagggtccagatcatcacaccacggaagaggcagggcagtgctgggatctcttgagttatagatgcggacatggggaactcaggacctgccgtgacctgctcagggtctcagagcccctggtggctgctagaccgaaggggagaggccgcctctgg

SEQ ID NO: 1244330 - DNA, 4001 bp, Homo sapiens
gtctcaaaaaaaaaaaaaaaattagctgggcgtggtggtgggtgcctgtaatcccagctactcgggaggctgaggcaggagaatcacttgaacccaggaggtggaggttgcagtgagccaagatcgtgctactgcactccagccttggtgacagtgaaactgtctcaaaaaaaaaaaagaaaaagaaaatgttctttcttgtgattctggcaagcaacaaaaaaaagtaaactaagagtaatttctttaaactgatggaaaatattttcccaatttatgggggacatgtgacatttatgcggtatttgttccacgcatagaatgtgtgctgatcaagtcagagtatatggggtattcaccactttgagtattttttatatctatgtattggtaacatttcaagccctctcctagctattttgaaatatacattgttgctgactttagtcaccatatcctaacagtgacttcaagagacagtggcatgttagggctctgccacacattaaggaaaattctacagactacatagctgacatcagtgcacacacaacataatactctgaatatatgtgaaacaaattaaattacagacatggcagattcgattcatttcctacattattcaacttttctggtcagaacagatacagaatgagtaaatacaaccacttcttttctaactaacctcccaatataggcaatgagttcttagctaaatataacctattcttcagagtttaactgggcatcaattcttttttttttcttcttgttgagacaaggtcttccattctgttgcccagagtgcaatgatggaatcatagctccctgcagcctccaactcctgagatcaagcaatcctcccgcctgagcctcccaagcagctgggactacaggtacagagcactgcacctggttaatttacttcattttttgtagaaagggagtctggctttgctacccaggctctagcttcaattttctacacagaatttacccatctggcattccatatattttacttactttaaaaaatctcccgtcagtaagtttcaagagggtaaatattttgtctgtcttgttcaccgcatatcccaacgcctaaaatagggcctaagagagtaggcactcaagtatttgttgattgaaaccacgatagaactcttccctgtctggaccaccgacacaaagcaccctcactgagtttcaaaaaaagctcagcccatggactggaacttttcttcccggttacttgagtcagtccagaaagccacagttaatagtagaaccctgagaatgaggctttccctttttttttttttctttctcatctccatgcttctgtttccttggttcctcttgaccattaaccctcttcaactaccactctcttgatacacagcctgtaaaacagtctaaattccaatttcagaacttcaaattctttctgcacagatccctcccacttccacaccaatctacatcttctctcttcgccttctctcataaatccgacgtttcccactagtcctgccactgccgttctttccatgccctcattttatcagctcagtttgtcttcccgcctcagttttggatctctctaaacctcctaaacaccggggagtctttcctacttcagtcctagtctctattctattcgccaactcctcccactcatccactctcaacacccccgcgtgcgcacacacagccacatcaggtctcccctcctagaccccgaagtcggcacctcactagcccaaaactcaagaatgaggaacccgtgtgatccacgggttaagtgacccatgatagtaaatctgcgtgagagatataagtgacccacctctgaggccgaggttcctgccagacgtcgtgtctggcgtgggcctgtacaaccctagaatcttaaagcagccgcatagcgaagctcctagaaacgcagatgatacgctcccagcgcgccgccatcttgtgaagccatctagcctcgtgattggacacatccctctcgcgcgacctgtggctgatcttgaagaaagaagaaaccctcgcgacacctggggtttgctgctcctaacagaaggcgcgggggcgtggtgacgagcggagtcctttgaggtatggcaggaggaggacatgcgttcgaattcgcgagaaaacttatttaaaagaaaaagaaacaagttttccgggccctgctgcagacttacctctcacactcactgggattgggcaggttatgaagatgagggtacgagacttgggtgtgatggcgtgcagtgagccctttttgtgcaacaggtgtgtcctcagccgatgtctcactcactgaattgtaagagatataagcctgtgggttggggaagagtactctcgtttacagcgaaagaactgaggatccggccggacgcggcggctcacgcttgtaatcccagcactttgggaggctgaggcgggcagatcacctgaggtcaggagttcaagaccagcctggacaacatggtgaaaccccgtctctactaaaaatacaaaaattagccgggcgtggtggcgggcgcctgtaatcccagctactcgggaggctgaggcaggagaatcgcttgaatccgggaagcggaggttgcagtgagccaagatcgcaccactgcactccagcctgagcgaaagagcaagactctgtctcaaaaaaaaaaaaaaaagggggggcctgcctacgtcctcgtcgttaatgtgaacgcttctggcaaactattaccataaaattgggagatagtaaggattaaggaatggagacttatacacaagtgagtaccagtagtcacccaaggaaagctgaggaggtgttttcataatctgttgtgtaacaaaccgccccaaaacgtaagacttaaaacaaccaccattttacttgctcacagttctgcaatctgggctgggattagcccacccgttctgctggtcttgccagtggtcatagcaacaagtgggggctggttccgctgaaagaactgggtctctctccctgtagtccaagttctctccctgtccacgtggcctttccatgtaatttgtctagcagagtaggatgacattttttttttcccccgagatggagtttcttattgcccaggctggagtgcaatggcgccatctcggctcactgcatgcaacctctgcctcctgggttcaagcgattttcttgcctcagcctcccaagtagctgagtagctgagattacaggcgcccgccaccatgcccagctaattttttgtatttttagtagagacggggtttcatcctgttggccaggctggtctcaaactcctgacctcagatgatccacccgcctcggcctcccaaagtactgagattacaggcatgagccatcgtgccccgccagaatacttcttacatgttggctcggggctcccaaaagggcaaaagtggaagctgccaggccttcttaaagcgtaggtgcagaactagcaccttggctatattcttggttaaagcaagtagaagggctagccccaattcaaggggaggggactatgccagggtcccttccaatactggaaggcatggttcatttcagcaaccaatgtaacatattaccacagaaagttttccatctttggttggtagtggctttgatactagttatggcattttatttagtgcatgctgctggaaaggtaaaagaaaagatggcctcggagataggactggtggggttgaagtgattgtatttaagatattggtaactttctgttagctccaaagagcaacccagtttacctgtaggtcgggccagagagaccctagtagcactgcagctgggaaacctggcctttaatcctgcccccaccatttactaaccctgtgagtatgggcaatttgcttaaacacttgaaggcttagtttgctcaatattacaaaataggataataatctcatggggttgtgagaattaaatcagataatgcatataa

SEQ ID NO: 1244331 - DNA, 4001 bp, Homo sapiens
cagagcaagactccaactccaaaaaaaaaaaaaaaaaaggaaagaggcttctattctcacaggcaatatcatcaccccctacatttaggaagaaatgcaagtgtatttaaacgtgaagccagccgggagcggtggcttacacctgtaatcccagcactttggtaggccgaggcaggtgcatcacctgaggtcaggagttcaagatcagcttggccaacatggcaaaaccccgtctctactaaaaatacaaaaattagccaggcatggtggtgggcgcctataatcccagctacttgggaggctgaggcaggagaatcacttgaacccacgaggcggaggttgcagtgagctgagattgtgccactgcactcgtctgggtgacagagcgagactccatctccaaaaaaaaaaaaaaaaatccgtgaagccagattgggtgtggtggccaatgcctgtagtctcagttacttgaaaggctgaggtgggaggatcacttgagcccagaggttgaggttgcagttagcaaaaaaaagtgaagctgtttggaaacaatcagaaatagcctccactccagtctttttttttttttttcttcttgacaatgtcttgctctgttgctcatgcctgagtgcagtggcctgatcatagctcacagcagcctcgacctctcgggctcaagcaatcctcccacctcaccctccggagtagctggggctacaggcacaagccacgatgcctaatttttctactttttgtagagacgtagtatcactatattgcccaggctggtctggaactcctggtcccaagcgatcctcccgcctccgcctcccatttaacttctctaaagctgtttctttagcatgggacatgcctcacaggctggtgttaaaaccaaatgaaatactgcaaagtgaaagtgctttgaaaaaccgaagacaggcagggcatggtggctcactcctgcaatcccagcacttaggcaggcgggaggatcacttgaatccgggagttggaggttgcagtgagctgtgatcgcgccactgcgctccagcctgggcgccagagcgagacagtgtctcaaaaaaaagaaaagaaaaagaattattattgagagttttgttgtagctgtgagcttagaggaagaagcgaggtccaacccaagaaacactttgggcaccaaataaaactggaaaccctgatcccaaaactcacacaaaagtgagagataaggatgaatcaagaaacccttggacaagatcaaaagaagcattagaggtcagtcaagaatgtcactttcctggcaggaaagattcgatgtggagaaagccggcccggcgcagtggctcatgcctgtaatcctagcactttgggaggccgaggcaggaggatcacttaagcttacagttcgagaccagcctgaccaacatagtgaccagggtcacttcttggcagggtctccaaaattcttactgagagacatttaatgcaccgaagggcttcatatccgacgtttttgctccgggggtcaacctaaagcaggaagctgcgcagctgagcgtccgcacccccggtccctcaggaacccagccaagtcagccgacatccgctcctgacctcaggcgcctcctggcgggtgctgctgcacgcacctgcgggacgtggacctccaggacagccccgtcggcccccggacccggctcctccgagaatcgaaagcgctgggcccggaccccctgtcctcggaaatcgtgctcgcccagtagggcgtcgttgggccccgggcgggcgggggaccgcggaaggctccgggctgccagactgcgcgagcgggaagccgcgggccacgtggccgtagcacctgacggcaagaaggggaaagcccagatctggtgataaccctgccgcgctgcgagcgaagaaagcccggagcaaggcgaaagagactcacacgcgcagaactggcaacgggcggctggcgcgaccggaagtgatgggcacagcggcagcgcgggaggggaggggcggggcggggcggggcggtgacgcagccgacgtgaccttcccaacatggcggaggcccgccgtatgtgaaggagtaccccaggggagccaaagccaatggaaaaccgcgagaggcgtcggggcggggaagacggcggccgcttgcccaacccgaggctcgggaggtggctggggagtgaattttctggaaggcgactttaaaggcgccgggactgagcgaagggcgtttgggtactgccgtcgccgccgcccaggccggggaggggtgcgttagtgtcaggaagcgggctgcgccgaggtcgtagcggaaccagctggcgaccccgcagaatgaaccacaagagcaagaagcgcatccgcgaggccaagcggagtgcgcggccggagctcaaggactcgctggattggacccggcacaactactacgagagcttctcgctgagcccggcggccgtggcggtgagcgggtcgggcgggggtggccaggccgggcatcggcacctccagccgctacgcacctttctctgggcccgaggctgccctcgccccgagcgcccgggacctcgtagaggctcacccgcaccccgcggagtttggggtccccgaggcgcggattccggggcgggtctgcttcctcccgtgctgtggccgcccgtctgctctggcggacgacgggagtcccacgcctgtggcgctctcaactagaaggcccgtcgtccctgactcctttgggcggcgggtcccctaggggacctggctgtcaaggctcatggggggtggctctaggaacgacgtggcctcacgcacgcgccctgcccccaccccggaggagccagacgagagtcaacttccttcggtttgtcattaccagttggccttggggacacccttatctgccactggactttttttttttttttaactggacaggtcttttttaattccctcaggataacgtggaaagggcagatgctttacagctgtctgtggaagaatttgtggagcggtatgaaagaccttacaagcccgtggttttgttgaatgcgcaagagggctggtctgcgcaggagaaatggactctggagcgcctaaaaaggaaatatcggaaccagaagttcaagtgtggtgaggataacgatggctactcagtgaagatgaagatgaaatactacatcgagtacatggagagcactcgagatgatagtcccctttacatctttgacagcagctatggtgaacaccctaaaagaaggaaacttttggaagactacaaggtgccaaagtttttcactgatgaccttttccagtatgctggggagaagcgcaggcccccttacaggtaaagtattctgcagctaagtggttaaaatccttttcttttttttttttttttttttttgagacagagcgtcactcttgtagcccaggctgcagtgccgtggtgcgatctcggctcacagcaacctccatctcccgagttcaagcgcttctcctgcctcagcctcctgtaactgggattacaggcatgcgccaccacacccagctaattttgtatttttagtagagacggggtttcaccatgttggtcaggctggtctcgaactcccgacttcaggtgatctgcccgcctcggcctcccaaagtgctgcgattgcaggtgtgagccaccgcgcccggcctgtggttaaaatcttatctacaacagcatttgctcgctgagttcagttgctaatcttttttggaaacagtgagtactccctcggctgtacattgaactcatttagggggctcctgaggcctgcctgggccctactggggagactgatttaattcgggtgatgcctgcgcatcagaatttctgaaagctcttcaggtgacttgaatgtgcagctatggttgaagcactgatctctaagggaggttttaataaagtccagcaataaaccacattagtgatttttctttttttttctttt

SEQ ID NO: 1244332 - DNA, 4001 bp, Homo sapiens
gggactacaggcgcctgccaccacgcccggctaattttttgtattttttagtacagacggggtttcaccgtgttagccaggatggtctcgatctcctgacctcgtgatccacccgcctcggcctcccaaagtgctgggattacaggcatgagtcatcgcgcccagccagatgacttttaactattaaaaaatcctagaagtagccaggtgcagtggctcatgcctgtaatcccagcactttgggaggctgaggtgggcggatcacgaggtcaggagatcgagaccatcctggccagcacggtgaaaccccgtctgtactaaaatacaaaaaattagccaggcgtggtggtgcacacctgtagtcccagctactagggaggctgaggcaggggaatcgcttgaaccagggaggaggagattgcagcgagctgagatcgtgccactgcactccagcctggtgacagagcgagactccatctccaaaaaaaaaaaaaaagtatggacagtttaaatgaaggctgtttttaaggtgatcatgacagtcccagatttcagtttactgctcttgccaattcagggggccttgactagtgtagtagaaagaataaaaacctaacaaattgagcaggacagtgacaatggaagttggaatccactaagaagtgtgttaacaactcacaactcacctgctgaatcaaccaagactccctaagaaacaggattttagttccactactgctactactgactgcttacctctgggaaaagcacttaatgtcctgtggtccaagtgtctttaactataaaaagagaatattgaaccacatgattttcaaaatccctttcaactattaacttgctttgatctagttgctgtcaaaatatgcagggtgaatgttttgtaactggaatctttttgttgtacagaactctttcagcgggtactaaatttgtagtcctatcttcaattgtctggaacaatcagtcctagttttactatctagggatattttgcagtgaaatcatccacctctcaagcaggggcctccttttctttggccagacttatctccactctgctgcatccacctttccttgactaaagccctaaattctcataaccatcacacaagtaatagacacacagtcaccagtcactagcccccctcccaacaatatttagaatctaatcacttcaatgaagcttcaatggaaaacatctcctcatggaaaatgcaaatcaagtaaaaagtacaggttctaagatgatcgcgtgaccacacagttgtcattggctagccatatcaacgtggatctactaaacataattaaagacaacattaccctcctccaaagtaaaactatatataaaaaaaccctctacgacttaagattttgttacaatgcagcccttttctctccttgctcatcccctccctgtcccgctctactcctgagatctgcatcaggccaggaataaaggatctgggcggccgcggttccctggcctctccgggagggcgcgttcggcagtacgctggctgttgataccaatgagagcccatttaagcgcaccttgtttctcctggcacacccgctggatactgttctcctggacttttctctccgccgccgcggcttgctcttccgaccactccacattgtccctgagaaaatcaaacgggcagcttaggggcctcacgtcctggctgcgggcagggtgagtcgctggcctaggagtttctctccccttggagagtgcctcgggtagggcagcttgactcgtggccggcggtcaggggcttttcggagtgctccgaggcggcgggacagagggtcagcgacaggccgggcgaaggggcagagtgattaccaggcattgtggtggaagacgcgcgccggatctctcaggaaccggcttccgaactgctgcctcttatcggcgaggactgcaggtgcaccttcagggtaggagccggccatgacaccggagccggaaacactttactttccgtaacgtgagaacttcctgcggaccacgccctctttcagaagacgcggagtctgggcgggaaaaagggtggcgggacagggcggcactggagtctggtccgggtggcgctcgggagctgtcgtttggggctgtcccagggttggcgaagggctctctaggagaggggaccaggcagggggaaattctccccggaggagtcgtttctcattgatgaggtgctgatggacgtgcaggttaggcagaaagtgggagacattccacttgagacccagttcaatgctgggatcctcttaacaggttccccagcttccctcaagttataaaacaggaaaaatcttgaatcattataagagttgaggctacctagttccactgcggagccgatgtccagaactgaagaaggtagcaagcagcgggaagaaacagggcaatttccagcttctatattcagctcttaatagtgtgggtgtatatgtatacacagtgtgtatatatattttggttggggtagggggagatggagatatgaaattagagaacacgaggcttagcaaatcaaatggaatatccaaggacaatttttttttaaattataaccatctaacctttttgaatcatgcatatttattataattatccttattagcacaattaagattgtaatacacacatacaaacagtttgtcatagtaatacatttcagccttacatttctatttctagatctaacacaaatagactctcaaaagaatctagaagaaagtatgttatagacataaggttatttgagaagacttccaagagaagcatgatgaataccacttggaaaagaaggaaagggcagagaccaaacaaggaccagcccaatacctcttggactttatttaatgtcataatgtcagaataaagggaaagatgaatttttttaaaaaaggaaagggttagtgcagtgctagacatagcacatgggtaattagtacttttttttttttttgagacggagtcttgctctgtttcccaggctagagtgcagtagccggatctcagctcgttataacctccatgttctgggctcaggtggttctcctgcctcagcctcctgagtagccgggattacaggtgcgcgctaccacactcagctaatttttgtatttttagtagagatggggtttcaccatgttgcctgggctggtcccaaactcctgacctcaaatgatctgcccgcctcggtctcccaaagtgttgggattacaggcgtgagccaccgcgcccagccagtaattgtttattccattgtaaattctttctgtaggtaaaactacggggagcaatgaatgattctatactttttcctccaaagaaatgggaacaagctctaagcctctctaatcaggaagaaaaatacacaagttaataaaaaaaatagtaaataagttgtacttcatttgaagacaatatgcttttgccattcttgtggtcttcggaaacattttgaacacaagctccatacccagaaacaagtacaaggaatttttatcttttctcaaggccagctgtttgcagatatggtggttgatttacatttatttctggcatcttgttttctcatctatgggcttttattctcccctcactaaaagctgttagtgttcccaatcaacagtcccactgcatattttcttgcagacagctcattgtcttcactctaatttactatattagttccagtggagacattttaaatgtcaaacagctttggccttttttctgtgaaatgtgctaaagtatcctaaacttaactttattttttatttttatttatttatttttgagacggagtctcgcactgtctaccaggctggagtgtagtggcgtgatctcggctcactgcaagctccctatttcacgggttcacgccattctcctgcctcagcctcccgagtagctgggactacaggcgcccgccaccatgcccggctaatttttt

SEQ ID NO: 1244333 - DNA, 4001 bp, Homo sapiens
ctccaagtccactcgcagctcatacttctgcttcagtgtcaggaggtgcatgttctgcagccctggggaggaggggcagctggtcaacaaggacctggccctggggcagcccctcagcccacctggtccctgccttacccagccagtactctccatcagcacggccgaagcccagcttgtagtcattccagccgcggaagaaacttactgagccattgaatctcttctggaaaacctggagcagagaagatgagactggatcatcaagggtccaatgggcaaggttctggtcctgccctgcccacctcaagcatggaccctgtgatgctgtggccagtttgttaaaggactgggttgggggtggggagggtggtgggagtggggttgctaaaacaacgtccacattggcaccaggccccctgtggagcagttgccagcacccacctgggctcttcatacccagtttcgtatagaggcaggaaagaggctaagagggaggcgttctagagttcgagtgcctagctgtgggatctgggcaagttacttcacctctctgggctttagttcctcactacttcccaggattattgtgaggcttatgtgcattaacctacctcagctgggcgcggtggctcacgcctgttatctcagcactttgggaggctgaggcgggcggatcacctgaggtcaggagttcaaggccagcttggccaacatggtgaaacctcatctctactaaaaataaaaaaattagctgggcatggtggcacatgcctgtaatcccagctactcgggagcctgaggcaggagaatcttttgaacctgggaggtggagtttccagcagtgagctgagatggagccactgcactcaagcctggatgacagagtgaggctccgcctcaaaacaaacaaacaaacacctacctcaggcacttagaattaagcgttggcagctgctcagaagctgtgctgtgggtatcattatccccattttaaagatgaagaaactgaggttcgcatatgtgaagcccagggtcacagggctgggattagaaccagctctggcctctgttccctcctcccactcaccgtccacttcccgccctcggtggtcatgtcacagaagacgggcacaggcacactggggcccgaggggtagatgaggtacacgccgtctgactggtagccctgggcatagatgtcgtcacagtccaggggttgctgaaggcaaaacctctccagagctgggggtagggacatggggacagtgaggagagtgggactatggcatcactgacacctcagcaccccaaggtttgcctcagtccctggggctgggggactttgacacaaggagtcatggaagatttcttcaagggagatgagcaatgcttatgtcatccatctgccccattttgtaaaggaggaacctgagtcctgcagagctggggctcggccctgacagtctgttctgacagtccagcctcttcttgcacaacctgtgggccaggccgcgtctgtgagtgtggggctgcttaccatctcctcggatcccggagacctggggggcacacgggggcgtggagagaagcagcagcagcggcagggccaggagtgcctggcgatgggcagacagggtcagcacagccccttcccagctccagagatcccctgttctctttgcatttgcccccaccatgcatgcacatactgcccttgcctgaatccctctcctgctatttggcccctcttccctgcccccccaccccgcccgccaagtaaccccactctctgggacgctgtgtaccctcatagcttacgagtttcaagagaactccttgtgccttcatagtgccctctgtggccaggggcctctggagtgggctcagttcccccatgctatgagtcccccgaccctgggccccgtaccttcatgctgtcagttctgctcagagtggctgggtgtctgcggccccagactgcaaccgcccagagttatgcgctgggcccccgccagccgccccagccccgccccccttcccgtagctgcagaacccccctctccccaccccagacaaccagcatcagtttacactatcagggggctgggaggtggggctggagccaggggaccacctgtgtctcattagtcctgtcgggcaaagtactgcagacgttaactccctgctggctccaactgttccctggatcccactccatccgctatccgccatctgccacccaccctgctagacctgtgggccccctggcgcccccaggcagccccagcccgccgcagcctgccccctacttcctgatgggcccccctgcagatgtctgtttattctttcccctccttccctggcctgtgtttcatcagccattgagggggagggctgagggagagtgggggtgtcatatgcctggcttctggggacgggaggcctgctctgggggagcagaaggctgaggggacagtttcagagctcctgatgtgggagcctggctggggctggtggggggacagaggcagcagtttcttggcaggcctgggacatttctgagccatgagcacaaggctgctggcgtccaactgctctgtctgccccagctcaggccagggcccctctccagtccccctccccagcccccctcactctggccacctcaggcccactcttttcccctcccacagttccctggcccatctggctcacatgcaataggtatgggacctcttttgtttctcctcactccacccctcctttcttcttccaaacccttcactttggctcccacacctcccagattcatctgaatctccctacttctgggctctctcctcctatccttggcacactaccaggagagttgttctagatggcctctcagattatgtcaccctgcttaaagcctcatggctccctattgcctcagggctgaggctaggtttctcaccttggacatgaaaggaatttcaagtctgtctctggcctaccttgaggaccttgtcccttattgctgtgactcataaactacagtgcagccactccagacttttcaccatggaggtccccactcttttgtgctgctccttgtggtgcccgctcatctgcctccttttgttggccataagggccagtgagcagggtgtgtgtctcatttctgcatgctcagtgcccatcacagagcctggcacagagtaggcttgatatgtacatgcacagtcacttacgtatttatatctatatatagataagatactagagtcagggccttgccctgttgcccaagtgcaatcatagctcactgcagcctcaagctcctgggctcaagtgatcctcccacctcagcctcctaaggagctaggactacaggtgtgccaccacacccagctaattttttaatttttttgtagagatggggggggtctccctatgttgcccaggctggtcttgaactggcctcaaatgttcttcccaccttagtctcccaagaagctgggactacagggccagcacacctggctcacagatatcttttgagcgctgtgtgctataggctatgctggctgctgaggatacagtatctgccccacaaggagtggcaagcacaggttttggacagtgaattgcaaatgtaaggtgtattacaaaaggacatttgtgttgaatggatgaacagatgaaatattcaaaggcaaagtgatgaggcagctctggcttaggtcccatctctccactcctgagtcaatagataagccccttggcaaagccccagttggcctccctgacttggttctgtgattgcctctattcatagttgtgtcttgtgtcaggctacctcagttcaaatctagattctgttgcctgttagctgggtgaccttgcaaaaattacctagtctctctgtgccttggtttcctcctctgtaaaatgaggatagtcatagtatctacttcataggggtgtggtaaggattaagtaatacatatcaagtt

SEQ ID NO: 1244334 - DNA, 4001 bp, Homo sapiens
ctagtgacttgtgaaggtcttttcattttacccatctgtaaaattgggactaatcaccttaacaaaaatctaaaagctcctgacatacgtatattaatcgtcatgaattacaaaaacagaaggaccaaatgtttcaagaatcacaacatcttctataggactgggaattctaatcatgacaatactagagtgcttattcaatgccatgcactgtgccaagtgctttacatgcattgtctgaactaggaaattaggctcacggaaacacttacctaagataacaatgcaataaataccttgtagagtcaggatttcaaacctagtgcctaattccacaggaaacctaaactcatcagctttattctattatgttctctcagtctaggcactgagaagagaaaatgccatcaccacttattcaatcacaatattctattgctggtgattctgatgagatttaagcaactactgtcaaatataaagcaaaatcaatcatacggtacaatacctggtatatccactgccgtgaaaatctgtcctatttaagctcctgatgacagtttgctgtgtggaagataaaactaatcaacgaaaatgttttgcagtctccctcccacccttgggaagtgtgactccaagtactcagcaagagaataaagtaaaagttcataatgtacttaatactgaagtccattatgagaaaagaaaaaggacaacagaactgcagaaggcaaaccaatgacagggaggggggaggaaaagcagctgtaaccatccaagtactaaggaagcgcttaatacagacgagaaacaaaataaccaggttaacatccaaacccctaatcaaatcagattaaacgataatgcttaacgcccccatgagaaatgtctgacacaagaaatcaaacctaatcataaaaaatgaggaagtctgggtgggaaaaatgaaagatgcaattaaagcgcgctattagatataatgaacgtttattttcatttctggactgcattatgatgggcacttcaaaggagggaggacagattccaactcaccgccacatttccacaagtttgaaaggcagtgaacataaacataaaggcaactcctaaaataatgatgttgaaaagctttttagattccggggacattttggctcagctctgccggaggcagcagcccagggcagtcagctctcctcggggcgaagccactgacaatcctggagaaagaaatgagatggtgagtggagaaggcagatgcaggagccaggcagccaagctgtcaacttccagttcctggatcggaaccccaggtttagggcgaagttctccccaccggcagttaggatactcctaagaagcgatccgagtacggaagagcacaacccccggagaagcgccaagaatttatccgctccaggttgaggggcccacgaaggggattaaagggccaagtgccagccgcagcagccggcgcggccccgccctcccagcctgactcactgcggccaggcgaccgggtcacctgaccgcagccgcggcgccggccgctcggcccgctgggaaacgtagtcccgggtggcctggcacgcgcaagcgctccgcggggagtccccaccgccaggacgcagagccgacggagctctcgggctctggcgaaagggggttgggaagcggactccggcgaagagcagtcaggaacggctggacggggccgagagacgacgcagcggagtctgagggggccggggtcacagggagaggcaaatgagggcagaagcactcttcagacggagacggggctgacggctgagcaaaaaaggggcgtgaacttggagtattggcatgaaaaaaaggtgggggcccagatggggagcacctcctcttcctcctgcccaatcgcgatcgtccggcctcccaggcggaaaaagcgtttcgcgggctttccaactgcccgctaattccgctccccctccctccagccgtgactccgcgctttttggcccgcccgccgggctgtgcgcaggcgcttcgggtaggggcggggcgcgcggcagggtcgttacgaagcggggcgcggtgggccaatcagaaggtttcatttccgggtggcgcgggcgccattttgtgaggagcgatataaacgggcgcagaggccggctgcccgcccagttgttactcaggtgcgctagcctgcggagcccgtccgtgctgttctgcggcaaggcctttcccagtgtccccacgcggaaggcaactgcctgagaggcgcggcgtcgcaccgcccagagctgaggaagccggcgccagttcgcggggctccgggccgccactcagagctatgagctacggccgcccccctcccgatgtggagggtatgacctccctcaaggtggacaacctgacctaccgcacctcgcccgacacgctgaggcgcgtcttcgagaagtacgggcgcgtcggcgacgtgtacatcccgcgggaccgctacaccaaggagtcccgcggcttcgccttcgttcgctttcacgacaagcgcgacgctgaggacgctatggatgccatggacggggccgtgctggacggccgcgagctgcgggtgcaaatggcgcgctacggccgccccccggactcacaccacagccgccggggaccgccaccccgcaggtacgggggcggtggctacggacgccggagccgcaggtaaacggggctgaggggaccgcgggaggcggggcggggcgcgcgggaggcccgggcgacctcacaaaggtccgcggcgaagcacgtggtgcgggcccggacggggcgggggtgcacgccgcgtctcgcgaccctccggccaccccgcgagcttccgccgtctgcgacccgggagtggccggggtgtgggcggcgcggggcggaggaccccgcctcgcgactggggaaatggcgtctggcggcgagataatggcggcctgggcgggagcgcgcgggcggggccggccccgctgcctggaattaaccccgctgtgcttgctcgtcccgcccgcagccctaggcggcgtcgccgcagccgatcccggagtcggagtcgttccaggtctcgcagccgatctcgctacagccgctcgaagtctcggtcccgcactcgttctcgatctcggtcgacctccaagtccagatccgcacgaaggtccaagtccaagtcctcgtcggtctccagatctcgttcgcggtccaggtcccggtctcggtccaggagtcctcccccagtgtccaagagggaatccaaatccaggtcgcgatcgaagagtccccccaagtctcctgaagaggaaggagcggtgtcctcttaagaaaatggtaatgtctgggaatccgagacacataaccctaattcataaatgggatttggggtaggtctttttgagtcgtgttaatgtaagaatgactcctatcattaggagtgctgctcggaggttactcacctttgggagtaatactgaagagaggggtctgcagaaaggatgtgtatgaagcttagataataatggctgtttcgtaaactgtttgagacctattaatgaaaatgactatttcttgctgtttttatccaacgtctgcattttccccctttaaagctgcggtctcctgtttgataaaagaatattggccagtattgcagattttaactgatttggctgatcctccagggaccagtttctgtgggcgtgtattggagcaggtttgtctttaaatgttaaagatgcactatcctcttagagaaacaatcagttcaactattgttgtactgactgggacttcatattctaatggatgtggcaaaagaattgcaataagaagcagtgaacatttggaaccccaaaagaaagttacaggtattgcactgggtggggaaaggatagtgtgtctttaactcttaaattgtttggtcctattttttaaaaaggaaagggccctaagtagctcagatattaaagtagtattctcaatta

SEQ ID NO: 1244335 - DNA, 4001 bp, Homo sapiens
tgggaaaaatgaaagatgcaattaaagcgcgctattagatataatgaacgtttattttcatttctggactgcattatgatgggcacttcaaaggagggaggacagattccaactcaccgccacatttccacaagtttgaaaggcagtgaacataaacataaaggcaactcctaaaataatgatgttgaaaagctttttagattccggggacattttggctcagctctgccggaggcagcagcccagggcagtcagctctcctcggggcgaagccactgacaatcctggagaaagaaatgagatggtgagtggagaaggcagatgcaggagccaggcagccaagctgtcaacttccagttcctggatcggaaccccaggtttagggcgaagttctccccaccggcagttaggatactcctaagaagcgatccgagtacggaagagcacaacccccggagaagcgccaagaatttatccgctccaggttgaggggcccacgaaggggattaaagggccaagtgccagccgcagcagccggcgcggccccgccctcccagcctgactcactgcggccaggcgaccgggtcacctgaccgcagccgcggcgccggccgctcggcccgctgggaaacgtagtcccgggtggcctggcacgcgcaagcgctccgcggggagtccccaccgccaggacgcagagccgacggagctctcgggctctggcgaaagggggttgggaagcggactccggcgaagagcagtcaggaacggctggacggggccgagagacgacgcagcggagtctgagggggccggggtcacagggagaggcaaatgagggcagaagcactcttcagacggagacggggctgacggctgagcaaaaaaggggcgtgaacttggagtattggcatgaaaaaaaggtgggggcccagatggggagcacctcctcttcctcctgcccaatcgcgatcgtccggcctcccaggcggaaaaagcgtttcgcgggctttccaactgcccgctaattccgctccccctccctccagccgtgactccgcgctttttggcccgcccgccgggctgtgcgcaggcgcttcgggtaggggcggggcgcgcggcagggtcgttacgaagcggggcgcggtgggccaatcagaaggtttcatttccgggtggcgcgggcgccattttgtgaggagcgatataaacgggcgcagaggccggctgcccgcccagttgttactcaggtgcgctagcctgcggagcccgtccgtgctgttctgcggcaaggcctttcccagtgtccccacgcggaaggcaactgcctgagaggcgcggcgtcgcaccgcccagagctgaggaagccggcgccagttcgcggggctccgggccgccactcagagctatgagctacggccgcccccctcccgatgtggagggtatgacctccctcaaggtggacaacctgacctaccgcacctcgcccgacacgctgaggcgcgtcttcgagaagtacgggcgcgtcggcgacgtgtacatcccgcgggaccgctacaccaaggagtcccgcggcttcgccttcgttcgctttcacgacaagcgcgacgctgaggacgctatggatgccatggacggggccgtgctggacggccgcgagctgcgggtgcaaatggcgcgctacggccgccccccggactcacaccacagccgccggggaccgccaccccgcaggtacgggggcggtggctacggacgccggagccgcaggtaaacggggctgaggggaccgcgggaggcggggcggggcgcgcgggaggcccgggcgacctcacaaaggtccgcggcgaagcacgtggtgcgggcccggacggggcgggggtgcacgccgcgtctcgcgaccctccggccaccccgcgagcttccgccgtctgcgacccgggagtggccggggtgtgggcggcgcggggcggaggaccccgcctcgcgactggggaaatggcgtctggcggcgagataatggcggcctgggcgggagcgcgcgggcggggccggccccgctgcctggaattaaccccgctgtgcttgctcgtcccgcccgcagccctaggcggcgtcgccgcagccgatcccggagtcggagtcgttccaggtctcgcagccgatctcgctacagccgctcgaagtctcggtcccgcactcgttctcgatctcggtcgacctccaagtccagatccgcacgaaggtccaagtccaagtcctcgtcggtctccagatctcgttcgcggtccaggtcccggtctcggtccaggagtcctcccccagtgtccaagagggaatccaaatccaggtcgcgatcgaagagtccccccaagtctcctgaagaggaaggagcggtgtcctcttaagaaaatggtaatgtctgggaatccgagacacataaccctaattcataaatgggatttggggtaggtctttttgagtcgtgttaatgtaagaatgactcctatcattaggagtgctgctcggaggttactcacctttgggagtaatactgaagagaggggtctgcagaaaggatgtgtatgaagcttagataataatggctgtttcgtaaactgtttgagacctattaatgaaaatgactatttcttgctgtttttatccaacgtctgcattttccccctttaaagctgcggtctcctgtttgataaaagaatattggccagtattgcagattttaactgatttggctgatcctccagggaccagtttctgtgggcgtgtattggagcaggtttgtctttaaatgttaaagatgcactatcctcttagagaaacaatcagttcaactattgttgtactgactgggacttcatattctaatggatgtggcaaaagaattgcaataagaagcagtgaacatttggaaccccaaaagaaagttacaggtattgcactgggtggggaaaggatagtgtgtctttaactcttaaattgtttggtcctattttttaaaaaggaaagggccctaagtagctcagatattaaagtagtattctcaattaccaaatgtttcatttgaaacaatttatcttaatgaaatatagaccaattctctgatctcgagttgtttttgtttggatacagcccttttttttttctttttttttcttccccttacctttcttcaccttggttatttggccaggaatacgtaaattcaaacttgtacatgctgatggtagcctttgtgaaattttcctaattgggccttttaaaaacatggctgggtggaacatttctgtaccctactggtttgaccagagccttagtaagtacgtgcctgaaactgaaaccatgtgcactttaatggaaggtaagctgaacttctttcttttcaaacctagatgtatcggcaagcagtgtaaacggaggacttggggaaaaaggaccacatagtccatcgaagaagagtccttggaacaagcaactggctattgaaaaggttattttgtaacatttgtctaactttttacttgtttaagctttgcctcagttggcaaacttcattttatgtgccattttgttgctgttattcaaatttcttgtaatttagtgaggtgaacgacttcagatttcattattggatttggatatttgaggtaaaatttcattttgttatatagtgctgactttttttgtttgaaattaaacagattggtaacctaatttgtggcctcctgacttttaaggaaaacgtgtgcagccattacacacagcctaaagctgtcaagagattgactcagcattgccttcattccttaaaattaaaaacctacaaaagttggtgtaaatttgtatatgttatttaccttcagatctaaatggtaatctgaacccaaatttgtataaagacttttcaggtgaaaagacttgattttttgaaaggattgtttatcaaacacaattctaatctcttctcttatgtatttttgtgcact

SEQ ID NO: 1244336 - DNA, 4001 bp, Homo sapiens
ctcagccctttcagtctgagtgttcctccctcatggccttcacaagccagtcctgttctgtcccctgctcagagtcactggtgtcactcacctccatggacagcagcttcgagtacttgattttccgctctcggggcagcctccgctgtatggacaggagcaaggccaaccagagcaacagggccacacagcaggcctggtagagcacagccaggctgaagcgcatcaccacgaagcccccgacaaagctgcccaggctacagccactcccgtaaaagtggcctcggaacaaggcactcagagccctctccatgcggggagtggccaggtcctctactgaggcccccacagcccaccacaaagctctgttgctaatggcactcaagatctgaatggggaggacggaccaccagctccagaggaaagagtagtacagcagctgcccagcgaggcagctcagccccagccccaccaggcccgtcctggacagtttcctaagcaatgtagctttgaacggatgaagcagaatttcccccagcaagctgagggcgaccgagaaacccatgaccagctcgccgctcccatggtccttcatgtgccagaacagaaagttctggacagtactgacgatggctcctaccaaaacagtggtggaggcgaggagaatgaggtgggggtcaccccccacaatggacagtgctttgacccttttgtagctgggctcccactgctgacagatgggaatgggaaaggcaatgctcaccagtaaggccagggtgctgaccaccgagtacccatagaagtggaccacacctcgggggccactggtcatcaggaagcagtccagctgccccaccaaggctgtgatgccacacacgcctgccgacatgcccagcaacctccagacccacaggcttctgtatcggtcagtggcatccacaaaatccaggaactcataaaggctgtcatctgccacctgctccagaggcgctgtcagcagctcccagaacgccacggaccccaaggagaggataaaagtccgccgcaacgcctccaaggacaggtcaaaagcccaggctttccccttggtccctgacaaattggctggattcccgggccctttccccccaggaagcaaggggagggctgtcttgaccacctcaaaagtaacttcccagggatgatctttcagccccgaagtgacaggatggaggagagcttgggatgtggtcctagctccttcaacggagggcgctaagtagacgtgcagatcacggaaagtttctcggtcactttcaccaggtgggtttctgaagccaggcatttccacctctgcagtcctcttggctgggtggctggaggcagactcttgggccgaggtgatgttcacaggtagcgtgacccccgggagtgcgtctgtgctggtcaggccgctgcttccattacaagggaagtgcacccgatttttgtctaccggtgggaccaggaccatcagcaggctggcccccaccgagccgagcagggagccgatcagaagcgctctccttttccggtagcttttggccaggaaggcacagacgggagcccagaaggcagcgattaggtgcttggttcccattagggtgcccacccagggcgcggccaagcccagctgcctcaggtaaagggtcaggaacggggtcacgcaggcttcccgcaccccgcacaccaggtggaagagcttggccacccccagcgccctgctgatgtcccaccgggggttggcactcatggctgccgggctctgtcaggcctgggccgacggagggcggagctgggcgcagggcgggcgcggccccaggtacccgggagggaggcttgggggaccggggctcggagcgagtgggactgcgcccccggtctggggcggcgccgcggtcaccaggtcaacggccgcccccggccacagcccccaggtcctgccgttggaccgaaaggggccccgcccggagggagaggcggggcgggggcgaaggtgggggcggggccagcgcacctgcgagccgcacctgccacgtcccaccgcctccgcgggccacctgcccggacgtgcgcaggtgcgctaggggcgcgtccgggggcctgtagggtgcgctctgagctaggcctcgggccccgcctggcctctggctgccaatgtggcccaggagcctgagctaaacgcctggactgcttcaggcaagtaaaaccgtcagagtcggcgtgggggggagccagaatggaatgaatggtatccaccaggctgtctccctcatcttcttcaggtctgtactggaatgcaccctgatcagtgaccaaccacagacagagatcaacacggtccactctgacatcgcaaatcccatacccctgtacccaccccgcccccaagactcccactcccctgccctacttgatcgttctctctagaacttatcactgaccaaggcactacgggcttatatttcatgtgttgactttgtttattgtctgtctccaccagaatccaagctccaggaaggcaggtatttttgtccccggggcctagaattgtttcattggatgcatactgccctcggaaatggcatgaccttgggtgacatggttgtctccagctgggacagtccctaaggagggctgacagctgatggcagtcgtccaggggaactccttgcagccgatcgccagcacatggcagtccccagagccatatgtatgtgctgcacagttttaacctacacctaagggtggtctggtgccctgtttgagagtacacacacttgaggtggttagctagcatttcatcaaaaagacagagacagctagtacaagcacgtcgacaatcttaaatcaacagaagtgtcttcactaatggacataatagatattagaaatagtttttcactggtgaaattagtggtgtccaagccacctggattggagataatttttttgaaggcatttcctctcttgctggaacaggctataataatctagagatggcctggtgcggtggctcatgcctgtaatcccagcactttgggaggccgaggcaggtggatcacgaggttaggagatcgagaccatgctggcttacacggtgaaaccctgtctctactaaaaatacaaaaaaattagttggttgtggtggtgtgtgcctgtagtcccagctccttgggaggctgaggcaggagaatggcatgaacccgggaggtggagcttgcagtgagccgagatcacgccactgcactccatcctgggcaacagagtgggactccgtctcaaaaaaaaaaaaaaaaaatctagagatgccagtagtccaaaccctttggaaggatgctataggctttgcttcaaaatggtccagtgtgcagctcctgattcagtaaacttttcatacaaggtttgctcagagcacctaatttggctgggggtggagtggaactgcttgccaacacatgtctatgtgtaagggaattcggcctatgacttgcctgcattgtcagctggtagagagtatgttggggagcaggcccaggggcctcacttaacctaaaaaactggtaaactctgcagacatctactgaaaacctaatgattggtgatgaaattggtatgaatccgtttatatcataccaatggcaggaaaaataaaatctagtctcctccaggtaaactcactcaaattcagtgctactgcaatcatttcaggtttaaaaccacctcagtcacactaatgattgccctactcctgcccctccctgggttcttctgtgggcagcctcagtggaggatagcgcatccatccacttctcagtcctgacctgtcctgggttcatctccactgggaggcagatgtcagactccaatgtgcctggacatgtgcaggtgtgcgaggggcatgtcctggggcctgcagggtgcacctggagctagaccaagggccccgcccagcctctggctgcccatgttgcccaggaact

SEQ ID NO: 1244337 - DNA, 4001 bp, Homo sapiens
gggtctccgggcagcccagggagaccctggggtgaagttacacaactttggggacccatgcacctccacccccaatcctgccttcagataagggcctgaaagaaaaccagggcaggaccagacagggaagcagccctgggtcgcgagcactgtccgtggtgctggggtctcgcggctgcttccaatcgcgccaggaaacacccagcggcccggagggcgggacagggatggggtcggaaggggcgaggaccctccagcgttcccagtcaggccagggattcaaggccttccctggaggagcaaggccctttccagagacgcctgcttcccgccctgcttcccatgggctcccgacgcccccatcaccacccacggcctgcaccagctctccgggcctcccggacccccggaccgcagaggtccagcctgacccctgccgtcccctggggttgcctcctcggcccagcagacaggcccggtgtgctgggaggcgggctccaggtgagccaccgtctccccgcccccatccccgtctggagccggcagggggaccacagtggggctgggccgagacctggagggcaagagttcagggcccctgcaagctccgccttctcgggctccttcccgcgcccggagcccacctgtggccacgtcccgagtccggcccccgcgccggggcggtcactcccccagcttcctcgctgcccagctacccacggggtgacactcgggccccgccgggcgtccactgggcagcgccccctccccaccccgctgcgggccggttccgcggatgcctgggaggagagggggctgccccggcaccgctgggccctgggggcccctggctgggtccagtgagtcccgcgcggccccagccctgcctggcctgggcccccaggtgttggccgcccgaagcgtgtcgccttcgccaccgcccgcccaccacgctccgccgcagcctcggctccagccgccccgtagccctgcagcgccgcccctgcccccgcctctccgacgcctgcgatcgggggcgaatcctgggatgagcgagtcctcgctctaatctcgggaccctctcgtcggagccaggcccgagccccgcggggaggagagcagtgccaccaaaggctggggagagggtggcacaggcggaggggttggggggtagccgacctaggggcagacgggcgggacgggagggaccggagggggagctccaaggcgccgcacactaactttgccacccggatgggaccgtccgcggggtgaggaaggaccctgaggggctgggaaggggcgcgcaggctggggcaactttctgggcccaggaccacgacctgggggttttctgcccccattcttacctctgcaccccgagtcctctccaaccctgcccaactcgggacaggtccccgaataacacaaccctccccatccgcaccccgaaccccaacgccatccgttcccccagcccagccccactggtcatcaccaggggttgaagtgtgaaccgccccctctgccaccaggacttgaacgttcgcaggaaccgacctcgcccacctccacccggcgcccccctggggaaaaaaccaaccaggagggaactttaccgaaagggtctcagggtgaccaggcatcttctgaccattatcttcccatcggggttgacggtgatcattgttcaaacttgttggtgcgagcagccgcgggcgaggccggacgcaccgtcctgggcccagctctcgccgcgtccgggccacgaaccctctgcgggccgaagccgcgtccgagcgaagctgggagcgcgcggcccggtggcctcgctgctcaggcctgggcgtgcagcggagggagcggcgcggctgccggagggcggcgagggcgcccggccgggccgtctctgcgtctccgccctccccgcttcacattttggggaccgggaggcggcgcgcccccagaccgccggccgcgcgtctgcctgctcgggctcgctcgctgggcgggaaggtgccgcggcgcgcagacgggctccccgcggcgggcgccctcatccccggccccgcgccctcggtgccggctaaaggcggccccgggcccgcgccccggtccccagcgcctccgggccgcgccgatcctcagccccgcgccgcgccgcgcccatggctctcgacgagggcaacccgcgcccgccgcgcgctctctcgcccgctggctccgccgcccgcgctctggtgtccggcgtccggccccgcgcgacgctacgcccggaggcgccgcattgttcctcggaggaggcggccgagcggcgctggggcggcccgggagctgcagctgcgcttccaaggcgcgccggcgccacctcgtggccgcagccccgctgtgcgccctgcccggggccgtgcggggctgggacgccgaggaccagcttcgaggacgggcgggcgggggtccctgctccttcccctgagccaagcagcttcccagggcgccaccagccccgagggccgaaagctgctttggctcccgcagagcacagaagagatgcgcacccagcggagacccttctcttctgccaggtgcctccgtgggcttcctcatcagccgcttcccacgatttcgcttggcaacacatgcctatcttctgcccctccctggtcagaaactcccgtggctcctctttgcttactgatctgagtataaactcggcctgtggtgctggggcccgctcacagagccaggcgcaggggcgtactgagttgtagccccagatcctccactagccagtgggcgatcaagtgtgcacgtctcagagtctccattatgaaatgatagtgaccagaagctcaccaaggtcccttgcaaccctaaagcatgtaggatctcatgtcgtctcttagcatctaggcgtcctcccctccccctcctcgtacttcctggctctggagatgtgtttgcagttgcagagacagagactcctgggagctcgcagagccagcctgaagaaagctctccggcttcaaaagcacttcccgaggtcatatctgaccaccccaccctgggaagtgcccaaagcctcagtcatgtgtcaaatgactctgagggtcttcccagctcaggccacgatgctgcagcctggcttatgcgaggaggagactttattttcctccagctgggcctggtcccctccaatcccccatacccaggccccttgctgcctgccctgcccacctcccggcccccttcctgggccattactcactggccatgactcacgctctctgctttgctgctccttcttcatcaaaatttaccggtgctgagttccattatctcactgccttgctctctgctaatgtgaaaatgggtgataaattggtgttagcagatataatgtgttacacaggctaggtaacaaatttgcattgaacaaggacatgctgaccgtgcctttgtgcagaagagtgatgaatggtggccggaaatttgggcatcgtggcaggctggctaaggagatgttggagggcagaggtctctgccaggcctgtaaatcacatctcatgcctgggtgcctacatctgccacaaatcctggcaataagccatatctacactaaggaatgaaatggtccttctgattaggtgtctctcttctgattgggggttcttctgattgagtaggcttagggggtggcatttatatctggttgccattttaggccaaaggggaagcctcttcctcagtggtggagatggggttccctagaaggcatggccacctctggtgtgggtcatctggggaggtggcctaccctccacagaagccagaatttagaaggtaggggaaggtactcccctcttcccctgggccacacacccttagatctggactttgaagttggagcgggaaagcctctctgccatttgacggctggcttgggccagggagggaagcaagcagaggacagccagtgactttttttttttttttttttt

SEQ ID NO: 1244338 - DNA, 4001 bp, Homo sapiens
acccctcctctcccccatccctaattcccacctcttagacccctgacctttctggaggttcaacttcctcaaggcctctgtagcagcccacccagataggcacacctcctttccaggggtggcagccaggtagtttatgaatctctgtctacaccccatcttcccatgcaccacttttcccaccagcccttccccaagccacccttccggttcaccttcacgactgctccctcccatccccacccacctcaatcctcagcctctcccacacagacactccagcacctccttggtcctctttcataaacacgctttgctgcagtgcccccatttcagactcgacacatccattaagtattgatggagtgctcgccgtttgacagatgctgctgaggccccttcccttgctttatctttgcacagcctcgcaacgagcctgggaagtgggtattaccatccccatttaccagaggaaaatttggaggctcagagattgaggaatctctgcaagtcagagacgggataaattaacttacactcaggcttgaatgactaataagcgtgagattccttctgagggcttttgcaagtttaaagaagtgcatgtgaaaccagaggaatgaatctaatgatgagatgacagatggcataataagagcccctcagcacccacccagatgacaacctatttaacttgggatgtctacaatattcatcactcagaacaggggagccagaaagccaagccctgcaagttcaagaaggtggacttcaaggagagacttccccagaggggcaggggaatctcacagagccaaccctcgaacagttccagaaacctacttgcctcagtttccccactaccccatgtccctccttttgaccagtgaccaaaagaacccccatgatacagtgagcagggctcagttctgacccccacccctccttaggtgagatgaggtggggctgggcccagcttcaggaggagggctcccagctggtcactcttgtgccatgtggcaccaaccatgctgggtaatgtccacgtgtgagccccttcaatccaacctctgcagaaggtcactgctgtccttctctgtagggaagccaggtgactcagccaaaggcacacagctggtaggtgatgacaaggatgcaagcccagacccaccagacgcccaaagcccatgctctgatctccattccactgccttgcaaatatcgtgtgggcaaggagtgatggggcctgggagggagctgtgtcccaagagctcagagataagacatttaagcccatggccaggcccgttcccacatggccacagcctgggccaaaggcaaggaaatgtgtgcctcaaggagacaagtgtcatatccagagacctctcacccctgacacccaactaaagaagcaacactggcagcctcttctgaggcctggaagaccctggcttaaaggccctagcctggcctgagaatccaggccagaggaaacctgatgaccacagccagaccagagccaaagtgcatggagggtcatacggcccaagcccaggccccctccactcacatccacctacagggcggccagaaagccaggtacagggctaggctcagaggcacttcctctttgacccacaaacgccctcactcatctcacactccccttgccccaccaaggtaccttctgtgcggatggtgaatggcgagtcccccaggcgccgggccgagaactggcctcccagagacgtcatcaggaagcagagagtgaagaagccgatgcccaggacaaaaagcctgcggagaggaaggaggcgggtcaggagggcaggaagggccatcgtgccctgacgctccaccacgtaccggctgcacaaatgttttacgaatgagtgcatgagtgaaggaagcaagggagaatgaaaggatgggggctgagctccagacccaggagggcccccccactataggataaagagagctcaactacaagatgctggcctcgagccacacgagaaaccacaaggcagaatgacgcacacttaggcatgaggcaggcgggctctagcctccaggcagagctggttcattaacagctgcagtcctgaaagtgcagtccccagacgagcagtcagcatcacctgagactccttagaaatgccaatgccgggcccagaccccaaattactgaatcagatactctggggtggagcaagcaagctgttttagcaaagtctcctgaagattccactgcatgctaaagtttgagaaccagtgatggacacagcagggcctgaggccagccagaccccatcaatcactcaggccagccttggtgcagtgtgcagaggccttgctgcagcagtcatgagcttgtttgaacacccccctccacttccaccactagatggtaagatgtccagggcagagccacacggcccatgcccaggctccccccaacacacatctcccctaggcaggcacgcccagggtcatcagcctgcaccacggactggccagggtgtcctcatacctgtgcaaggggtgtcatataggtgtgtgtgctgtcacactgggtgggagggagggctggtcagaacaggactcctgttcctgccttcaacatgtagttattgattatccagcaggagccaggctctggggtaaccccagggggacagcagggaacaaggcacagaacccttccttcctcaagtccagacccagggtcctgctgcttccctcatcaatcctaggccccaaacaggcaagctgagctcaccagcacagccttggggctcttctgggaacttgaacctatcagaggacttgatgaactggtagagctgagaggggcgccctcccaccaaccccagatcagggtgaggaaccccatcttgtgtggagtcaggctccctggagagagccccacgtcatgccagagacctccgggccttgcccctccactccccgccctcaagttccatgcttgtttgtgtctttatgcaagacttgctttatgcattttaatcttcattatttgaaactggcagagcagtatttaattaaaatttggtccattaaagaaaacatataattgcagaaggaaataaaaagcacaacaaaattcccagcccatatttaaaggaagctgttagagatttgggcagagaagaggagaaccccaaagcagagaggggcttgggagctccaaggagagactcgaagaccacacccccagcaggaaggacaggagacatgattcagtaggcaagaccgcgcaagggacactttccttagcgcagagggacgcctcacggaattccaccaagcctgggggtggggctcagatcttggggtccctcagaggaagtcaggtggctctggagacaacagccacggccatggcacaggagaggtgctgtcccatgctcagggagatcccaggggaaatcagctatttgtcctcccagtctgaggacaaggacggacttcccccactcatgtctctagtccctggagaagaggccaggggagtgaaggagttgtatttagagctggggacctgggctgcctgccaggatccaacaaccctgctatgagaaaggtgtctacccccttcagcccagaacctgaagccccctaacacacctcatctgcatctccctctgccagaaccccatcctggggttcaatgtcccccaaggcagctgggggccatttggagtggattcaagttaaaatggcttcagccatccatgtatccactcaagcaacattccaggggcacctatggaataaagaccctgccagcagccctgggaaaaccacagggaacaggaccccagcctgcctttgaggatgaataagctggggtgctatgattgcagcctgccccccacctcaactgaagggactcactgatggctgcgggtctccgggcagcccagggagaccctggggtgaagttacacaactttggggacccatgcacctccacc

SEQ ID NO: 1244339 - DNA, 4001 bp, Homo sapiens
attttacaactatgtaagttgccataatttaaagttaaaaagatcactgcctttcattataatggaagttaatttgagaacttcattaaaacattcacaccgataatcaaagaacagtagagatacaaagtaagatatagccaatcaatcctaggaagcaaacacaagaggcaagagaaatggcaggtaaaggaagtgaagaatagcaaattcaaaaactacaatattcccaattctaaagaaaaatgaataaaatgaggctggtaatgaaaaaataacacatcttaccttaagaggcatccaagtagcattcatagtgtcaggatataaagacaatactcagaaatgagcaagaagtcttagaaattccctcggttaccaagtataagcaggtaggaaaatcttttgtttcgagaaggtatctgaaagagaggattttcatttagactaaaaaataatcaagacaatgcaaatagtttaagctacctgggcagggattttgaagtactatttgcctcatcgcactaaaaaagtatagaaaatacagtcccctttagaaaagggcaaatgtgtgtctccatatatatgtgtgtagaaacatactttacataaaaagagaaataaatatgtaacacgtattttagataatgtaaaattgcttatcaaacaattagccaaaatcccagagagaataaagtaattttccagggtacttcataaacactaaacgtgatttgttaattaaccgtctaaaaaagacccttgccacatttaattatatttagtaaagtaaaacttctctaatcatcccgactgtcccaagattatgcttaagtttcagagtcaattccacatgaaaagtaaaacctattcttgactgaagtactagaaacaaataaaggacccttcttccccagagatcgttaaaagcagaccgagcaacttaattttgagggtgggaggaaggtaaatttgcctggaggcaggaggatggactaaatgacctctggtaggatcctcgttcaagtcctgggcctgtatacaattccagcttaaccagttactgcttcgcttaaaatggaggcttgcccgcgtagggacaaaaataacagcacccacttcttaaaaataaatgtcgaaaagtacccctttttaaataaaaataaaaaataaacacctctggagtggatgtgttcttgctatgcgtttgtcactgaggcttcgaagacttggcatcactttccttaccgctcaccggattttgggggaggagcggggggcgacagtttgactcttgacccaagtctcaggcggacttcagagccccacaggggcccccaactccagagccagagggagcggagaggcgagagcccgagatcgcacctccccccaccgcggaccccagtcccaaacccacccctcacctccccgcagtggggcgcctccttctgccccattcccattgttagggagggcagagcgcggggtgggctcagggcaggggcgcccgcggccgctgcccggctcgcttcaggaggggcgccccgcgggatgcggcttcccttcctctccgcgtcggtccgtcccacctcggctcggcctggcgccccgagctccgctccgcgcccccggccgcggccccggcccgccccccgggcagccaggccctcaggccactcggccggcagcccgcgtcccaggcctacgagtgggcgctgggcgggcgtccccgtgccccacacacgcgtcccctctcccccagccccgccgcttccagggccctcggcggcgcccgctccccgggccccgcggccccccgcctcccagccaggccgctccctcgagctcgtcgggtcagggacacctcctctacctcaccatcaccctggcccactcgtgcccccacccccaggggcaccagtgccaaaggcagctcccccagccccggacctacctgcacggttcaaccaagcctagaagtgggggcggggaatcttccgccctcctctggcgctcattggcccttcaggggcacatcgtgagcgccattggctgagcaatggtgtccgtcagagcgatggggcgggacagaaggggaagagggatgcaggtgccttggcgtctctgtctctgtgcatctcgttgtctctgtctctgtctcagcccttggaaacgagaggcttttggctgagaggactagaagggggcctgaggtgggaggaataggaataggaatcctgacagagcgtcacgccagttggcaactctgaaccccctacctaagtcccctttaggttctcttctccatcacccccaacccctgcccctcacccctcgagattctttcatccaggaagcgacgtgatgaaaactccaggccggaaggccatagggagagatgttatatatgtatataaaatatacacatataaatgtttatatataaactcaaccagatatcagttcactagggcctggaaaggaaagggcacacatctcacagacagggaaggacttgagatagagccggtagaagaaggaatcaaaaatcactctaagagctggcaacagtggttacctcctgggagaggaactgagtgcctagggaaccagtgggcggaagacttacatatctcggcatatcatttgtatccattgatttttgcaccactcatcaagattccaatttaaagaaaaggatttaaatgtttaaataaggtcgcaaaaccaggggacagacaagataattgggcaggaaaattggcgcaacatgcagatttggggaggaatcttagcttttaatatgttcagttcccggtaacagggttttgtaaaacccagtgaaggtgtcccagaggcaactgaagttatggaacttgagaaagggtagacaatcaggactagagaagatgcagggtcctctgcctaaagatagtgatctatgacatgctaaaggataaactcccaaagaagggtaataagacacccacagtaaaaggtaggaggacgaaaaagaatgtcagtgaggtaaaagaaacaatattaaagaggcatgaaaattaagggaggaagggtctgtggaaaatagaataataaaactatgagagaggccgggcacggtggctcacacctgtaatcccagcactttgggaggccaaggtgggtggatcacctgaggtcaggagttcgagaccagcctgcgcagcatggtgaaacccgatctctaatagaaatgcaaaaaaaaaattagccaagcgtggtggcgcgcctctgtaatcccagctactggaaaggctgaggtgggagaattgcttgaaccgggaggcggaggctgcagtgagccaagatcgcgccactgcactccagcctgggcgacagagcgagaccctgtttcaaaaaaaaaaaaaaaaaaaaaaaactgtgagagcctcataggtcttacctctttacctctttaggctctggtaaccatgggacaataagaatgaaagccaaggccgggcacggtggctcacgcctgtaatcccagcattttgggaggccaaggtgggcggatcacaaggtcaggagatcaagaccatcctggccaacatggtgaaaccacgggcatggtggcgcatgcctgtaatcccagctactcgggaggctgaggcaggagaattgcttgaaccagggagtcagaggttccagtgagccgatatcacgccactgcactccagcctggatgacagagtgagactccgactcaaaaaaaaaaaaaaaaaaccaaaaaaaaaaaaaaaaaaaaccacctttatcgattaagaatcttttttctgagtttattaattctatttaaatcaaccccagaaaacaccttcaacacagcctctcatttcatatctgtaaaatggggcaaaaaaaatagttcctaccctttagagttgttgtgaagattaaattagtgaatacatatgatggattttttttcttttctcttttttttgagacacagtctc

SEQ ID NO: 1244340 - DNA, 4001 bp, Homo sapiens
acctatcatttctttttacttaaattaagtagctccaatctgaaactacatcttagaaatgttttaaggatattcaccaatgaaaaagagaataaagttccctctccccacttctattttccagcccacaaactcaatgctatcctccccgcaaaaaggacctttttttctgaccagacgaacactgtaatttttaaggtttctaagtaataaaaataggaagaaaacattacccccaaaaattggtttacacttagaagatgtttcccactgagcaaaggattggtaaggaacataatattaaggcaaccacctaactgcattcttaagtagtaacaggtggtaactcacgatatggagctgatttcctttctctattcctgccatgccagagacctctagtagaacttctgaggttactgtattacaacccaggttcagagagatttagaggtaaaaccttaaacactggaaatagctttaaaagtagggctttgtgtaccaaatacattcgttaaaacctaggaaactataaaatgaaatccaatgtattgatctcaatccccttgcctgcttcctaaagaggacagaggccaccaacactggtgctcaacacttgctaagtcgaaacactcttacacaggtcctctgattcttaacgggttcagaacttctggttgcattccccatgcaacccctccaactctacagggagaatgctggaaaaactgtgtcactttggcttcctgtatattaatataagcactcttatccagcaatagcagctgaaacataaatgaagatgagaactcagcctacatgacctaagatttcccacaagtccagatatataggttacacacactgcactattgtctgatttctcctctgcatcaatctggaagtccacagagcagattagcacccaacaatcttaactaagctagtatccaactctgaagaaaggcgaagctggtggagggtttccaagactccttatccttctctgtccttcctcccatcccctccttacgtcttttctgtttgtttttatttaattttattttttaatgtatttttagtcacaagaaaatcaaagaagccacctacttaagtcttaagctctgccctttgcttagtcctaatggagagttctttggccatctatgtacaagagattagaggagccaaagagactggagaaccacatcaatgggagctttttcatctaaaggtcatctgtccacactgtccaaatgaggtttaccctgtgaaataaaacttggtgtaagtgctacctgctgagaaaaatagtatgaaatgtcacacaaaggactggggtgcagcaggaggactctgaaagagtcatacgtgtaaaccagcaggtcttagaatgccctaatatactatatgaagtttcagagtaaacaaatggttaatgacacatcttttgtaacacgtgaatcagctactgatttgcaagagtgggacacaccctagtacctatgactctaaagtacctgtttgaaaagtggacctagatgtttgaattgccaacccatcctaagaccggaacataattttacaactatgtaagttgccataatttaaagttaaaaagatcactgcctttcattataatggaagttaatttgagaacttcattaaaacattcacaccgataatcaaagaacagtagagatacaaagtaagatatagccaatcaatcctaggaagcaaacacaagaggcaagagaaatggcaggtaaaggaagtgaagaatagcaaattcaaaaactacaatattcccaattctaaagaaaaatgaataaaatgaggctggtaatgaaaaaataacacatcttaccttaagaggcatccaagtagcattcatagtgtcaggatataaagacaatactcagaaatgagcaagaagtcttagaaattccctcggttaccaagtataagcaggtaggaaaatcttttgtttcgagaaggtatctgaaagagaggattttcatttagactaaaaaataatcaagacaatgcaaatagtttaagctacctgggcagggattttgaagtactatttgcctcatcgcactaaaaaagtatagaaaatacagtcccctttagaaaagggcaaatgtgtgtctccatatatatgtgtgtagaaacatactttacataaaaagagaaataaatatgtaacacgtattttagataatgtaaaattgcttatcaaacaattagccaaaatcccagagagaataaagtaattttccagggtacttcataaacactaaacgtgatttgttaattaaccgtctaaaaaagacccttgccacatttaattatatttagtaaagtaaaacttctctaatcatcccgactgtcccaagattatgcttaagtttcagagtcaattccacatgaaaagtaaaacctattcttgactgaagtactagaaacaaataaaggacccttcttccccagagatcgttaaaagcagaccgagcaacttaattttgagggtgggaggaaggtaaatttgcctggaggcaggaggatggactaaatgacctctggtaggatcctcgttcaagtcctgggcctgtatacaattccagcttaaccagttactgcttcgcttaaaatggaggcttgcccgcgtagggacaaaaataacagcacccacttcttaaaaataaatgtcgaaaagtacccctttttaaataaaaataaaaaataaacacctctggagtggatgtgttcttgctatgcgtttgtcactgaggcttcgaagacttggcatcactttccttaccgctcaccggattttgggggaggagcggggggcgacagtttgactcttgacccaagtctcaggcggacttcagagccccacaggggcccccaactccagagccagagggagcggagaggcgagagcccgagatcgcacctccccccaccgcggaccccagtcccaaacccacccctcacctccccgcagtggggcgcctccttctgccccattcccattgttagggagggcagagcgcggggtgggctcagggcaggggcgcccgcggccgctgcccggctcgcttcaggaggggcgccccgcgggatgcggcttcccttcctctccgcgtcggtccgtcccacctcggctcggcctggcgccccgagctccgctccgcgcccccggccgcggccccggcccgccccccgggcagccaggccctcaggccactcggccggcagcccgcgtcccaggcctacgagtgggcgctgggcgggcgtccccgtgccccacacacgcgtcccctctcccccagccccgccgcttccagggccctcggcggcgcccgctccccgggccccgcggccccccgcctcccagccaggccgctccctcgagctcgtcgggtcagggacacctcctctacctcaccatcaccctggcccactcgtgcccccacccccaggggcaccagtgccaaaggcagctcccccagccccggacctacctgcacggttcaaccaagcctagaagtgggggcggggaatcttccgccctcctctggcgctcattggcccttcaggggcacatcgtgagcgccattggctgagcaatggtgtccgtcagagcgatggggcgggacagaaggggaagagggatgcaggtgccttggcgtctctgtctctgtgcatctcgttgtctctgtctctgtctcagcccttggaaacgagaggcttttggctgagaggactagaagggggcctgaggtgggaggaataggaataggaatcctgacagagcgtcacgccagttggcaactctgaaccccctacctaagtcccctttaggttctcttctccatcacccccaacccctgcccctcacccctcgagattctttcatccaggaagcgacgtgatgaaaactccaggccggaaggccatagggagagatgttatatatgtatataaaa

SEQ ID NO: 1244341 - DNA, 4001 bp, Homo sapiens
aggccctgggaaatcacgtaaagtacctgagaaagggcagggatgggatatgagcttgggttttggggtcccaagcccccatctctcatgaggagatgagggagctgccaagccccttctcccaaagctgcctggaaagaagctcacaaaggccctgaggcttgtgcaggtataggaaggggcctctctccctggagcccaccctccaggacctctgacatcaccagggtgtcatcatcactacccctatgttacagagctacaggctgccagctcacaagtgagtggtaaggtctccaacccatgactgcaaggcctccagactctcatccgcccacagagtctgacggattctccctgtgccaggtgcccaggtcctcagcagcagcctcatctgaaggttcctacccagagggcacagcagccctctatgataacctcttcagaagagcccaaagtccagagaagaccaacaatttggggccccagccagtctgggggaccactgggaccagttacccccaaatcttgacagggtagcccaagaggcagagctaccaagtcagagcacgggcagagtaagacggcccaagctgcccaggcaggccaatgcagatgtgcttgtcagggttgaagcccctttggcagggcagaaagggctgcccagtgcctctgtacagggggctctctgggcctctcagtcttgggacaatgtgtaggtagtggtgggtgatgcttctcaactgccggaaggccaagcaacacagaaagtaaggtgaaggcctgggccccagcctgtttgctcacctgtaagatggcataggcagcagtgaggggcagatgtgggcagccttgaagtgtgtggctgggtgggggccagcacttgggaagtggaggcaaagatctcctagggcccagtccacattcctcacgttctgcgagggggacactgccctcaggccctgggagctgagaagggctgggaccttaggacatcagttagacaccaagcagaactctcccggggaggcctgagcagatgaccatgaggtcacagcctgcccgggcaccaaggacttctacctgccctgccagagtgtgggtgccaggggcccagttgccaggtgaccagatgcctggagtagctgaagcctgaagcgctgtgtgactcagccccgtacacccgcccattcgccccagactaaaaataagacggtctctggggcgatcccaggccaaccgggtgacccgccacggccccagggccggtttcaatctcctcatcggtgactcggggatcaatactgccacccgcccccagagagaccaggaatctactttgcaaactgtaaagcgctttaaatactcccaacctgtctaaattgggactcagccccatctctggcggggtcgcgcaggcctcagtccacagccttccagctccgagaagcaggaaagggcacgggtggctgaaaataacccaagtttgcgcagcggggccctggaggccgtttggccttccctcctccgccaaacctgcctgccctgggcccgggcggagcaggccgcgcagcagccctaggtgggcgggtgacgccccgttcgcaggataaaccaagagaccgagaggggaagggggctgggctaggattcgaacgctgcccttggtcccccaaaggtcccctccccgccttccccagcggtgatcgcgggccacgcccccgatctgcgttccgtcgcgcgccaagccccgagcccggtgaccctgggggccgccccgccgcgctccagctgtacctgcgtcgcagcttccgcacgacgaccggaggaggcagcgggaccacggccccggagctcagaccagcctgggaatggaacgtgaaggaccctggaacccaacgactagggccccgggggcagccgcggacttcgcagcacgcagacaagcaggccctaactccaatcggagcgctcgagtccagcgcacaggtgccaaaatactgcgcggttcagccaatgaagggcaggtcccgccccccagccgacagccgcactccctctggggcgggactccctgacgcagtctggatttaaaggtgcagggctgcattccgagaccgcgaacaggtgacgtgacaggcgaccctccaggacgtctgtgcgttgtaatgtgagcctccggtgtggaggaagctgtctgggccccgttccttctggggaccaggtagagaggctgcacatggctagaggcccggcacatccaacctcttaggtcacctctgcgagagagtgtcttggtggcctcattcttacctgtgggcctgaggggcacagcgcctacccctgccacctgctctgtgcgagcttgtgtgggccattctccacctgggcatcagtttttctcctgtaaaatggggacactagaccccctcctcccctgcgaaggatggttgggcatataacagctgtggctcatttattggggtcctgctatgtgtcagccagggcgagcccccttgaacagcaaggaccaagacggatgcttctcttctggagcctccctttgtaggggggtacgagcacaggggtgctgacactaagtgggaataataacctggcgcacaaaacaaaacaaaacggaataataacctgccactcactgagcgcctgctgtatgctgcgagctacacgtgcattctttgttaatttgctcatggtgacaaccttagaaagtattttacaaatgaggaaactgggtagggcgcggtggctcacgcctgtcatcccaacactctgagaagctgataccagaggatcacttgaggccaggagatcaagaccagcctgggcaacatagcaagcaccccgtgtctacaaaaagtataaataaggccgggcgcggtggctcacgcctgtaatcccagcactttgggaggccgaggcggttggatcacgaggtcagaagatcgagaccatcctggctaacacggtgaaaccccgtctctactaaaaatacaaaaaaaaaaaaaaaaaaaattagccgggcgtagtggcgggtgcctgtagtcccagctacccgggaggctgaggcaggagaatggcgtgaacccgggaggcggaggttgcagtgagccgagactgcgccactgcactccagcctgggcgacagagcgagactctgtctcaaaaaaaataaaaaataaataaaataaataaatttagccaggtgtggtggcctgcgcctataatcccaggtagtcgggaggctgagcccaggagttcgaggctgcagtgagctatgatcacaccactgcactccagcctgggcagcagagcaagaagaccctgtctcaacaaaacaaaaacaacacatgaggaaactaagtccagaagcaggagagctaggacccgaggatccaggtgtctcactaccaccggtcagccaagtacaggcacttcctgggcctctgcgccccggggccgaggtttagaatctctctgaggtcagggccagcttcatgtgctgcagcagcgcaggtgacggtgcctcgaccagcggccgttacggcccctgccctggggcgctgggacttaagcctggagatcgtggaagcctccaactccagcacagggggggcccgcactccttggtgcctccgcagtcttcgaacagacggggaaactgaggccctaagaggcctaaagcctacacttccccgcggaatgcggcgggcgcgggcgggttaaaggggcggggccggcgctggcccagcccgcggctccccccagcgccctcgccccggcgctccctagcccggcgcggcccggcagcgagagcggcgccatggaggccaccggggtgctgccgttcgtgcgtggcgtggacctcagcggcaacgacttcaaggtgagccgggccgggcgcgtgccgggcctccctgcaggccttctcttccgcccggcccgcttggcctccgcttcctgtcccgctcggctccagg

SEQ ID NO: 1244342 - DNA, 4001 bp, Homo sapiens
gcgggctagtggccctgtcaatgaactgcaagcacagtcacacagatcagtgtatatgaaatctgggcagtcatagcaaagcccagggcaaagcagaccagcgtgctgggtggagaagcaggtgccctgggctcccatgaaggccttgggcagtccccacccctccccagggcccctctgaaaagcccaaccctgttgtcctcctctaggagcttcaggcatgacccgcccacttggccttacccgcttcacggccagggtggcaatgcccagcacagcagccccgcccacgcccagcaccaggcgggcattggccaggaggaagtccaccatgctgcccagcccttcgtcgctacgccgcttcccccgtttctgggagaactctgccatggtctgcctgtaagagagccaggggtgaaggggcagctcaggtgcaggtggccaggctgggagaggggctgctgtggacaggtgctctagctgtccttatgctgggtaacagagctgagcccatgaggggggctttctgagaatttctcagagaaaggggccacccatccacaggggaggacaccgaggccctgggaaatcacgtaaagtacctgagaaagggcagggatgggatatgagcttgggttttggggtcccaagcccccatctctcatgaggagatgagggagctgccaagccccttctcccaaagctgcctggaaagaagctcacaaaggccctgaggcttgtgcaggtataggaaggggcctctctccctggagcccaccctccaggacctctgacatcaccagggtgtcatcatcactacccctatgttacagagctacaggctgccagctcacaagtgagtggtaaggtctccaacccatgactgcaaggcctccagactctcatccgcccacagagtctgacggattctccctgtgccaggtgcccaggtcctcagcagcagcctcatctgaaggttcctacccagagggcacagcagccctctatgataacctcttcagaagagcccaaagtccagagaagaccaacaatttggggccccagccagtctgggggaccactgggaccagttacccccaaatcttgacagggtagcccaagaggcagagctaccaagtcagagcacgggcagagtaagacggcccaagctgcccaggcaggccaatgcagatgtgcttgtcagggttgaagcccctttggcagggcagaaagggctgcccagtgcctctgtacagggggctctctgggcctctcagtcttgggacaatgtgtaggtagtggtgggtgatgcttctcaactgccggaaggccaagcaacacagaaagtaaggtgaaggcctgggccccagcctgtttgctcacctgtaagatggcataggcagcagtgaggggcagatgtgggcagccttgaagtgtgtggctgggtgggggccagcacttgggaagtggaggcaaagatctcctagggcccagtccacattcctcacgttctgcgagggggacactgccctcaggccctgggagctgagaagggctgggaccttaggacatcagttagacaccaagcagaactctcccggggaggcctgagcagatgaccatgaggtcacagcctgcccgggcaccaaggacttctacctgccctgccagagtgtgggtgccaggggcccagttgccaggtgaccagatgcctggagtagctgaagcctgaagcgctgtgtgactcagccccgtacacccgcccattcgccccagactaaaaataagacggtctctggggcgatcccaggccaaccgggtgacccgccacggccccagggccggtttcaatctcctcatcggtgactcggggatcaatactgccacccgcccccagagagaccaggaatctactttgcaaactgtaaagcgctttaaatactcccaacctgtctaaattgggactcagccccatctctggcggggtcgcgcaggcctcagtccacagccttccagctccgagaagcaggaaagggcacgggtggctgaaaataacccaagtttgcgcagcggggccctggaggccgtttggccttccctcctccgccaaacctgcctgccctgggcccgggcggagcaggccgcgcagcagccctaggtgggcgggtgacgccccgttcgcaggataaaccaagagaccgagaggggaagggggctgggctaggattcgaacgctgcccttggtcccccaaaggtcccctccccgccttccccagcggtgatcgcgggccacgcccccgatctgcgttccgtcgcgcgccaagccccgagcccggtgaccctgggggccgccccgccgcgctccagctgtacctgcgtcgcagcttccgcacgacgaccggaggaggcagcgggaccacggccccggagctcagaccagcctgggaatggaacgtgaaggaccctggaacccaacgactagggccccgggggcagccgcggacttcgcagcacgcagacaagcaggccctaactccaatcggagcgctcgagtccagcgcacaggtgccaaaatactgcgcggttcagccaatgaagggcaggtcccgccccccagccgacagccgcactccctctggggcgggactccctgacgcagtctggatttaaaggtgcagggctgcattccgagaccgcgaacaggtgacgtgacaggcgaccctccaggacgtctgtgcgttgtaatgtgagcctccggtgtggaggaagctgtctgggccccgttccttctggggaccaggtagagaggctgcacatggctagaggcccggcacatccaacctcttaggtcacctctgcgagagagtgtcttggtggcctcattcttacctgtgggcctgaggggcacagcgcctacccctgccacctgctctgtgcgagcttgtgtgggccattctccacctgggcatcagtttttctcctgtaaaatggggacactagaccccctcctcccctgcgaaggatggttgggcatataacagctgtggctcatttattggggtcctgctatgtgtcagccagggcgagcccccttgaacagcaaggaccaagacggatgcttctcttctggagcctccctttgtaggggggtacgagcacaggggtgctgacactaagtgggaataataacctggcgcacaaaacaaaacaaaacggaataataacctgccactcactgagcgcctgctgtatgctgcgagctacacgtgcattctttgttaatttgctcatggtgacaaccttagaaagtattttacaaatgaggaaactgggtagggcgcggtggctcacgcctgtcatcccaacactctgagaagctgataccagaggatcacttgaggccaggagatcaagaccagcctgggcaacatagcaagcaccccgtgtctacaaaaagtataaataaggccgggcgcggtggctcacgcctgtaatcccagcactttgggaggccgaggcggttggatcacgaggtcagaagatcgagaccatcctggctaacacggtgaaaccccgtctctactaaaaatacaaaaaaaaaaaaaaaaaaaattagccgggcgtagtggcgggtgcctgtagtcccagctacccgggaggctgaggcaggagaatggcgtgaacccgggaggcggaggttgcagtgagccgagactgcgccactgcactccagcctgggcgacagagcgagactctgtctcaaaaaaaataaaaaataaataaaataaataaatttagccaggtgtggtggcctgcgcctataatcccaggtagtcgggaggctgagcccaggagttcgaggctgcagtgagctatgatcacaccactgcactccagcctgggcagcagagcaagaagaccctgtctcaacaaaacaaaaacaacacatgaggaaactaagtccagaagcaggagagctaggacccgaggatccaggtgtc

SEQ ID NO: 1244343 - DNA, 4001 bp, Homo sapiens
gttttgtttttttaaagatgaaataaagacccagggggagaatgggtgttgtatggggaggcaagtgtggggggtccttctccacacccactttgtccatttgcaaatatattttggaaaacagctaggcaccggcctatgtctgggggtggctctgtgccatcccttcctgctcaccttacactcaattcctcttttcctggagggagtggctgggaatcttcagaaagcttggatgaggagccagacatccagttctccagcttcagggttgggggagatcgggaagctggattcagatctgagagccctttgacgaccagatcattcttatttagaacgaactaattcctaaggccactcaccagaatggggttatttcctccttgtgagtgaggagagtggtgggtagggtgggggaaagacgaggcagggtctactgtgggactcattttccttgccttggctatgccagaggagctcactgacctaaggagtagctgtccagaaagcccacccagccagcacagccaccctggcggtgcaaaggctgggctgaccggacttctgtgccccccacattcccagactggacgtataaaaacacacactagttagcattagtgtttgtagcgccactttactgccaatagctgacattgccctgggttaggggagaataaataaaatctgtggcatcagacaggtattaccgaggcgaagagtggactgggctttcgtgggcacttaccctgggaagggggtatgaggtggctggagaagtgttcatggagagtgtctctctcctgcccccaaggccacggaatcttctattccttctttgtacccaaagggcaaagtggaggccagggtctctttgctaaggagctaagtaggggaaagaggcagggggagctcccagcaggaccaaagggagaccaaggtttggaccccagaacagagcaggaacccagagtcctgtgcagtcacaggatgacgcagggaggacggctgttggtgatcttttctagggtttctccattactggctcttcggatggcctcaatgagctagaggagtggaatgacaggatgatgcactgttggggtagggtgaccaagaggtcctcccaacgctgtaaatactcacatctttctcatagggaaagcccccattctccagcttggagaacaccagctgtccatttatctctatctcaaaggcacctggtaagaaatcaacagataaatggtacactgagaacataggcagaagtcaggagttcctccaaaggggtcccccgccttcaagtcccccatcaatcccactggagacccatttgtagctccttaagcaattccccaaccctgggtcaactccagggaacctgagggaggcctcgcctgtgtgcccctcgcaacactcaataaaggactccctcccctccaaccctacacgattgcagtctaataggtttttccccacaggcctctgtgacaccccctgacctatggaagggaactcatgttggccggacattttaccatgtgccaggcactgcgggcactttacataaagcagccaatgtcagaactagaaagcgggagagctgggattcagagcacagactgacccagcaggtgttctgcgagcctcacctgtgcccccgaggcgcgactcgatctcgatgcccggatactgctccttcacagcactggccagctccaggtaggtcgcctcgaagccgcagggttcactggggagtcaagagatggggctgggctggggattcgggggtggggcctcccgtggacccacctccgtccggcccgcgggaccagggtgcgggtcctccagccggggccgctcaccagtactccaccacgatgcggaccccactgcccggctcgacctcctcgggagggggcgctacggacgtctgccccggctccccgctcatcgcggccggctccgctcgggcccctgcttccgggtgtgacgcgaaccgcgggcacgtgacggggcggggcctctggagcggggaggggccgagggtggcgttcgggcgccccctgcgggtctccgccactgctacgttttgacctcgtagggcagctccggagctcgctccccgggcaggggctgggtccggtccagaccctccttccctggcccggtctcccggagtgccgggcttccccactccccactcccggtgtccgctggacttcatggcttcatttactctaatggactatcttagactgcaaagcgcttttcagtttacaaaagaaagagaaagtggtggggcaagcatcctggggatgggggtgggtgtggctgatgcatgaaatagttgacattttctcgctaacatgccgatggcattttttttttttttttttttgagacggagtttcgctcttgttgcccaggctggagtgcaatggcgcgatctcggttcactgcaacctctgcctcccgggttcaagcgattcttctgcctcagcttcccgagtagctgggactacaggcgcgtgccaccgcacccggttaattttgtattcttagtagagacagggtttcatcatgttggtcaggctggtctcgaactcttgacctcaggtgatccaccagcctcggcctcctaaagtgctggaattacagacatgagccaccgcgcctggcccagttttttgtttgtttgtttgtttgttttagtagagacagggtttcaccatgttcgccagactggtctcgaactcctgacctcaaatgatctgcctgccttggcctcccaaagtgctgggattacaggcgtgagccaccacgcccggtgctgatggcatttggaaccaccctgtagttacatacacaagtgtttctgatcccaaagctctaaactgctttttccagtcttttgcagctgcttcttgcctgcactggaaaacagtagatgctcttcaggctctgtgcccccaacagtttctgcgcatcccttctcatccagcctctcactggggggctggcgtcattattcccattttgcagctctggaaatggagtctgcacaagtcctcgctgccttttccctgcctacagtaccactatggtatcctaacacgccacccactctagtgtccctttaggctatttatttatttatttatttattttgagatggagtctcactctgtcacccaagcttgagtgcagtggcgcgatcttggctcactgcaacctccacctcctgggttcaggcgattctcctgcctcagtctccctagtagctgagatcataggtgccagccaccacgcccagctaacttttgtattactattattattatttttttgagacagagtcttgctctgttggccaggctggagtgcaatggtgcgatctcggcttactgcaacctctgccttccggcctcaagtgagtctcctgtctcagcctcctgagcagctgggattacaggtgcccaccaccaagccagctaatttttctatttttagtacagatggggtttcaccatgttggccaggctggtctcgaactcctgaagttgtgatctgcccatcttggcctcccaaagtgctgggattacaggtgtgaaccactgcacccgggctcattttttttttttttaaaccaggcaggtcgtagtggctcacacctgtaatcccagcgttttgggaggccaaggtgggcggatcacttgacgccaggagttcaagaccagcctggccaactcgacaaaaccctgtctctactaaaaatacaaaaattagctgggtgtggtggcgcaccagctactccagaggctgaggcaggagaatcgcttgaacctgggaggtggaggttgcagtgagctgagatctcaccactgcactccagcctgggtgacagagtgagactgtgttccaaaaaaaaaagaaaagaaaagaaaagaaagaaaatgcagtgatttgtactgttgcctaaccatcactacaat

SEQ ID NO: 1244344 - DNA, 4001 bp, Homo sapiens
aagtgttcttatactacacacatgcaaacccccaacaagagagggccacatagggcctcccaacaggctcggcttgacacatgatgggtgttgctaattattagttgaagacaaacctctgtactgcgtgttacagcgggaaggcatcaggcgagagcaattactatagctcctctggcaaacggaatattctccatcttctgtctcaaagcaggcaactgtgcattcaagagacggggctatggcagcacagaaaccagcaattcaaatgtaagcgcttcaagggcaggagccgtgttcttttttttatggttaaacttttttttttttttttttttttttttttttgagacagggtctcgctctgtagccaggctggagtgcagtggcaggatcatggctcatggcaccctcaccctcccaggctcaatcaatcctcccacctcagcatcttaagtagctgggaccacaggtgcctgccactatgcccggctaatttttcttttctttctttttttttttttttttgtagagatggggtttacaccatgtttccgggactggtcttgaactcctggactcaagcaatctgcccaccttggctttccaaagtgctggaactacagacatgagccactgcgcctagccctatggttaaacttttaaaacagtctttacagtctgagaggtgactgtgattcatactccaaaataatggcctcaatgtagcttgtcttccagttcaagaattacgttgccgactcctatcgtcagagaatgaggggaggggtggaggcattcaccaggctcagcctctggtgctgcccacaggggcccttctctgtagctcctgaccccagctcaggaggggtcccgtgctcacctttgagtgctgtcttcagcagctgctgggtctctgcatcaaaggactggattttatactcctctctactgggctcccccatgactagccagccccggtagctcttgactgggctgggaataaggacagcacctgaggagaagaggcgaagggagcggcctcaggtgtggagcgcagggcgggttccgtcctgcaggccctggacggggctgacggcgcgctcgggacagggactcctgggcggtccgtggcgtgcggtggttggctgaaggcccaccaggcttggcttctggtggggactgggcatcagccaggcacctgctgctcagtttagaaatccctcgcttgtgggattacacaagagcgagaagctgaagcaggaaagcgcccaccctccagtcccagcaggaggcaggagtagactggggcagggtgtgtgcgggcggacgttacagttgcttaaataaaccggcctgacgttgctggcccaggaagatgccgggtgagggccaggctgggaactccaagcggtgcgactctgtccccagcaggtctccgagcccctctccccaaccctctctttctggctttcgccgagtccttcggtctcaacacccgccgctgcatcccccggatggggccggcctgcgtgggtggggacgcaggcgccctgtccgccgcccctgccgggagcagcctgaactccccagacccgtgccagcttctccctgggacaggctggtcggatcggctcccgagtggcagtaacccggccctacgcactcgagactcctaattcctgagctccattctggagccttcctcttactggggggcaggatgatgcgccccggagaggtggctcccgccggaggctcccctctggccgtaggaggcgcctttagggtctccagccctcggccgttccccccgcgcccggaacgcccctcccggaggcacagggcgggctgcggagcccacggcccagggtcccgcgggcgggagaggcggcgtgggagccgggacccacctgccgggccggtggcgcgcgcgcgtgcccggggccgctcggcgcctgggagcgcgcaaccagcgtccggcgctgcggggcccgccgtgagctcatctcctcgcgcggcgccggggaagggtcggctcgcccgcgccacctgccgggcccccggggcactgccctggcctccaggccgccccggaagccgcgccgcctgcgtgggaccctgcgacgctgccacccagccgcaagcggaactcgcttggctcgtcaccccttcacccggtgcgcctgggccgtgtccgggcccacgccggacccgccggcacctcgatcttgcgcgtggccccgcacccagccctccccggagctcaggtgcactgggccgggagacaccgctgggctgcgcggcgtgggaagagcctgcagagcgcgtggtggggacctggtggcaggaggaacagcatcagccctggtcgcaccactttccccgctcccccaacccaggtagagaaggcaggggctgcagggccggggccagccacaaccctctcccgctccaaggaggacatgggcgaagcgagtttcaggtcataggggcagccccgagaaaggggccccattggcaactcgcggccgtcggttgttgcgaatgcccctgaagtggcgcggaccccaccgcccggcgtctgccctgggtgacaggagggcacctagaagtgggggaagaactgccgccgctcctgccgcgcgaccgggaggagcgctgccggcgctgcccgcgttctcgcctccttttaaaagaaccgccaaagtggtcaccgaaaacggaggaggaagagaacgctcagctgcagcaaaagaaaccaatgggcaggaaagatgaagagaagaaactttaacggaatttcataaaaaatgcattcaggcagctgcatcctcgtggcccccgccgcagcctggaccttgggaaccagcagcccagagccaggaagccccagcattcagggcccagacagaccccaaaatcccagaccagaggcagggaaggatggtgcgaggaggagcccaggacccacacgccagggccagggccagcgccggctcccagtgggtgcctctttccaaggctggagagggaggcagaatggagggcttcccaggtcggagcaaccctacaggccgggcagatggagggaagggtggaggtcatgttctggagacctcccctcagcctggaactggtttctcctctgcctctccgcctgtgggtgtccctctgctctggtaacaccccaggcaccagctgtgccctcaccaggctacgtgcccgccccttccttctgccatccccatcagtgggctgcttcagagccacggcccttctggggctacaggggaggatgcacccgcagcatgctctgcactgaggagcaggcagtgggcgctgatgccacctgtcctgctgatagctcctcacccagcaaggctgacccagctctgggtgaaagaggagtcagtgaggtagactggggagaggctgcaccttcacccacgcctgcccacagcatggcccatccacttcctgcacgggcgctgggatctgctttccatggagccccacggccatgaccagcccggtcctgggagaggacagcctgggtggtggtgtgtctgcagacacgaaggtctgggcacggggcccagaaagtgactggctcagcctggagtctcccccagcactagaagcagagctgccaagggctgccgctatggagaacatgggatttgaggaaggcaggagtcctttccctcatactttgtgagtaggcagatgtgccaggggagatggagtaagataaggaatgtgtgtttagctttaatgtctattaaataggttggaaaaacaggccaagtgtagggacctgactcctgcaaagggcctaccgcagccctctgcactcaagcagcagccccatccagaccaggagtgtgttctgttctcctggcaggcagggctgataggtgtaggatggcgtctgtttcctttggagtgtgggctggtcagaggagaaacagcaacttcctgctccttctcactgtgtc

SEQ ID NO: 1244345 - DNA, 4001 bp, Homo sapiens
tccacccgcttctaagaatttgagatatttacagtagagcactcatatgcttgaagtgaaagagatcagaaatcatacagaggacagtggctccagtggtgcaattggttagcgcatggtacttataagaaatcatggccgggcgcagtggctcatgcctgtaatcccaacgctttgggagaccgaggtggttggatcacctggggtcaggagtttgagaccagcctggctaacatggtgaaaccccatctctaccaaaaatacaaaaattagccaggtgtggtggctcgtgcgtcatctcatgtcatccaagctacttgggaggctagggcaggagaatcgcttggacctgggaggcggaggttgcagtgagccgagatcatgctattgcactccagcctgggcgacaaagcaagactccgtctcaaaaaaaaaaaaaaaaagaaaaaaataaaagaaatcatacagagggcctggtgtggtggctcatgcctgtaatcccagcactttgagaggctgaggcgggtggatcacctgaggtcaggatcaggaggtcaagaccagcctggccaacatgatgaaaccccgtctctacaaaaatacaaaaaataagctgggcacggtggcgggcccctgtaaccccagctacttgggaggctgaggcaggaaaattgcttgaacctgggaggcggaggttgcagtgagccaagatcgtgccattgcactccagcttgggcaagaagagcgaaactgtctcaaaaaaaaaaaagggaaaagaaaccgtacagaggacagtaaccatacaaacagctttagctgtcttgtcttctggttgcccagtcagagaaaatggggagggttatgtggctagtagggaccaatcaaagtaagaatgtagtttctcaggaaacacatcttttcctggcactaggttgaggaaggaatactgaccaggacatgcctccaacagcaatttcacaagaaaaagtgttcttatactacacacatgcaaacccccaacaagagagggccacatagggcctcccaacaggctcggcttgacacatgatgggtgttgctaattattagttgaagacaaacctctgtactgcgtgttacagcgggaaggcatcaggcgagagcaattactatagctcctctggcaaacggaatattctccatcttctgtctcaaagcaggcaactgtgcattcaagagacggggctatggcagcacagaaaccagcaattcaaatgtaagcgcttcaagggcaggagccgtgttcttttttttatggttaaacttttttttttttttttttttttttttttttgagacagggtctcgctctgtagccaggctggagtgcagtggcaggatcatggctcatggcaccctcaccctcccaggctcaatcaatcctcccacctcagcatcttaagtagctgggaccacaggtgcctgccactatgcccggctaatttttcttttctttctttttttttttttttttgtagagatggggtttacaccatgtttccgggactggtcttgaactcctggactcaagcaatctgcccaccttggctttccaaagtgctggaactacagacatgagccactgcgcctagccctatggttaaacttttaaaacagtctttacagtctgagaggtgactgtgattcatactccaaaataatggcctcaatgtagcttgtcttccagttcaagaattacgttgccgactcctatcgtcagagaatgaggggaggggtggaggcattcaccaggctcagcctctggtgctgcccacaggggcccttctctgtagctcctgaccccagctcaggaggggtcccgtgctcacctttgagtgctgtcttcagcagctgctgggtctctgcatcaaaggactggattttatactcctctctactgggctcccccatgactagccagccccggtagctcttgactgggctgggaataaggacagcacctgaggagaagaggcgaagggagcggcctcaggtgtggagcgcagggcgggttccgtcctgcaggccctggacggggctgacggcgcgctcgggacagggactcctgggcggtccgtggcgtgcggtggttggctgaaggcccaccaggcttggcttctggtggggactgggcatcagccaggcacctgctgctcagtttagaaatccctcgcttgtgggattacacaagagcgagaagctgaagcaggaaagcgcccaccctccagtcccagcaggaggcaggagtagactggggcagggtgtgtgcgggcggacgttacagttgcttaaataaaccggcctgacgttgctggcccaggaagatgccgggtgagggccaggctgggaactccaagcggtgcgactctgtccccagcaggtctccgagcccctctccccaaccctctctttctggctttcgccgagtccttcggtctcaacacccgccgctgcatcccccggatggggccggcctgcgtgggtggggacgcaggcgccctgtccgccgcccctgccgggagcagcctgaactccccagacccgtgccagcttctccctgggacaggctggtcggatcggctcccgagtggcagtaacccggccctacgcactcgagactcctaattcctgagctccattctggagccttcctcttactggggggcaggatgatgcgccccggagaggtggctcccgccggaggctcccctctggccgtaggaggcgcctttagggtctccagccctcggccgttccccccgcgcccggaacgcccctcccggaggcacagggcgggctgcggagcccacggcccagggtcccgcgggcgggagaggcggcgtgggagccgggacccacctgccgggccggtggcgcgcgcgcgtgcccggggccgctcggcgcctgggagcgcgcaaccagcgtccggcgctgcggggcccgccgtgagctcatctcctcgcgcggcgccggggaagggtcggctcgcccgcgccacctgccgggcccccggggcactgccctggcctccaggccgccccggaagccgcgccgcctgcgtgggaccctgcgacgctgccacccagccgcaagcggaactcgcttggctcgtcaccccttcacccggtgcgcctgggccgtgtccgggcccacgccggacccgccggcacctcgatcttgcgcgtggccccgcacccagccctccccggagctcaggtgcactgggccgggagacaccgctgggctgcgcggcgtgggaagagcctgcagagcgcgtggtggggacctggtggcaggaggaacagcatcagccctggtcgcaccactttccccgctcccccaacccaggtagagaaggcaggggctgcagggccggggccagccacaaccctctcccgctccaaggaggacatgggcgaagcgagtttcaggtcataggggcagccccgagaaaggggccccattggcaactcgcggccgtcggttgttgcgaatgcccctgaagtggcgcggaccccaccgcccggcgtctgccctgggtgacaggagggcacctagaagtgggggaagaactgccgccgctcctgccgcgcgaccgggaggagcgctgccggcgctgcccgcgttctcgcctccttttaaaagaaccgccaaagtggtcaccgaaaacggaggaggaagagaacgctcagctgcagcaaaagaaaccaatgggcaggaaagatgaagagaagaaactttaacggaatttcataaaaaatgcattcaggcagctgcatcctcgtggcccccgccgcagcctggaccttgggaaccagcagcccagagccaggaagccccagcattcagggcccagacagaccccaaaatcccagaccagaggcagggaaggatggtgcgaggaggagcccaggacccacacgccagggccagggccagcgccggctcccagtgggtgcctc

SEQ ID NO: 1244346 - DNA, 4001 bp, Homo sapiens
aaagtgattatatccaccactggggagtgggtggggaaactcacccaccgttggtgactgataggatacgatcagccttgttgggagggcaacttagcagggtctgtaacaatttaaatgtgtatgccctatgaccttgcaatttcaattctagaatttcattctacagagatgctttcaagctctcatgcatccacaaaggacgttgtgtacaaggatgtttattgtagcattgtttatattgcccccaaaaagcagggcaataaataaggatggttaaacgaatcatggctgagtcttaaaataccatgcagctgttgaaaaagaggagctaaggctggtgtggtagctcatgcctgtaaccccagcactttgggaggcagaggcaggaggatcacgaggtcaagagttcaagaacagcctggccaacatgatgacaccccgtctctaccaaaaaacaatacaaaaattacccaggcatggtggcacgtgcctgtaatcccagctactcgggaggctgaggcaggaggatcccttgaacccaggaggcggaggttgcagtgagccgagattgtgccactgtactccagcctgggcaacaagagtgaaactctgtctcaaaaacaaacaaacaaaaaaagataacgaatataaagtgactgttgataacggctgcttctggataggaaggggagaagaattggaggaggattgtaacagaacttttacattttatacagtaacaaccaccaccttggctatcacttacggatggtttaccatatgcctggcactgtgacgaggagcagggattgtctcatttgatctgcacactagcctaccaggtaggtgcttttattagcccacttcacagatgaaataaattacagtgtctcacgcctgtaatcccagcactttgggaggccaaggtgggcggatcacgaggtcaggagatcgagaccatcctggctaacgatgtgaaaccccgtctctacaaaaaatacaaaacattagccaggcttggtggcacacgcctgtagtcccagctactcgggaggctgaggcaggagaatcacttgaacctgggaggcagaggttgcagtgagccgagattgcaccactgactccagcctgggcgacagactgagactccatctcaaaaaaaaaaagaaagaaagaaagaaagaaagaaattaaggtcaaactgggtatgtcatgagctcaggctgctggctagtaactagtagaaccagaggttagaccacttcccaatgtatatttctagtgttgcttgaattatttcacaataattctgtgggtttttttattttgttttatttttttaagaaacgaggtatcactatgttgttcaggctggtctcaaactcctgagctcaagcaatcctaccccattagccttccaaagtgctgcgattacaggccggaggcaccacacccagcctgtgtgttggctttctagttaaaacacaacaaccataaaacaacaataacaaggaaagttagaaaactttcattgtgaaaacaaatttcattatttttctcactgagtctcagaaaaaaatgctgcaatcccctccctaaaatcattttattttaaatgatagataattgaaaagactgttctttggttgttcataaaagctcagaaacacttttgaatggacgcttatgttgcaatcagactgtctcaccacttcagtgaaaatggtttcaataagaaagaagtaaatgaaacttaccatttgttttcattgcctcacaatccaatacagcttttctacctgaaacagaaaaggaacacgataaagctcactttccacatgacacgttggcttggaggttcgagcctcagaatgataaggggggcttacaagtgacagaagaaaatatgctccagaagaggagcctgttcaaatggctccacattctcccagttgaagtccaagacggggtcagaaggcatagtagaaccacagtggtgagtaactcggagaacttcctctttttcttagccaagttaaggaaatcagagggtttggatgaggtttgcataatactggtttgttcgaccaatctgtcttcctctgtgagttcctgtaagaagagagatatttggtagattgccactcccccgccccccccacccccccacacccccacatcgtcccatgctggctgggaaagagaagaggtaaatctgactgttacattgtctatgtaaacccatctgatctccttgctctggactcagtctatgccaaaaggagtttggtggaagtttgatttagtctttggaagcaaaccgactgtcttaagcagatacatacaaatattgtatcaaaaatgcctgctttttttttttgagactggcctcactctgtcacccaggttggagtggagtgctgtgatcatagctcattgcagcctcaaactcctgggctcaagtgctcgtcccacctcaggctcctgagtagctgggaccacaggtgtgcaccatcaggactggctaattatttttatttgtaaagacaggggtctagttgcccaggctggtgttaaactcctgagctcaagtgatcctcccgcctcagcctcccaaagtgctgggattacaggtgtgagctactgtgcctggccaaaaatgcctgcttttgttaaacgttgattcctagaccccactccagacttactgggtttcaagtccaggacgctgatttttttttttttaaacaagggccctgagcaattcttacgcacagtgaaggctgagaaatatctgtacaaggtgctgctgcctcagtgatttctgaatcaagggagccttggggacttgatattacggcaagccctccagtgccaggagatctgaagtaggagttaccttagatcagcctttgaaatagaacgtgcaggctgggtgcggtggctcatgcctgtaatcctagcacttcggaaggctgaggcaggcggatcacccgaggtcaggagtttgacaccagcctggccaacacagcgaaatcccatcactagtaaaaatacaaaaaacttaactgggtgtggtgatgcgtgcctataattccagctacttgaggggctgaggcagaagaatcgtttgaacccgggaggtggaggttgcagtgagccaagattgcaccactgcactccagcctgggtgatagagcaaaactctgtctcaaaaaaaaaaaaaaaaagtcagttgaaatagaatgtgcagagccacttcttgatggagtggagatcaccaaaaggatagaaaggtatgactatagggctaggtgggcaagacagctggttgacacttgcaagaattgacaggtccaccaagagaggaagcaaggagttgaatggctggggcagccttgagctgggacattcatctctgtaccttaggtcccaagatgtaaccaaatccttccttattgactcagcgtcacctagctagcatcctctagctaggaggtttgatactgaatcttgctctgtctcccaagctagagcacagtggcaccatcttggctcactgcaatctccacttaccagaatcaaactatctttccacctcagcctctctagtagctgggaccacaggcacaaaccaccatacactactaggtttttaacttttttatagagatgaagtctcactatattgcccaggctggttttgaactcctgggctcaagcgattctcctgcgtgtggcctccaaaagtgctaggattacaagcatgaaccaccatgccccacccttactacaacaactttacagcactttataaaagtttggatgggtgaactgtcagatacatgtgcaaaattccatcaactttttcttttcttcacgtctgcaatgtttttcatcagcatcctgtcactttttggctaccactgctggccagctggaaaagaacagacaaccatagaatcattccccgcacccacattttctttctctctctt

SEQ ID NO: 1244347 - DNA, 4001 bp, Homo sapiens
acccattttttattgtattttagtcaccccagccacaggaacctgtagccagttaatcaataaccaaggtaggaaggaaaggtggaagttcatcccagaatggagcacattaagggacttttactcagaatctggatttccatcttatatcccgacttgggcatcccagtttaaaccctggccaagctgaccttaagaatctccctcctaaagccttcagaccctctcctcatcaacacacacacatgtgcctgcgcacacagagaaattcagcgttcagtccctctccccagaaatttatcacgttatctccagcaagtcaggtctcatagcccaacattgcaccaaacaaattatgacctgaaaatgggaagaaaaaaaactgtgtcacctagagaaacccaattaacaacatgactctgctctcttcaattcccctctcccctccagccatatccggggcacctgtgtggctgaccgccttttcccactactggccatgttccctggctgactcaaaagccagaagacagtctgagcaggggcctccagagaagcgaacctagagatgggaagtcctgctctccccacaccttggcctggtgagagcgctggaagggcacaggatcaaaacaccacctggctgatagtctggagtgttcaccttgaaatcactaagttgccccttaagccaaagctccctgccgaagaaaaacataaatgctacagaaagctcttccaccagagtgtgtaagtgccccacaagggacaatgaacgggtatttccaagaaattcctgcagcatttgcttcctctcaacccctttccttattagcccctaccttgagaggtctccattgcttccagcctttagctaacataaacacccactgcctttccaaaccttcagcctgaccacatgtagcatgtgtcgtgtgtgcgcgtgtgtgtgtgtgtaaacatcctcttcccagcccgtgctacagtttccaaagagaagaaatgcctcccctcctccccgagggctcccagccccacgctgctgcagagttggtcatgtaatattcagggaccctgagaccggaaatgcctggttctgaactgctgcacttgaaacaggagagaagggatagggaaaactgaacatgggattgagggtgacggcacgaggggtggggtagctgaaattccgaccagggaaaggatgcaattcaagggtgggcgaggcagagaaagagggatgagagagaggctgtcgagacagttgcaaagtcaaaattccaggagctgaggaagaggaggggaaggaagaagatagaagtaagggcaaaggtggaaaagggccgaaaggaggtaaggaaccacaataaaggttctccaggtgatgggggaggctaagtttaggcgaaccagtgggtcccgaaccccagagtaaaggtagggtggcacggaagtgtgggggcggggcaccacagggtggggaccgaactggctcccagcatctgcagccagtggagagagaagggagcagagggcgggggcccagccgcggcgggagtccgggaaaggggcacgggtcgccaaggggacccaagctggtggagggggcgcccgggagcacgtgaggcgtgcagccaccccgctccctcccctgcggcggggacaggaaccagggcgaggctgggggacggcgcgctcacccgcagggcggacaggtcgatgtcgtccaggctgcgggcgggggctgggtcgcccatggcctccgtggggaacggggcaccggggccgctcacgctccggctcggttactccactgccgccgtcgccgcttctcccccatcggagaaccccgggggcggactccaccgcgcctcccccggagaccggggagggggagggccggcgcgaggaccgacccaccgactgacaggcgctatctccccggagccagccacccgagcctaccacctctcctgcgcaggcgcggagcgaccgcgcactgggagggtggaagcgcgagcgtgacgcgagcgcgccggggccccctccccctaggcgccgacacctgcgcgcaggcgcaggcgagcaggcgaaaggcgcgcgcgaggacggagcgaccgcgcgagcctggcgtgaaagaagtgggcggcggccgaggcggccgcggagcgcgcccaccagctggtgcgcgtgcgcacacgcgtttccttttctttccctattttttttgccctttctctcccttatttccttctcagatctcctttgacgcctttccttccctttccctccttctttcgtgtgcccagctgccaatcaagccacccacctttccatttgcgggggaagggggcggtacccaaccccctctattactagggggttgttatggtaactccccacgcgagggctgggtggcctctagataggacgggctgtccacccacccaattgctatggcaacagtggagccgctgagggaggggccactccgtgagaacttggctggagaaaccacgtgggagttggggggcagaggaggggcaccggctgcctcaggaatgccctttccaccctcacctagcaggttggggaagcatcgaggtgctctcagatctcaggataaggaatcctaccgcagacgtgtatctctgcacctcttttaacaaagtgttctgcacaaaggaactgtttccacaattattcattgatcactggagtcgcgcgtggaggaaggggtggcgaaggggaagagagggaatctgcgttcagtcccttaaaatatagcttgggtcaccttagatctagtcatgttggcatagcgcctacagccattagcctcagtggaggctgggtaatgctatctaagaaccacgagtcatgttctaccactgaaatgctgtgtgaccttgagcaagttgctttgcttctctgaggttttctttcactgtgaaattgaggggggaggctgtatgatcctcaagagctcttctagcaccaacactgcctctgaaagactccaccaccagccttaatataaacatcatttaagagagtttaatttagaagtccttgaaaaatagctgaacacattcctttctggaccgtttttagcatttgggtgcacagccagtcggcccccttccctaacccctagcccattttccttgccactgcccttattcaagccgctatccccattcatctcctatttggccttccggcctgactccttcaagtcaattctatttttttttttttttttttttttttgagacagagtctcactctgtcgcccaggctggagtgcagtggtgcgatcttagctcactgcaagctccgctttccgggttcatgccattctcctgcctcagcctcctgagtagctgggactacaggcgcccgccacctcgcccggctaattttttgtatttttagtggagacggggtttcaccatgttagccaggatggtctcgatctcatgacctcgtgatccgcccgcctcggcctcccaaagtgctgggattacaggcgtcagccactgtgcccagcctctatttttttttttttaaagacaaagtctcgctctgtcacccaggctggagtacaatggtatgatctctgctcactgcaacctcaagcttctgggctcaagctatcctccaacctcagcctcccaagtagccaggactacaggcagcgcatgccactacacctggctgatttttatatgttttgtagagatggggctttgccatgtcgcccaatctggtctcaaacccctggcctcaagtgatctgcctgcctcggcctcccaaaatgcggagattacaggatcccttgaggacaggagttggaggccagcctggccaacatggtggggttttttgtttgtttttttttttttttttttttttttagacagttttagtttagtttagtttttttgtgaatttgtgaatttgtttttattggggaacaggacacagggtggaaaatg

SEQ ID NO: 1244348 - DNA, 4001 bp, Homo sapiens
ttacccatatactcatattataccctaatcttcaagatttacagcccctccaccctctctttctgttctcagcctctgccacttctcttctttccttattcattttaggcctcatgatctatcattttgatcactccgttgccaatgtcctcaatttgcttgtcctccagccaagccatctgaaaaaaacccaattagaagatgagtaagtcccttgtcagctttataaccctgacatgttttttcaagggtctgcgagtaattcctctcaaatataaacatctaggaaaataaaacccctatctccttgtcattgtgggaattcaacctaggcatctttttctgagatgaaatgatattgcttgtcatagaaataagagaaattttattattccttcagataaaggcaattagctaaaacaaactgctacttcaattatcaggtgaatttaggacgcactttatgaaataatttgcaataagcagtacagtcaaatcttatgggaagataagatgcagccaatcttaagaatttatgtttgtaggctgagcacgatagctcatgcctgtaatctcagcactttaggaggccggatggacgaatcacctgaggtcaggagttcgagaccagcctggccaacatggcgaaaccctatctctcctagaaatacaaaaattacccaggcgtgatggtggatacttgcaatcccagctactcgggaggctgaggcaggagaatcactggaacccgagaggcgaaggttgcggtgagccgagattgtgccactgcaccccagcctgggcaacagagcgagactctgtctcaaaaaataaaataaaataaaaatttacgtttgtaatggttaaatatggagtggttataactgtttggctgtatatgtaaggtaggatttctttctgtttttctttttttcttttgagacatgttgtcgctctgtcgcccaggctggaatgcagtggcacgatcacagatcactgcagcctcaacctcccgcgcccaagcaatcctcccacctcagtctcccaagtagccgggacaacaggtgcaggccaccatgcctggctaattttcttgttgttgttgttgtttgagacaaagtgtcactctttcgcccaggctggagtacagtggtatgatctcggctcgctacaacctctgcctcctaagttcaagtgatcctcttagctcagcctcccaagtagctgggattacaggtgggcgccatctcaaacaacaacaaaaaaatacacttccttgattaactcctttcttcgaattcccattaggacctctcttcgggcactgactgatgaacttctaccgcctcatcttctctgctagacttagagttcctgagagcagaataaatgcggcttgatcagtatttgccgattcaacgcagaggtgcccaggtcatctcggcgagttgagctgtctaagaccccgcgatcgcgcaggacaggacccagaagccagagcgcaggaactgcttccggccggctcccggcttccgtcgggccccgcgcccgcgctgcatgctgggatcttcaggtcggaggccggggtgaggccgacccacaggccgccttgctccctcgcgaagacgcttatgccagtctcgcccgtccccgctcctcctcagagaaaatgctgccccgcagcacttaccggagcgaccatgagggtgacgatttgaagcacacacaggcttcccgccacctcctttaaaccgccgctggcttgccagggacagacggcgcggttggctccccaaaattccgactgatacgcgcctcggcgagcgaaagcaaacgcgggatactctcgcgttcctgattggctggttgtggacacctcaattatgacagaaaggggccgggcgggaaagttagctgtggccggcggggattggcagaaggaacctgtacttactcgtttttcccggacgttggctggtggagaagagagggtggggagatggggcgctgggggggggcggtggcgacgcaactcgtgattggcggatgtgcgttccttaggtctctacggattgcggttgcttggcgttgattgggcagtcgcgggaaaactaaagtgggcggggggcctttgggcccgccccgccgccggggcctgctggcggaaggggaaatggggtgggtggggggtggggcaggcgacggtggggaagatggcgtaccagagcttgcggctggagtacctgcagatcccaccggtcagccgcgcctacaccactgcctgcgtcctcaccaccgccgccgtggtgagcagctgcagtgccaccttctcattatctgggctggatatgactgggtcttcaggaaactggggtttgggcctcggggaggcccagaggggctggtcccggggatgggtggaggcgtacagggattactctggggttcgagttggcgccaagaatgcttatccagtgacgcgagaagggagtgctgcttcatggggggtcaggtcagtttctaagagatgagcgccggacctatagcgggttagggttgcgggagcctcccacccaagaaatgtgtccgagagctctgccaatggccaggtggtaccatggtgactagtgagaggaaggtccgtttagtgaagaaacaggaatggggaaagcaagctggaaactgtcgagaggggaatggcttataataaaaagggtctctggatctaaataaggggctagctggaggtacccagccctaacggtggcagggtctccagtctccgttatttcaagtgagttttgttgtttcatacagctgtttcaggtggtgcccatgtggtgggtagattcatagcagctgtttttatttgtcctgtgtctaaaatatcaccacctgtctgcctcatttcttcatgtcagcctcaactattgcaacataaaacagacttttttgtgttaggtattgaggatacaaagaattctaccaatcctagagaattctttaccaacctcttcctctggcctaagaagaaaggcttaaaggaaatcacgtctaagtgaccgagagttggaaattgctagacctactaattctttgttgtaaatgatgaaattttgtttcttgatttgctttaagaagctctttttctatttcagcagttggaattgatcacaccttttcagttgtacttcaatcctgaattaatctttaaacactttcaagtaagtggttcatcacaatagtgattaatgcttcagtttcttctttttcttactgtttagtagcaaatcctgttatacactatcctaaaaaagaacccagtggggacctttgattataagttgccttgtcaggatataaagcagtgattctgcagcctggttggacttgagaatcccttagggaactttgaagagattctcaagctcctcaacaagtaccaaatcagaatttgcaagggtaggaattaaaatctgtgttttatttttaaagttccctgcatcgttttgatgtgtccagttcctgtatttggaaatcactggtttagacttaacgttgtcctatgagaggaggctgactagctagctgcttaggggttgtctcacagggatggccttattttgtccattcagcacctaggcacacccaccaccttggtgttatcaccatggtccagaaactcaattctgttagtgcttttaaattgtgatctgtcttccagggatcagatcatactaaccaaattccaaacatctaaagctatatggtggtttattagattacaatgggagatggtcctttccagtgattaaaatgccaaaagaggctgggcacagtggctcacgcctgtaatcccagcactttgggaggctgaggcaggcagatcacctgaggtcaggagttcaagaccagcctggccaacatggtaaagccctgtctcttactaaaaatacaaaaattagccaggcgtgatggcacatgcctgtaatcctagctac

SEQ ID NO: 1244349 - DNA, 4001 bp, Homo sapiens
gggcctcgtaggtcattggatccacagacatcttggcttattttgctatgttgttttcagtcgtgaaaaacctgcaaatgtaaaaaggaaataattcatttggaaaaaaaaaatcttctgcaggaagtaaccaatcacattacagatagcaaacaaagaagcaaatcaataaaaaataaggagtttgtgttcctttatacctgatgccactcccacaacaggatataaactctttgcctctctgaggctccttccatcagcctataccctcccttttcccctcctcgttgttcacttcccttacctgtgactttggcacagatcagtcttctgaattatcatcctagacaactttgaagtctagacagatgacttaaccaatgccctagagactcagtttcttgagcttcaatgacctatagctccaccttttagccacctggctcttgatatttgtaactactcttccaaactgcttctactttttgactactgcctcctacacaattcttccaattcttacccatatactcatattataccctaatcttcaagatttacagcccctccaccctctctttctgttctcagcctctgccacttctcttctttccttattcattttaggcctcatgatctatcattttgatcactccgttgccaatgtcctcaatttgcttgtcctccagccaagccatctgaaaaaaacccaattagaagatgagtaagtcccttgtcagctttataaccctgacatgttttttcaagggtctgcgagtaattcctctcaaatataaacatctaggaaaataaaacccctatctccttgtcattgtgggaattcaacctaggcatctttttctgagatgaaatgatattgcttgtcatagaaataagagaaattttattattccttcagataaaggcaattagctaaaacaaactgctacttcaattatcaggtgaatttaggacgcactttatgaaataatttgcaataagcagtacagtcaaatcttatgggaagataagatgcagccaatcttaagaatttatgtttgtaggctgagcacgatagctcatgcctgtaatctcagcactttaggaggccggatggacgaatcacctgaggtcaggagttcgagaccagcctggccaacatggcgaaaccctatctctcctagaaatacaaaaattacccaggcgtgatggtggatacttgcaatcccagctactcgggaggctgaggcaggagaatcactggaacccgagaggcgaaggttgcggtgagccgagattgtgccactgcaccccagcctgggcaacagagcgagactctgtctcaaaaaataaaataaaataaaaatttacgtttgtaatggttaaatatggagtggttataactgtttggctgtatatgtaaggtaggatttctttctgtttttctttttttcttttgagacatgttgtcgctctgtcgcccaggctggaatgcagtggcacgatcacagatcactgcagcctcaacctcccgcgcccaagcaatcctcccacctcagtctcccaagtagccgggacaacaggtgcaggccaccatgcctggctaattttcttgttgttgttgttgtttgagacaaagtgtcactctttcgcccaggctggagtacagtggtatgatctcggctcgctacaacctctgcctcctaagttcaagtgatcctcttagctcagcctcccaagtagctgggattacaggtgggcgccatctcaaacaacaacaaaaaaatacacttccttgattaactcctttcttcgaattcccattaggacctctcttcgggcactgactgatgaacttctaccgcctcatcttctctgctagacttagagttcctgagagcagaataaatgcggcttgatcagtatttgccgattcaacgcagaggtgcccaggtcatctcggcgagttgagctgtctaagaccccgcgatcgcgcaggacaggacccagaagccagagcgcaggaactgcttccggccggctcccggcttccgtcgggccccgcgcccgcgctgcatgctgggatcttcaggtcggaggccggggtgaggccgacccacaggccgccttgctccctcgcgaagacgcttatgccagtctcgcccgtccccgctcctcctcagagaaaatgctgccccgcagcacttaccggagcgaccatgagggtgacgatttgaagcacacacaggcttcccgccacctcctttaaaccgccgctggcttgccagggacagacggcgcggttggctccccaaaattccgactgatacgcgcctcggcgagcgaaagcaaacgcgggatactctcgcgttcctgattggctggttgtggacacctcaattatgacagaaaggggccgggcgggaaagttagctgtggccggcggggattggcagaaggaacctgtacttactcgtttttcccggacgttggctggtggagaagagagggtggggagatggggcgctgggggggggcggtggcgacgcaactcgtgattggcggatgtgcgttccttaggtctctacggattgcggttgcttggcgttgattgggcagtcgcgggaaaactaaagtgggcggggggcctttgggcccgccccgccgccggggcctgctggcggaaggggaaatggggtgggtggggggtggggcaggcgacggtggggaagatggcgtaccagagcttgcggctggagtacctgcagatcccaccggtcagccgcgcctacaccactgcctgcgtcctcaccaccgccgccgtggtgagcagctgcagtgccaccttctcattatctgggctggatatgactgggtcttcaggaaactggggtttgggcctcggggaggcccagaggggctggtcccggggatgggtggaggcgtacagggattactctggggttcgagttggcgccaagaatgcttatccagtgacgcgagaagggagtgctgcttcatggggggtcaggtcagtttctaagagatgagcgccggacctatagcgggttagggttgcgggagcctcccacccaagaaatgtgtccgagagctctgccaatggccaggtggtaccatggtgactagtgagaggaaggtccgtttagtgaagaaacaggaatggggaaagcaagctggaaactgtcgagaggggaatggcttataataaaaagggtctctggatctaaataaggggctagctggaggtacccagccctaacggtggcagggtctccagtctccgttatttcaagtgagttttgttgtttcatacagctgtttcaggtggtgcccatgtggtgggtagattcatagcagctgtttttatttgtcctgtgtctaaaatatcaccacctgtctgcctcatttcttcatgtcagcctcaactattgcaacataaaacagacttttttgtgttaggtattgaggatacaaagaattctaccaatcctagagaattctttaccaacctcttcctctggcctaagaagaaaggcttaaaggaaatcacgtctaagtgaccgagagttggaaattgctagacctactaattctttgttgtaaatgatgaaattttgtttcttgatttgctttaagaagctctttttctatttcagcagttggaattgatcacaccttttcagttgtacttcaatcctgaattaatctttaaacactttcaagtaagtggttcatcacaatagtgattaatgcttcagtttcttctttttcttactgtttagtagcaaatcctgttatacactatcctaaaaaagaacccagtggggacctttgattataagttgccttgtcaggatataaagcagtgattctgcagcctggttggacttgagaatcccttagggaactttgaagagattctcaagctcctcaacaagtaccaaatcagaatttgcaagggtaggaattaaaatctgtgt

SEQ ID NO: 1244350 - DNA, 4001 bp, Homo sapiens
tgaaaccagcctggacaacatagcaagaccttttctctactaaaactttaaaaaaaaataaactgagtgtgagtctgtagtcccagctagttgggaggctgaggcaggaggatggcttgagcctgggagaccaaggtttacagtgagctatgatcataccactgcactccagcctgagcagaagaatgagattctgtctcaaaacaaaacgaaaacaaaaacaaagaaaacaaatctaatctaatacactcttgggtatgcctttttcagagacacgtttcacaacctgtgagcccacactcttgcccaggaacagctctgaacagaaagagaaacaataaaagcaaacagactagtgacctgacaacaaccactctgtcctctcctcctcattcttttggtttcccagataaggaaaaccacaagaacacagttgatctatacatgcacatcatatgcagattttgcaagcagtctccagtttaaaaattgtttttaaaagtgtttatatgtgtatttagggtttggggcacgttttctcttttaaaaatgccacaaataggacgggcgcggtggctcacgcctgtaatcccagcactttgggaggccaaggcgggcggatcacgaggtcaggagatcgagacaatcctggctaacacggtgaaaccccgcctctactgaaaatacaaaaaattagccgggcgtggtggcgggcgcctgtagtcccagctactcgggaggctgaggcaggagaatcgcgtgaacccgggaggcggagcttgcagtgagcggagatagcgacactgcacttcagcctgggggaaagagcaagactccgtctcaaaaaaaaaaaaaaaaaaaaaaaaaaaaaaaaagccacaaatagaatgtaggttgccgggcaactctataacatatcagaagtatagtatttgttatctcactacatttggccacaattctgattagtatcataattagtattagatggcacatcaccaccgtaacacccactggcagttggctgaggcctaaaagtggccaagtctatgaggtccttcccgagctcggcagcaggctgataatgaagaaagttgcttgatgtgattctttgcaggtggactctgtcaagaaaagcccaaaatattcgttaccagacacgcaaccaggagatgaacacaaagcaaggatgggggaaacaaaacagaggaggtagggttgccaaggtgtgctgggtgcagacaacggagaggaggtgggtgggtgcgccgtcctatggggaagaatgaaggggagagggtgtactgggggcacagggctttgagaaactgggagcaacaaagacgtgaatggacttgggtaggtctgtaaggggttcttagaggctgtgagtggatgggggtacggatagtgaaagaagtggggagcccggagaagtggtcgggattgtaagcagaaagtggggacctcagaacaccgagctcaggttggaatgatctaaggacacaaaagcatggggcctcggggctggggcggtgcgactaccggaggcgcaagttgcgcacggggtcccgggagcgatacactgcctccccggtgtcagtgctccagacggtctccgccatgacagctgcgacgcgccgcgactgcgccggaaagcgcgccgctctgttttcctggcaacggagacgctggatcgggaggcgacggaggtgctgcgcgcgcaacccgccgttcccgtcacggcgccacggtcgcagttggccacacagtgcaagtgcagcccaagccgaacgcccaagagggctccggggtcctaccgatcaccgcttaccatgtatgcgataaaagctcaccgaaagcgggacctcgtgcgctgtgcaaatgaggaaactggcacagccatcagcccacttcatatagacagatagatgcagaaatgatgacggggaccaggtggcctgagtcttcgccctctaccttttccaccatgccacactgccttccacccaacgcgtgaaaactttggcctgaaaatcgggtgatgtgactgtaagaaatgcacccattattcccaaaggagtcagggaaggtgatggcccttagccagacaagaaaatatattcttggaagacaaaaaaagtgtcagaagatttattagtctttgtgttgatattcactgagcaaagaaagaaaaaacaaggaagtcaacagtaaggaaggaaacgatgttattattgaactgattcttaccttgtgtatgttagttttggatcattaagccactttgttactgcactggcttcctgaaaagccaaaaaagtgacattcacaagtcatgcttcgttgtactagcaaaggaaggacatgctgtaacctcacgtctggcgtcccggcactttgggaatgtcaacatttatcagccttgttcacatctagtcctcctccaacaaagtaagcaattgtcccctgaactcgggaatctcatgccagtttgatgatttggcattggaagctctgggtgccatagccactagttgtgtaacaccgactcaccataaatagcaccatttatttaggatctagtgcagcttgagcacttttgtttgcattgtcccaaatccttgtagaagcctctcaaaaaggtacttttattcactttaaaaatgaagttcgtgaaggccagggtttaaaggacttgctagcttgcaagtggtaaaagtactgggattctagcccaagttcttctgtcttttgaagcctaaccaccttccagtttgcctcacagcctctcacctaccaatttattccataaacgcacacatttccaacctgggaaataataatttttttttttttttttttgagacggagtctcgctctgtcgcccaggctggagtgcagtggcgggatctcggctcactgcaagctccgcctcccgggttcacgccattctcctgcctcagcctcccaagtagccgggactacaggcgcccgccactacgcccggctaattttttgtatttttagtagagacggggtttcaccgttttagccgggatggtctcgatctcctgacctcgtgatccgcccgcctcggcctcccaaagtgctgggattacaggcgtgagccaccgcgcccggccggaaataattttaacataaaacaaaaggcacctttctagctcctaagaaattgtctctccaatgtttccttttaaaattgtgagtaggcaatctgtgccacatgcacaacagctgataaagtggagcctgattctagtttaattttataaccaaatctaacttataacaaagttaatctgacataattatatgcaaaatagtttctataccacgttatggaaatataagctatttgtgtaagcaaccataattagtattatttttatataggtaaactaagttttcatgttttgtttactgatttctatgaatcaggatccttttatgtttaaatattcagcttattggtcttaagtacatttaccttgtttttcaaccatcatcaccatccatcgccactactttcttatttttgaaaattgaaactctgttcccattaaatagtaactcctcattcccctcttccagcccctggcaactaccattctacattttctctctatgaaatttgactgttttagatacctaatccatattgtagcatgtgtcagaatgtccttttttttttttttactttaaattccggaatacatgtacagaacatgcaggtttgttacataagtatacatgtgccatggtggtttgctgcacctatcaacccatcacctagattttaagccctgaatgcattagttatttgtcctaatgctctccctccccctgccccagactttgcgacaggccccagtgtgtggtgttcccctccctgcgtccatgtgttctcattgttcaactcccacttatgaatgacaacatgcagtgtttggttttctgttcctgtgttagtttgctga

SEQ ID NO: 1244351 - DNA, 4001 bp, Homo sapiens
aatctaactggatataagaaactgaaatttagatataagctgaatagccagcccttcctcagtcccaactgtctgcatttgctagaaaataaccctggcatttttatctttactatttctaaagccatatatgtagaatcacaaacactgaaatttaggagaccaagtgtaaggagaggacagtgaaggcaaataaatgattttttaacagaaccaaatctggctgaatgcagtgactcacgcctgtaatcccaacattttgggaggctaaggtgggaggatcacttgggcccaggaatttgaaaccagcctggacaacatagcaagaccttttctctactaaaactttaaaaaaaaataaactgagtgtgagtctgtagtcccagctagttgggaggctgaggcaggaggatggcttgagcctgggagaccaaggtttacagtgagctatgatcataccactgcactccagcctgagcagaagaatgagattctgtctcaaaacaaaacgaaaacaaaaacaaagaaaacaaatctaatctaatacactcttgggtatgcctttttcagagacacgtttcacaacctgtgagcccacactcttgcccaggaacagctctgaacagaaagagaaacaataaaagcaaacagactagtgacctgacaacaaccactctgtcctctcctcctcattcttttggtttcccagataaggaaaaccacaagaacacagttgatctatacatgcacatcatatgcagattttgcaagcagtctccagtttaaaaattgtttttaaaagtgtttatatgtgtatttagggtttggggcacgttttctcttttaaaaatgccacaaataggacgggcgcggtggctcacgcctgtaatcccagcactttgggaggccaaggcgggcggatcacgaggtcaggagatcgagacaatcctggctaacacggtgaaaccccgcctctactgaaaatacaaaaaattagccgggcgtggtggcgggcgcctgtagtcccagctactcgggaggctgaggcaggagaatcgcgtgaacccgggaggcggagcttgcagtgagcggagatagcgacactgcacttcagcctgggggaaagagcaagactccgtctcaaaaaaaaaaaaaaaaaaaaaaaaaaaaaaaaagccacaaatagaatgtaggttgccgggcaactctataacatatcagaagtatagtatttgttatctcactacatttggccacaattctgattagtatcataattagtattagatggcacatcaccaccgtaacacccactggcagttggctgaggcctaaaagtggccaagtctatgaggtccttcccgagctcggcagcaggctgataatgaagaaagttgcttgatgtgattctttgcaggtggactctgtcaagaaaagcccaaaatattcgttaccagacacgcaaccaggagatgaacacaaagcaaggatgggggaaacaaaacagaggaggtagggttgccaaggtgtgctgggtgcagacaacggagaggaggtgggtgggtgcgccgtcctatggggaagaatgaaggggagagggtgtactgggggcacagggctttgagaaactgggagcaacaaagacgtgaatggacttgggtaggtctgtaaggggttcttagaggctgtgagtggatgggggtacggatagtgaaagaagtggggagcccggagaagtggtcgggattgtaagcagaaagtggggacctcagaacaccgagctcaggttggaatgatctaaggacacaaaagcatggggcctcggggctggggcggtgcgactaccggaggcgcaagttgcgcacggggtcccgggagcgatacactgcctccccggtgtcagtgctccagacggtctccgccatgacagctgcgacgcgccgcgactgcgccggaaagcgcgccgctctgttttcctggcaacggagacgctggatcgggaggcgacggaggtgctgcgcgcgcaacccgccgttcccgtcacggcgccacggtcgcagttggccacacagtgcaagtgcagcccaagccgaacgcccaagagggctccggggtcctaccgatcaccgcttaccatgtatgcgataaaagctcaccgaaagcgggacctcgtgcgctgtgcaaatgaggaaactggcacagccatcagcccacttcatatagacagatagatgcagaaatgatgacggggaccaggtggcctgagtcttcgccctctaccttttccaccatgccacactgccttccacccaacgcgtgaaaactttggcctgaaaatcgggtgatgtgactgtaagaaatgcacccattattcccaaaggagtcagggaaggtgatggcccttagccagacaagaaaatatattcttggaagacaaaaaaagtgtcagaagatttattagtctttgtgttgatattcactgagcaaagaaagaaaaaacaaggaagtcaacagtaaggaaggaaacgatgttattattgaactgattcttaccttgtgtatgttagttttggatcattaagccactttgttactgcactggcttcctgaaaagccaaaaaagtgacattcacaagtcatgcttcgttgtactagcaaaggaaggacatgctgtaacctcacgtctggcgtcccggcactttgggaatgtcaacatttatcagccttgttcacatctagtcctcctccaacaaagtaagcaattgtcccctgaactcgggaatctcatgccagtttgatgatttggcattggaagctctgggtgccatagccactagttgtgtaacaccgactcaccataaatagcaccatttatttaggatctagtgcagcttgagcacttttgtttgcattgtcccaaatccttgtagaagcctctcaaaaaggtacttttattcactttaaaaatgaagttcgtgaaggccagggtttaaaggacttgctagcttgcaagtggtaaaagtactgggattctagcccaagttcttctgtcttttgaagcctaaccaccttccagtttgcctcacagcctctcacctaccaatttattccataaacgcacacatttccaacctgggaaataataatttttttttttttttttttgagacggagtctcgctctgtcgcccaggctggagtgcagtggcgggatctcggctcactgcaagctccgcctcccgggttcacgccattctcctgcctcagcctcccaagtagccgggactacaggcgcccgccactacgcccggctaattttttgtatttttagtagagacggggtttcaccgttttagccgggatggtctcgatctcctgacctcgtgatccgcccgcctcggcctcccaaagtgctgggattacaggcgtgagccaccgcgcccggccggaaataattttaacataaaacaaaaggcacctttctagctcctaagaaattgtctctccaatgtttccttttaaaattgtgagtaggcaatctgtgccacatgcacaacagctgataaagtggagcctgattctagtttaattttataaccaaatctaacttataacaaagttaatctgacataattatatgcaaaatagtttctataccacgttatggaaatataagctatttgtgtaagcaaccataattagtattatttttatataggtaaactaagttttcatgttttgtttactgatttctatgaatcaggatccttttatgtttaaatattcagcttattggtcttaagtacatttaccttgtttttcaaccatcatcaccatccatcgccactactttcttatttttgaaaattgaaactctgttcccattaaatagtaactcctcattcccctcttccagcccctggcaactaccattctacattttctctctatgaaatttgactgttttagatacctaatccatattgtagcatgtgtcagaat

SEQ ID NO: 1244352 - DNA, 4001 bp, Homo sapiens
caccccaactcagtccattcctgccttcccagaccctgctcagggggccctgctgacctcagcagatgagcccgcctcacctccattatcagtcctcttcaatgccccgtctttgtgtgggcacagctcacacctctgccaatgcaagagtgcacaggggttgggggatctgctgagctggaccctccctgaacacgttcaaggggtcccaggctgaaatgctaagctctagggtggatggatggggctacagtggaaacaggattggccatgagttggtaactgttgaaaatgaggaaggggacatgagattcattatagttttccctttactttcatatgagtaggaaacttcccataataaaaaagttcaaacagacaaaaaccaaagccccatgcctgaggtggggcagagggagggatgagcgtgaggcagagatgaggttggaggtaggtgtgcaggaaacaggaagtctgtgtgacagagctaaatcccaccctagcctcggcctcagagtcccctagctcaacctgagacgctcaggtgtgtgggaggggcaggggagtggagaggggcagtctggaactcaccaccctggctgctcgctcctgagattcacatttccggcagaaccagggtcccgttggcacctgaacgatgccatagcaagctgagggtggggaggacagtcgctgagcaaagctgtcagccagtggctttttcccagggtaactgggggaaggcggtgactccaaaggactagagccagttccagcagtgggggctgctccccagtctacgggtcactcactctacagcaggactgcccaaccgcccaacaccagccttcaaccacacaattaagcacttcaaacagggcgggaagtctgagtctttgaccttaaacttctagaagatcctccccccacgccctttctggacttgtttcccagcttcttcctcggaccagccatcagcatcagaaatagagaaaaccagaggggacaacagtcacgaccgtcaaacacgttttgttgttgtgggcggggggatttcttaaagggccagtgagggacgaggcggagaagtagggggtctagggacctcatcttctacctctaagtattccagaatcaggttaaaagtcaaggctgagggcaggtgcggtgctgggaaccgagaggagcgtggcgggaagagccccgggccacagcattcagggatgtcccaggaagggggggcccggctgcctgtgccaggcaggcgggagatgccagcctgcgccctcggcaagattcctcaaggagttaactcccgaaccatgtgctgctgggggaaactccaagcctccctcttctcgattccggccccctgcacaacctctctcctatccttagctcttccccggcggattttaggagtcccttctcccctgggacccttctcttccctttccaagtccgctcctcccattatccggaagcgaggggggatgacgccccccccttgacctcttcctccaggagccgggaccaaaataaccgggcgggaggggacacctcgcaggtaaacattccccaggcagccccgacacccgcggtgtggggcgtggggagttcactcattgctccctagactctccccaaactccctcaacttagggtggggggcgcggaactggaacaataggcaagaaaacaatgcctgacccggtcttccaggaccgggcggggggagctccccctacgcctcccttcccttcaggtggggtgggggaggggcgcgcgagccccaggaggtctccggagggcgcggccgggggcgccccgcgcacgccgcccccggggtcccgccgccccccgcgggccacccccgtaccttggtggacggccacgctgcacgcgtgcccatcgcagtagaccagcgggttctcggcccagcccctctcgtccgaacatacgcagcagcctcctaccatctccttcatactcccatgagctccctccggggctggggcggggggccggccggcgggggtcgggggtcaggggggagggagggagcggggggccgcgcgcctcctcgccccctcctcctctccctccgccgccgccgcttcttttctttgcctcctccttcctcctcctccgcgtcctcctcctcctcctcctcgctcgctctgtctggccgccccccccgccgtgctctcgccctcatgccccgacgggccccccccacaacaatgagactcgcacgccgggctcgccccctccgcgccgctcgcccggctcctagggccgccccgccgccgcgtagcccgagcccggcgggggaggcgccgagtggcacatcgcgggcgcccgcccgccccgcgccgccccgcgccacccgctcacgcgccgcccccccggcccccctgcccggccgcggcagccatggccgcgcgcctccgctcgctcgctcccggcccgcccgccgccagccgccgggtaaagtcttaggttcagggaacaaagcctggcttggtagggagcttttcgctctttcgctccgtgctgctttgcctgctttctttttcgtttcacggctctgggtcgtcgctcccgagccctccctctgcccgcactcccgtctcgggccccgggtccccgagtctccagccccctccgccaagtcttcgtctctgggtggattcttcagccccagggaaactttggagtggagaccgggggaaggggcgctaggaggaatgggagcgacgcgggccgttcgcccccgccccaccccgtgtctgggggtctttttggatggccgccctcgggccctttcctccgaggccactctggagggtagacgctctcacacgcagacatttattcattcaacagatatttattaaacgctcgttgccagtcgctgggatcgagtagagagcaaaacatattcctgccctcggggagcttcctgtcgggttcacagacacacacgcacgcacagggactcagagccccagagacacacaccgaggcacccacagacacgagctaactcccagcttcagtcacaccactgaccctcccagagacacgaacctccgctccagccccgcgggtgcgcttagagacccacgagagttagagacccgcaaccacgaggtgctcacgaacaccagttacacttgacctctaggcacgcacacagacacacaaggtaactcacacgcagcactccagaggactaaagtccctgcaattgggtctgggggagaagtgaggggcgtcggcccaaagtcttcttcccaacctgtgtgggcaagggggggtgagatctgacccccaaaaacttcctaaagggggacgactcgtggggactaaaggtcacccgccccccacagcgggagttcgggtggcgtaggggagaaggcagccctgggggcttcaacgacacttcaaagacctcgcggccgggaacgcttcctgcgggggaggggcaaacagagaggagaagggaagacgggccgggggactgggggtggaggaggccgcctccccttcggcgcactgccccctggcagactcttccgccgggtccgcctccttttcaccagcacctgttcaaccggaacatcaagggcctggggcccgccgcggccccccgtcggctctttagtacctttcatccggaagggagatgaatccccgcccaggaggggggagtagggcgggggagaacttgtccttgacctggtctttggcgtcagggatttactcccttaatcccggagaggcgggagtttggggaggtccaggaagctgagttctgggctgcagccccacacctctcctcgctccggtggacacagggaatctcggagggctgccgggacgaagaggctacatctacacagggcggtgtaggggaagcccgtctcttcgacctccgtgcctgggagtaggggccgagagccagattattgcgatgaccggaatcccggcgagga

SEQ ID NO: 1244353 - DNA, 4001 bp, Homo sapiens
tatactacctgcccaccccctagggtgcctgggactgtctgagtgggtcagggcacagggaagctaaactatgcagggccctcccgcactggctgaggcacaggcctccctgttcaccttgatggcgtccctcctcttctgctcagcctgagtgtgtgcgcgccgccgccggtctttgtaggactccttgtaggcctcctggtggtaatcactgtcctcatcatctacgctcagagatgggggcagggaaaggtcatcttggggcccagtggggtccagctagcccacctttccccagctgggaagaacctggtgtccagagaaggcagatggacagaaccacctaatgttccagatgaggtgaaagatggtgagaccttgtgtctgatactttggctccagcacccctgtgtggatggctggggcttccctgtctaggaaaggtactacaattatgacatatctgagccccccgaggtcgggggggatgttactgcctacctgtgttggggacagaagaggcactggtggaaccgatgctattagctctggacactacactccccttgcgggtgctttctacaaaaagccctggaaaagagaggccccaatcactaaggggtggggtggggaacattgccagaccctcagacacctgtaggacacaatggctttcttttatttatttattttttttttagacagagtctcgctcagtcgcccaggctagagtgcagtggcgcgatctcggctcactgcaagctccgcctcccaggttcacgccattctcctgcctcagcctcccgagtagctgggactacaggcgcccgccaccacgcccggctaatttttttgtattttttagtggagacggggtttcaccgtgttagccaggatggtctcggtctcctgacctcgtgatccgcctgcctcggcctcccaaagtgctgggattacaggggtgagccaccgcgcccggccacacaatggctttcttaaatgctgacctcttcccttcaacccaaagccaaccatactgggccccccacttcctgccagaccacgctgcagtgctctgctccctagtgtctacactgctccataggcctgcatgatacccccctggctcacaaacgggcatgtggacgtgatgagggtgtgagtgatcagctgctccactgagtggtgagtgatcagttccaccacttccctgttccagagcagagggaactaggtgtcaccctcagttgttttctgcccttgtccttcagctcctgctgtctcaagccaggaactctgctcagggagagtggactgtgctcaggcgtggttggcaacgccacaagaatctagagagcctgggcgggagtgtccctctagagcttaagatggggcagctactcaccggggtccaggctgttgtcgctgtaggcatactccacctgcggcacagagcacgggaagggcccgtcagacctccgcccctagggggaggcgccccttccactgcaggcacgcacagcgcgccccccattccgggaaggcgcctctgtcaccctgcgcgcttgcacacacacagcccggggtgcgcgggcagcttaatgagtcccccgagactggcacaggctagggcgtgcgagtgcctcccctgtgtatgatcccttccgcccctactccaccccagtgccccgttcccccgactcgcgcgcacacgcctcgtttgtctccccaccttggcacacgcggggtgagagctgtcttctctgcagccccggggcacggagagcgtgggggactttggggacaggagggaagcccctcgtcttccggcccccctacgtgcacgagcccgacccgccctcccctcgccggcgtgcgcgcccacggggcttgccttgacccaagggtcctcgggagaggcgcccggctccgtcatcttgtacccaccggaccggaaacgggccagcgggcgggccccctgcggcgaggaagcgggtggcgtgcccacgtgacccgcgcccgccaatccgcgaccgagaggtggggcagggcgaagcatcgcgcatgcgcagcccaaagactttactccacggttccagccgtcaaggcccggcgcttggcctggcgccagcctccttcgagactgctccccgccgtgcctgccctccccgggttaggcagtggaatggcggcgacatgaagcgcgttttgtaagatggagtcccctcaattggcttgtcagcacaccgccgcagatagtgtgtgcacgcgcactgtccggccggccggctccccacgttaccctgagggcggcctccccgcgctcaccggacctgcactgctggccggtgtgtcaggaaccgggcagagaagcccccagccacatcgtccgaccccaccaggctgcaagctctgtgagggcagaggccccgcctggcgcgcggaaggctgatcttccaacacccagcccagtgtctggcaggatgcatgtggaatgaacccttgcaaagaacctgctagctaggttatgcggcctctcatattaaaaacaaaacaaaaacaataaaacacggcagtacctagaaagtctacaccttactcagaagaacacagctggtcagtgggagggccaaagctcgcctctggctagcctcaaaggccattctcttaaccactgcattgcccaggcttccagctcaggcctgggccctgcacttgtggcttaaggatcccaaagatacttaggggcattggaacaggaagcagacaccatacaagcaacatctcagaacattcacctttaattctgttacaggttccagtatttgcgctggccctagtcagctgtgggtaagagtcacccatgggcaagagtggggaggggactgctcccccatgaaccacatcctcagtgttggccaaataccagcgtgttgggtaggcttcctgtgtccaccaggcctggccatgtcctgcacagtatagcttggacctctgggcctgaaccagggtgagcatcaaggcccccatttctcctcaccacggggtcgcttgtcagctccaggagccagtctggccccactgagaacttttcagtcgagggcctgatgagtcttgggaatgcgcttctgcaagagggcccaggctttctccaccttcagacaggccaggatgttgggaggaagagagggcagggtcaggcagtacccactggagactccttccccacaacccggccttgccctgggcaccaacctggcgttgggtgatatgcggctcccacaaggtgctgagcaccacgtggctctgttccacaagctgctgcccgctcatctggctctgcagccggctttgagccgcggcttcactgaggccatccctctccacaatgcgtcttacagcctgagcacagacgagacatttgtcaggaagaattccagctcacaggataggatctgcagtagggatggtgtggggggtggggcgagatacctcagtctctgggatgacagcagtccacacctcatggaccaggttctgccagccggcttcaagcaacacagcggcatcaatcacacacacacgctttcctgtggggagaccccagtcaccgccagcagtgccgacgttctcccaggcagaacacagtcccagggtgaacagacagtcccacgttgggcagggaagctcccaggggaagaaacagcttaactgtccccttagctgttgccatcctccctcccactcaccctcagccacagcccgatccatctcctctcgggccagctttgcgataattggccacataatgtccgtgagtatcttcagctgcttctggggaggggaacagagggcagaggttaccttctctagaagaggcagccagcccgagcaaggtggtgttgggaacagatcaatggaaatggcattctgggccagaccagagaggtccactggaccctgacccctgggtctagtagcggcttaggagcccttaggaa

SEQ ID NO: 1244354 - DNA, 4001 bp, Homo sapiens
aaaaagtcagttcaataagctgagagggtagcatcctaaatgaagttgttgttgttgttgttttaacagttttaacgtttgtgcaacaaataattgaacagggtttgtttgttttttttctttttagaggatccaaaggtataggtaagaatgacaaactcttaatcaaacaaggaaggggcaatttcacagaatattgccactgttctctgaaaacaggaagagcacagacgtgtagagaagtaaaaccaaatcaaaccgcatgcacagggcttcactgatcatgactggagtgcatgttacattctctctaaaagcccctccggtcttcatttctgacatcaggttctaaagtcagaacactacggttccattttgcccttagacacaccggtatgaagttccactgggggaacagtgccaagcattcaacaccctgactgataagcaatatattcagaagtcaatccaagtcttcaagctgatccccttcctggtggcccagaccatggcaactcttctgtgcatttgttgcctcctttaccctttgggactgggggaggaatgagatgggtgagagggcagtgagggcatggagattggaaagaaaaaaaaaatgtgtactttaaaattctgaaataaaaggtagtgtctaaaaactcaacaaccttcttggaagatttcatgcatttcttaaaatttcccctgtcactgcacccccagcaaacatgctggtggtgaaggtccgggaattcacacaaagggatgcagttaccatatgccctggagaggtgaactttcacccacttaaacagaaaagaaaagcccggagttcctctcagagtcatgggctaacctccatccattgttagacggtggagccccagaggggagtaaggccacggcgccccccagcccggcatttccaccagctctacagtgaatgagcagtcggccagccttccggtggcgcctccacggttcctcctcctcgtttcctaacaccggcgcctccacagcaggtctcgccacccgaaagctaacatgccccttcgcagagcccaaaaatagcaccgccctgggacgttcagctggagaaccagcaaggcccctacacggccaggcagggctaagctggcggagcgtgcctcagtttccctgttgctagggccgttcacaaagcacccaaaatgcctagcaccccgctttacgacaaatctctccgcagggcgccaccccgttccgcgcgccccgggagacccccaccctggaggtaaagggatggaggccaaagccaggtcggaggactcgggggcggtgcccggggctggggttcgggttcccagagagagccagagcccagcctgtatgggggtcgggagggtgagccccaggagcaaagggatccccgggaaggaggacaggcttggagtcccggggccgggaatccatctgaggtccgcagatcgcgaggggagacccgggtgaggcaggagctcccatccttggaggaaggggatcgcccagggacagcagggtggggaatccccagggaactgatccctggccaaggtgcgggatccacccaggatgaatccaggtgaggagccgggagccgtgcgcttaacggcgggatttgggaacccgcttctgacacgggcagcgggaccgggacgccatccctctcaccgctggaatcgattcttgaaccgcattgatcctctgctcctcctcgggggccaggagctccgtctcgtcagcaccggcggccgggcgcgcggccctcatgggcttgggctgctccggaggccgcctgcgtgtccagcggaacccttcggccgggtagggtcggagtgggccaggccgggggtcgggacagggctggggccagaccgggcggctgggggcgggagggaggccgcttcaacggccccaacacctcccgcctcccgcctcccgcctccccggctcctccgccccggggctcctgcgccccgccccggagcccggctccgcccccgccggctctgttcgcctgcgtgcacccgcggtcgccggcgcgtcagcgcgccggtcagccaatcggcaccccgagcggcgcggcggctacgctgccattcattcccgccgggctcgggcagcgaggcggggcctcgctggggaggggcggggcgaggggaaggggaggagcgcgggaacgcggcgcccttctgtaagagacaagttggagaagagatcgagggagggagagaagtggtgaaggaggagatggaccaggaaatcttaaaagcattgtgaagaaaatagcagcaaacaagcagccctacctcattcattttttcttcatcattaatttctccatccctcctttcatttattccttcatcattttgagggccagctcccgcgaggctattgtgagaggatccagggcagaatgaaaaacctgtccttgtctgacccttgagggagttgagatctctgagcgtcttctaactctgagattcagtgagatccacaaaaggaggaatcctctgcaaggatccttttatgttatcctccagtttattttttattttattttatttttatccaggcagctttcaaataaacgagttgacttgaatcagggtcctgtcgctaaacctaaactcagagggcttcctggaagagaagttcaaataaaaatgaatgaatgggccaggtgctgtggttcatgcctgtaatcccagcactttgggaagccaaggtgggcggatcacctgaggtcaggagttcgagaccagcctggccaacttggtgaaaccttgtctctactaaaaatacaaaaattagccgggagtggtggcgggctcctgtaatcccagctactcggggggctgagatgggagaatcacttgaacttgggagatagaggttgcagtgagccgagattgcaccactgcattccagcctgggtgacagagtgagactctgtctctctctctctctctcacacacacacacatacacacagaatgaatgaatgggtgatttgtcgagcctttccaggatcactgatggaagttatatgtgttcccttccaggtatcgtgtccatacccagcccccagcctgcaggctagagactctgaagtggcatgaggccagcctgctaggagtgctcattcgacctacagtaaagcattggaaagccagggaattctgtcacccataattctagttccctttccttgaaccttccagagaggtgctttccatgcttcaatcttcccaagagctcctccagatgggcattatccaacttattttacagataaggctgaggcttatagtggtcaataaacttgccaaaggcaaaagtaaggctcctacctacctttcgctaactttaaagacccacctcctttcagtacgtcagactatctctccctgttttaaagcaatacacttctctaaaacaaaacaaacaaaacaaaacttcatctacccgcaccctcaacactaaatcgggaaaatgaacctggaatgaaagtctgcttcttatcagctatgttgggccactgggctaaaacatcagtgcgggaggggaaggtaacaaaggagatagctaataaagatagatgaaaaatagccatgtgtaataacataagaagggttaaaaaataaaacaaggaagctcaattgtaacagatgtaccacactgttgggggattttgataacaggagaggctatgtatgtgtgggaaatccctgtactttactctcaatttttgagtgatcctaaaacttctctggaaaaaaaaaagtctttttttttttttttttaaagggccaggcacagtggtttgcacctgtaatcccaacacttcgggaggtctaggtgggaggatcgcttgaagcctggagattgaaactagcctgagcaccaaagcaagagttcatctctaacaacaacaacaacaaaattagccaggtgttgtggtaggcacctgtagtccc

SEQ ID NO: 1244355 - DNA, 4001 bp, Homo sapiens
ctgagaagctctcaacgggcagtttgagggcaggaaagaagctcttagaggagcaagagtctcagggcagagcattgggctcagtaattcagaacctgttcatattccagctggatgcagtggctcacgcctgtaatccaagcattttgggaagccaaggcaggcggatcacttaaggtcaggagttcgaggccagcctggccaatatggtgaaaccccgtctttactaaaaatacaaaaattagcctggcatgatcgtgcatgcctataatcccagctacttgggaggctgaggcaggagaatcgcttgaacccgggaggtagaggctgcagtgagccgagatctagccattgcactccatcccgggcaacagagcgagactctgtctcaaaacaaaaacaaaacaaaacctgttcatatcccttctccttaaaatagtggagaccctggccgtattcttgagaagaagtaagaacacaagcagacatgcttctttgggggaggaaagaaaagatactgttgtgttattacaaccacttttttttttttttttttgagacagagtctcactctgtcgcccaggttgcagtgcaatggcaggatctcggctcactgcaacctctgcctcccgggttcaagtgattctcctatctcagcctcccgagtagctgggattacaggcgcctgccactacgtctggctaatttttgtatttttaataaagacggggtttcaccattttaggcaggctggtctcgaactcctgacctaaggttatccgcccgcctcagcctcccaaagtgctgggattacaggcgtgagccaccgcgtccggcctacacttttatctagaaaatagatgccttatattgatccccacccctacctcacaaaaaaattccccttgcgcaacctacaacaagcaagttgagtccaaagcaagaaaatggaaagggagctctctaaggttcaccttcctgcccccttaagttcagtcctgaagccccgtttaaagctccttagaagcaactcttgagagtatactactcttgcccattttacagacagaaaaactagttctgagcagtttaaatggcttgcccaagcaggtcagcggcggtccccggccaggaagccagcgctgtgtcccgcgtcccggccagccagcggtaccctctccacagcaccaaactgaggcttccacacggttcgggggcatccgacgaatgaacctcattctccccagcctaggtggtgagggagagtggccccgtgccaaactagggtaggatgtcccctctgggctcttgcccgtctgtccggtctcgtctctgcacccaccccagcccatcagtgcggatccgcgtgcctgtgtggttccagcctggcacggggaaaaaactgcccggctctttatgttcaagtgcgaagggggcggaggacaggggtagggtaacgcagattgtctgctcacaggggactgccgggtggcctgactgccgagttctgacaggtctcaagcacacgcaccgctctccgccaggtacacacggcgtacctccgcctccttgcgcagctcctggcctccgcgctccgcgggctgggcgtccaggtggccccacagtagcagctgcagggcgcgcagcaggaggccgacgcgcgcgaccatctcgccgcctccggtgcagcccggctcggggagctactgcgcgcagggaaccagccggcagtcagccgcgcccgggaccccggggatgggactgctctgcgccgcccccgcacggagagggactgtcccggggtttcgccagtgccctagctgcgcgctctgggccgctcctccgctgcccttcgccgggagccggccagacgtcgtccagcccgggcagtgcctgcccgcgggtccgccggccccggggaccgagggagggaggaaggaaaggcaggcggagggggcggaggcccggcactcccgccccacccaccccgcgccgctgctggaacgcgaggcggtcccggagcctcttccgttcgctgcacagcctcgccctgcgcccgccaccgccctgcggatcggtcctctcgcccgccacctccagttgacccggatctgtccagggagggtgaaggaagaaaggccttctcctggcaagcgtggctacctaagacttcgatgaagagaggtcctggtctaccagagggtcgttgattgtttcagctgggtggggagcgaggcccccacccagggtcggggtgcgagagaagcagcacagagctggagtcagaactgggtttgagttccagacttgctcctttgctagccctttgagtcctgcctcagccacctgctggctgtgtggtcttggaccagtcactcaccctctctgaacccacttttctcatcagtaaatgggataataagaataccgatattctgtgactgttggggagataataacgcctgtaaattactgaacagggtgcatggcatcacgaagtgtgcacttaataaggggcaggctgcagctgtgtgatctttggcaaaggatttaactacttcgagcgtcagtttcctcatcaataaaatgacagcatacgatatttagtgcccagcgttgcatgaggatgaaaagagaaaatgagtgtaaagtgcctgattttatataccccataaggttggagtgaaacggtttacgtgaaagcctttgctaaactcatattgagcaaaaagtaaactattttcattatctgtctgtgtaactgagagctggttgctgtctcacttctacccaattcactacattgtaaaatgcaaatggaaaatgatactgagctctgggggtcattgtgggattagatgagttaatgtgtgtaaaaataatctagaatccctaaagtgctgaacaaaaataatgctgtgttccaaccctaaggctcagggcctcggtatcacacaacgtttttgtactatttagaaaaatacaccacttgtgtggaggaattggaaaaagcccttttaatagacattttatgtgtgtatatatgtacatatgtatttttaagacagggtcttgctctgtcgcccaagctggagtgcagtagcacaatcacagctcaccgtagccttgactttcaaggctcaagcaatcctcccatctcagcctcctgagtagctgggattgcaggcatgtgtcactgtacccagctaattttttaatgttttatagaagaagggatggaaagattctgcctggagaaagaattggcaaacctaggtctgactccagcttgttccacagtgtccttaccaactgatgatcatcagagctccctgcccaaagcagggctatccggcctgtcaaaatccatctactggtaaaagccaccatatatcatgccatacctgtaactacaaacacacacacacacacacacacacacacacactctctctctctctcttgctttctctctttctaaggttgccagatgaaacagaggatacccaattaatcctgaatttcagattaatgatgaataattttttagtataagtgtcccaaatattgcatagcacccagttactttttaaaatattcattaatctgaaattcaagtttaactggagtcctgtatttttatttgctaaatctagtaatactatctcactctccttcagaagctccctccccaaggtccactgcagggttttgattgaatcagccgctgtgttacagtctgttctttttggggggatatgggttgagtacagggtcttgctgtgttgcccatgctggcctcaaactcctggcctcaaacgatcctcctgagcagctgggactacaggcatgcactgccacgcccacctcgcagaaggaaggaggaccttcctactagttacctgacaaggctggaagctctctaagagcaaggggcaggccagcttcatgtccactacctctggggcaccaacccaggcagggatgcttcttatgaatgt

SEQ ID NO: 1244356 - DNA, 4001 bp, Homo sapiens
ggccccgcagctcccccgccccttgcccgctgccgctccccccttcccccacccccgcccgccgcggcggcggcacacggcggcgcgcgcgcacacaacacactactacctcctgcatgactcatcattgaagcaacaataggcagagagaaaggaaaggagggcgaagcactctccaacacaaccaaccctgccgggggattctggggggcggggagggcacaggagtccccgggtcctgcacacacaccgttccagagccgaggccctggcagcaccctggaaaagggaggtctttcccgccagcccctctgcagcaccctgaagccagggaccaccaacagggcgcgtgaagataggagtcattagtctcttccctttcgagggagcgccgaagtttgccctttctcatcctggctcattccagcgtggccccggctgatgccagggggcatagttggaacgttttgggggtcagtggaaaaatgtgagctctaaatgtctcgtcgccctgcgattctgagggtttcccttgcctcgggatcaaacacaggaggttaggggccagagccgacaggtgagctcggctcctccctcgcagggcaaaggctctccctgggaggtgcccagaggccggggcccgggcccaggcccaacccagcgcaaggccccttgccagccccgcccaggccccgcccccggccgagcgcgaggcggtgaggaggggccgggccgcgccgtccccagcaggagtgtccccggtgcacgtggtcgggggcggagcccgtccacgtcaccacccggtgtaaccaacgggctcggaacgcaggcacacgcaacattccaggcgagagcgggtttggaacgcgcagacacgccacattccacactggctaaagcggggcgcagcgaggggggcccgggggctgacccccagcgacccgcgggccatttcgcaaacgcccaattagcccggctttcacccaaaccccggacgcgcagcccagcccagctctgggaggcggggtcaggcggggctggccaggatcataagacacgcgatgtcatttcattctgcaaaggccgcctccgccccaagcggcgcgtagatctgccgggagcgccccccgcaccctccccacggggccagggaagccgaagagctgctccgcgtagagtagtccccacccccactccgttacacacacgcccactcgtgtgctatacacacgcccgtgtacacgtccgttcatctgctcttcccgaggctcacatcacacatcccccgtgcacacacgcacgcacacgcgagcctgccacccccacgcaacaccattcctcaccccaccccccggctcacacatcctcagtgccaccgagggctccgctggcccacgcaaaagcagcccaccacagaaggggcacaggggtgccacgcagccggggtggcgcccgcaggagccaggtccctcgcagcatgttaatgaattcattaattaatttcactgcccacatcacccctccccaggcggcggctctcgcggggagccgtgcgctgccaggctccgcaggccgcccgggagggggccctgtccgcggtttcgcgtgggttcggggaccggggtcactcgcttccccttccccagtgccccaggggcccagcccggccgctcaccacgtgctctctgttgttgctgcgcttgccattccaggaagcgggccgcctccagtagcgtctctatgctcatcgcgccgagagctgccgggggcgcgccggggccgaggctgcggcccgcgagccgggcacaggtcaggctggcgggcaggcaggagggagggatcacctccggggggcgacagggctgggcggcgcagcgcactccgcagggaagaacgggggagcacggggagaaaaatcaatgtctctcaaaatatttgcaaaatataaaattgcaaatttaaaaaaatgggatgcaaaaaaaaaaaaaaggcggcactgcctcccttcttcccctccctctctacctcccttccgatgcctcccgccccgcggcccccgggagtcccgccgacaagaaagggctttgcaacaagatggcgaggaggcaccgacacacacaacaagggaaggagccgcgctgcccccggccgccgcccccgctactacaccggggccacagccaaagcccggaccggagcccccgcccgcagggccgcggcgtctcgcgaagggaggggcgggtcctgcgctgctggccccgccccccggatccggcgcgcgcacacgtggcccgggcagggagggagaggtccgagcggggtgtgcgcgccgcggttccgctttcctgctggccccgccccggctgcaagccacaagttgggccggggcggtgcgtttgggtcgttcacgacgaaatctgtcctgctggagggagggtagggtgaacaattcaagatttaacagagttccaaccaggatattccgggtcagggaaaccttgggaatggcagagactggcctgaccctgggtctccacgctccacccactcgcgacctaaatcccgcaatcgccgggctgtcgcaattcccccgggatccgcccctgggcggagctgccggcgactggagactgtcaagagaaccagcggagggagcggagcggcagtccggctccgcgttttgtctccgttcctccccccgcagtgcgttcgcatcctattaggggacgtcaccgggccgcgagccaatgggcgggcaggacaacacggcatggagcagctccacatggacaccccgcgccgccagccttcggtttaaagggccagtgtctgcaggtcacattcgcgggtgcggatggggccactgggcgaacccagggtgggatgccgtaaggggaatcccgcagtcgtgccctggcctctccattccttttcaccaccttccatttaaaaccaggcctttatctttccttcccctgaactccagtctttgtccacgcgtattcgatgtgggtggagatacggactgtgccaccccatgggccaccctttcctctggggccggggccagggcggggaacacgaagcgcccgcagcccagaccggggggcgtggcccaaatcgggaacaacaacgtggagggcggaagcccggccctccccgcgcctggcgaccggcggtgggcggggcgcgggggcggggtccgctgcggccggctggaaccgcgctccccagagggagggaccccccgtcgcccgcccgcccgcccgcgtcttccgggctcgagtgtttaggggagctcgggtgcaatcggagagttagctctttgaggccggctgcccttaaatcctctcacttcacacataaggaaactgaggccgtgacggccaaggactcgcctaaggtcgttccgtattccacctgctcctctctcccgaagcgggggcactcttccctgaccccagggacgactctgaagccagttctggaggagggcccccaattagaaaaatgccagggaggaatagcaaccctgaccacttaacacactgtgattggggcaacaaaaatcttcacctgagacccaactccgctgttctgcttcctcggtggaagccacacgaaccccactggtacagcggcagcgatagaccccaggcggctgaaagcttatttggagcgtcccggagcatgtcgattgtgctgtgccagtgcagggggagtacccctcagttctggccccaggctccattctttgctaaccggtccaagaagtgggggggcagtcagtgccagtgggtttagaactcctcagccgcggcttcaacatcacacacaaccagaaagcaaaccttcatgaggctgagaggcaggccgccctgccaatacattccatcacatggcaccctcggagcgttcctattttagggactggttggaagacagctagaaacatagaaagcaggcaaaatgtttgctggctttactcctttcctttgagg

SEQ ID NO: 1244357 - DNA, 4001 bp, Homo sapiens
ccccttacccacaccagggtcttgcattgtcttggggggaggagaggcggagggcagtgagaaagtcctggtccttcctgctccaaaccaccacacttttttttttttttggagacagagtcttgctctgtcacccaggctggagtgcagtggcccaatctcagcccactgcagcctctgcctcttgggttcaagcaattctcttgtctcagcctcccaagtagctagaattacaggcacacaccaccatgcccggttaatttttgtgtttttagtagagacagggtttcaccatgttggccaggctggtctcgaactcctgacctcagatgatccacctgcctcagcctccttaaagtgctgggattataagctcgagctaccgcaccgggccccagactgttactttccaaaacagcttttctccgatgcctaccaccccccacatccaatcttccattccctataaattaacacccaaacttggcttgacctccacggctctccattgcttccccatataaagctgagaaatgcccaagagctctctgatcctttatttcccttctctgggccaatgggtgccccatttcacatgtcttctctctccaaagacaagtcttcataccattttttttttcttattttaattttgagacggagtttcactcttgttgcccaggctggagtgcaatggcacgatcttggctcactgtaacctctgtctcccgggtttaagcgattctcctgcctcagcctcccgagtagctgggattacaggcgcctgccacaacgcccggctaattttttgtatttttagtagaggcggggtttcgccctattggccaggctggtctcgaacgcctgacctcaggtgatccacccgcttcggcctcccaaagtgctgggattacaggcgtgagccaccgtgcccgccccataccactctttcttgaacactctgactgtccctggcccctactcagggactaaaccttaccctttcaaggcttgcttttatgccctggccatccacaacttctctagccttgaagccttcccctcaaggaacttggtctagtgggagtctgactctcacgggtcatgaatgcggctaaaacaaagtgccccacgagctcaagagaggtaccatgaactgacaggggcagactgacgctccccaaacggtctgacggtgacccttgtggagctgtctcgcaatcagaaaaaggaagggaggcaaattattccgaaatcagactatgagcaaacctggaggctggaaagaaagcaatcagggtggcggagcctttgggggtgcaatgaaggcccgattcatcaggggctttgaattaagtttaaccctgctagcgatctaataaaggttggcatgatttgacttaatttttattttgttttataaaagttgactcttcgtttttcattgtcgctacagcacaaactccacaaagaagtaattccacccggtgacttccccactggcactaatatggtgtcctccctctaaggagcccgagacacttccgcccttctcagaagtgacttccgtccagctcggcatggcggcagtcactgccgtcacttagtcgccgatcaaggcttggactaagggcccacggtcactcgagtaggacttggatcggatgctgaataaaactcaccgtgaagcaagtcccactgaacgaaaagttggtcgtagcatttctcaggtaaaagaatcggcacgagcagccgtttaagcggtccgtccgcctcggccgccatattgcaaagctagcttccgccagtctctccagaccgccattgactttcgttgcgcgtgcgcgctgcggacactccgcctcccgttcttttcccgcggcgaagctggcccgccccgtgccccgctctttctgacgctacccaccctcactctagtggcgtaaaataagtctcagtcagggaccacgttttggacgcgctgttggaattgtaaagcttgccgaagctgcacgcctgcgcggttagacctcccacgcctttgttgacgcttccagtttggaagccagatttacacccctgcctttctccgctcctcctgctgggcgccatcttgtcttctcctagcacactttgtattgttcgaagttgagagagaaggagccggagtctccgaggtggcgttgggtgggggcgctactagctcccgttctctcagcgtctctagagggaagggcgccggtgggagcaggagagtctgcaccgggcaggcctccttaggtgccgggttgcgcgcagggccctgtgcttgtctcgcctccggttggctcaggcctcggagcatgagtgcgccggcaactgctgggcccgggacagtgaagcagaggaggaggtgggggaggcgagcccaggtcggggaagggcagcacctgaatcacccttggggcccagacccccaagagtctccggggagccgaggcctggcgaggcagtcccgggattcgccccctccccgctggcccgagggcgcaccacgtgctgggcagagacttcggcgaggccgagtggaccctgcagcgctgcttgggaaagggcaccttggactacctggtgggggcgttgtgcttcgttaccgaccgccgggacgccaacccacggtgcccacccgtgcgtcattccgctgtggatcagccctttggcggcccccctccaaagtctacaaggtcacacggatgtctgcaggcagaggtggggctgctggggccctgccaggtgagggctgcccttgtggggcagtctctgggccttggaggccggaagcctcctggggctcctacggctggggggtgctgctcatcctggctcccagggattgcgccgtagccagctgtaatgggtgggactggcgctcactgctggtgcaggctgtggccatctgggaggtcctttctggaatctggaccttggctgtcctgagagtgacactcctcatctcaagtactgggggcatgaagttaggcttggcaggtggccccgtgtggggggcatgctgttcccaggagcccccagtggaggtcagagtacccactgctccttcttgattcaaccccttgtaggtgggataggagcatgccaggtgctgcgagggtttaatcgggctcttctgctggccttgaatatggtggacaggacaggacattctcattgctcaggagccactggcgctgcctttgggaatgaagttccacagccccccactcattgctttggctgtctgctgcatttgaaactgtacgagggtcaggaagaaggctgcggggatgaatggctctaccggcttgccacggatggggaactggagcagccagtggccccaagaggaggaaggaagggaggcacggcagacccaacaccagctgtgccaggctttggggggtgaacccatgaggcatcgtcacacactgacattttcatccctcctcagcagctgcttccggctccctgagacccagccatggaaggcatagaaaggcatgtgacaagaaactcatggcttttaatcctggcaggacaaggaaaaccccgtcaaagatttgcataaattttgctgctctcctgctggggggggggggggggcagttcgtcacatttaataaaattctctccctcccttctcccgactgcattatctcatatttatttatttgagacagtctggctctgtcgcccaggctggagtgcagtggcgcgatcttggcttagtggcgcgatgacggctcactgcaacctccacctcctgggttcaagcagttctgcctcagcctcccaagtagctgggattacaggccagctgggattacgccgccacacctggctaattgtatttttagtagagacagggtttcaccatgttggccaggctggtctcaaactcctgacctccagtgatccacctgcctcagcctcccaaagtgctgggattacaggcatgagccgtcatg

SEQ ID NO: 1244358 - DNA, 4001 bp, Homo sapiens
gaagggagatggccccttccagaaacaatctcccctctcccaacccaggcagtgggcgggaagcagggccaccttgagcgggaagcagggcggctgctgaacgcagctggtctcgcagttgacgccagtgacgaaggaggcccgggcggccggctcaggggtgaagtcgaggtcgtggtccaacagctggccccattgcatgaacatgagtgagcgctcctggtccggagtcagctgatcagtggggaagcgcacgatctcgttggagaccgcgcgagcctgcgggacacggagatcagctggcgcctgggtccgcgcaccgcgtggccgggcctcgccccctctgcccgccggcgctcaccagagccaccgggaagccgttgcgcttgaccccgggcgtccagccgtagggaagagagaagccgtcctcatactccgccggcagccagcgcacaaaggcacggttggaggcccccagcgtggggctgcgtctgcaggggaggacagggcgctgacaccgggaggcttgtggcgtccgggacgcctctctgagcccggttcctgcagccacccccagccagccgcacctgttgttgcacatcccggtgatggtgcggtatttgtcctgctccgggcaagtcacccccacgtcctggtaggcgcagccgcttgacttggacaacacattcagctgggcgggcgtcagcacatctgccgggggaaagaacaatgggggagctgagccgcctcacttcctatcccaggcaacctgaggctgaggagccctggagactcctgagactccctggaggaagaagttgaggggatcactgagagacggctggggtccctaggaggagtcactagtggagcagggacctggggtgtgatgggcaacagtaccagtgacattgaatggccttcgccacagggaccgcagcttcctctccagcaggtctagagccacgtgcaggtagtcagcggccctcaccgccgtcctggtggctgccaccggctgcttgaagtaggataggagttccatggggctggctgagccgctgcgaagccgctgcttgatgctgcttggagaaaggaggagtgagggccagagaagggatacagacccacccagcagagccccagcccaggggcagacatgcaggaccatgcaggcaggcccacgggtgggaggaaggcttccttttataaaaaggatatggacctgggtgtccagacagaggcaaggctttgggaaggatggcttttaagctgttctcccatccagaaacacagggacagacagacagaaagggagtccacatgggtccccatagtccccctctcccaccttcaagctccctgctgcctgctgcttctctgaaaggcctgggacatccttgcccagagctgggcagtgcctcgtgccccacctttcccgccgctccttgtaggccttgtccaccagctgcttggcctcctccatggagctcagcaccaacgaggtgtccacctcccccaggacagctgcccagagcagggatcacaaagtcaggaatgggccccaaccccctatcaggccccagagctaggaaggcctgctctgagaaaaggggtctctggaacacaaccaccccaacacaccatcttctcccaccttgggaactgttacctggagcagcaccttcagagggctggggcgtggccagaatggccaggagccctgctagggccagaagcagcttcatctctgcagtgagacccccagcccagcaaggtcctaagtccaccatgcatctgagagaagagaagaagggaacccccatctctcttctcctgggctgctcaatccccctttgtacctcagccccacctcagagggccctgtctatggataaagccagacctccttgagggaggggctcactgctctcttatccccttgccagctgctgtcatccagcttccaaggaccccacctccacagctcacctgatattgtcagctcctcttagctcaatctgcgcttttatgtcctctaagctgggggtggggtgaggtagaggaaggtctgatcctggagactgaactctttctcctcccccactggggttggaaggtacacacagaggggcccctgaaatggggggaaggggcaggaaaggaggggccagcattgtccccagccttttttttttttttttttgagacgttatcttgctctgttgcccaggctgatgtgcaatggttcaagcgattcttctgcctcagcctcccgagtagctgggattacaggtgcccgccaccacgccctagcctctagccacatcatcaattatttccttaggcaagaagtaatttttgtatttttccttaggcaagaagctaatttttgtatttttagtagatacagggtttcaccatgttggccaggctggtcttgaactcctgacctcaagtgatccacccgcctcagcctcccaaagtgctgggattacaggcatgagccactggccccagcctgtccccagcctttgaatttagcactaccagcccaagatttctcagctcaccattgtgtgcctataccagtgcttgtccccaggggatacacacaactaacccctctgaaattctggttacactggttatccagggttcctttgaaaggaacaaaagtcaggaactggtagcccaaggaattgcagggaatagagtgcccccagggaagacaggaggatgaaagggagacctggagtaaagatgacccaattggcctcaggtggccatcccccactccaacagtaacctgcatccaacagccacccaatgggcagcctctggttcttggtggggctaaggggacaggaaatctggctggagaccgttgggcttcacaggaaggaggaccctggggactgtgggcgcaggaccaagataacttcctctatccctcctcactcccctttcttcttggcttctggtagagggctgtctccaaactcctcctccccaccaccatctgctcctggatttcaggaaccaggagagagcagaactggttgtggttagtgatcagttaggtgatgcagcccagggcctctctgggacaggatcagtgcagttgggaggacttgggttaatgattcagaataattctgaaacagaagaggatatttcttgcttgagaaagcccagcaaaagggccaccaatctcagcaggaaaagtactacgacttttgactgaatcagtctacctctctgggccctggtcaggctgagctcgtgccaaccatgcctcccatgtcccatttaggttccccctcctaccttcagccaccttcccgccacccactctttttttttttttttttttttgagacagggtctctcactgttggcggagctggagtacagtggtgcaatctcggctcactgcaacctctgcctcctgggttcaagcaattctcctgcctcagcctcccaagtagctgggattacaggcgcccgccaccatgcccggctaatattttgtatttttagtagagatggggtttcaacatgttggccaggctggtctcaaactcctgacctcctcctgatccacccactgttgggattacaggcgtgagccaccgcgcccggcccactcttgtcttctatgcccagaccacctcttggccaagggacaagggacagcaacacccagaatatcttcccagtgtgtccagggattctgtcccctgctgagaaggggaaccaagcttttgccctgccagtgacttgctgtgtgtgaagttggtcgagtggctctttgtgaatcaagctctagaattttagaggcttttggaaatgatttttcaatcctttaagtaatataattttcactgatgaaaagtttgagaacacgagtatgcaaaaataaaaataaatcaaaattactcatcatcaagtgagattgtgggtacttttttctttcaaggtttatcattgtcttcacataa

SEQ ID NO: 1244359 - DNA, 4001 bp, Homo sapiens
gaccacgacgccctgctggagtcccactgggaagggttagggaggcaggactggtaccagtacccgctggtgcccctcggctcccaaggatcccttaaaggggcgatggtaaaagtgcctaatgagaccggcttgattactccgcccacccatcttggcttagaccggcgttctagttccaggcgtgcctcacttttcctcgttatcctgcttccatattgagaaaaagaataggaggacttcagagagactcccaggaagcaggataccagccccagaaggcctcgggatcaggggcagctttttaaggactcagagggtggatatccggattccagactttccagaaattttgcaaaaaagaggaaatgtcttcctgaaaggattcgagagcctcttttaggtctaggtgagggaggcctggtccattttcctgcctatggaataaagaagtaactggctagccttcctcagagtcccagcccaaaaagtaaataaagggttaaacccactggcccgccttcgcccagcctccggctccaccccacatctgctagtaaaagatgctgggcctccaaatacgggaggctctgtgcagtgcgactagcatttggggccagctacgctacttctccgacctcggcgttcagccaccccgtccagttgccctgaacaaaatgtgagagtcatcccttttccttgctaactggattcctaagatcataaatggactgcatctttggccgggcgcggtggctcactcccataatcccaacactttgggagtcggaggcgggagcatcggttgagcctaggagttcgagactagcccaagcaacatagtgaaaccccatcgctacaaaaaataaaataaacaaaattagctgggcgtggtagcgcgcgcctgtagtcccagctacttgggaagctgaggctgcagtgagccgagattgcaacaccgcactccagcctgggcaacagagtgagaccctgtctcaaaagaaacaaaaagaaaagaaatggattacattctggaaacttgcttggaaatctcagaaatgggaatctatcccgaaagcaggggactggtccctgggttccaagactcagctctcccctgagttccaagggtataagtttggatataggaaaaagccacagaggcggccgaactgctgaaaaccacattgtttaggtgacccaggcttttactgagagaagaaagccatcgaacccagatagctttgacaggaattgcaggctttggtctctaaacaaagagggttcttggagcgcattgcttgcagctctttcctctatctgcaagctagaaaatccttcttcttcttcttcttttttatttttattttttgagacggagtttcgctcttgttgcccaggctggggtgcaatggcatgatctcggctcgtcgcaacctctgcctcccgggttcaagcaattctcctgcctcagcttcccgagtagctgggattacaggtatgcgccaccatgcctggctaattttgtatttttagtagagacagggtttctccatgttggtcaggctggtctcgaactcctgacctcaggtgatctgcccacctcagcctcccaaagtgctgggattgcaggcatgagccactgcacccggcctagaaaatccttataattgaattcaggaagagttcccctttccattataaaggctaccctccactgtcacctgtccacctctgggctggaaatcactcagctatttgtattttggaagaggaaggatcttgaatctctacaagatattaattacttcttaatcaagcaattattacctccatagcgacccacatcaaatcttccattccatttaggatcctcaggacagtctgggatctcagattctggcccacctggggaggtggagcccaactcattattcttagcggctgccccactgcattcgtcggtcaacaagtatctctctaataaaggccttgcagaatgccagcctctcacatctgttcaggaccttacaattgacaaattgtttcattctcacaacagccttgtgcagttacagaatgagaagaaacatttattgatgcagaataggatgctcctcttctgtgccaggcaaggtaccacttactgtgatactgagataagggccctaacctcctagagttcacagtctggggttgaagtcggaaaggagtgtgttacatagatacaaaaagcgcttcttggtagcacagctgaatgccataataaaggtgcagtgtgtcctaagctgttccccaaaggaatagagctgctaatggttggcaatggagtagctgggaagggaagcaggtttgaaggtcggcaatgcatcccctagtagttaagggctgccccctacctcaagaggggaatgagtcctccttctctgaggtttgtaattagctctgccttcctccctgcctcagcctcagaggtcataaaggtgcaggtagtatatctccttcccccaaaatcaaggtattcctatggtggtgttcagcccagagttttgggagtcaaggcacagagaaaaataaaactcaaaagtgttacaaatttccagcaggtaaggctttgcactgagtgatggtgcacttcctataatgaccagcaggggccaccaacagctattcccagtttatctacacccagcctctgaggtgcttcgcctccacacctgcgactggccagtgcctagttctggaaaccttatttatggactatacttaaaaaaaaaaaaaaaaaaaaaaaaaaaaacttgggcgaggtgccatggctcacacctgtaatcccaacactttggaaggccgaggtgggcagatcatgtgaggtcgggagttcaagaccagcctggccaatatgatgaaaccctgtctctactaaaaatacaaaaattagctgggagtggttccgggcgcctgtaatcccagctacttgggaggctgaggcaggagaatcgcttgaagccgggaggcagaggttgcagtgagccatgattgcgccactgcactccagcctgggcgacagagtgagactccgtatttaaaaaaaaaaaaattagagccttcaatggactatataaaattatataaatatttgcctataaactatatttgtgttattcaactaattagtatgcatattagaaatcacacacatagggatgaatttttattttcattttatttataaataaataaacatattttgagacagggtcttactctgttgcccaggctggaatgcagtagcatgatcatagctcactgcaggctggacctcccaggctcaagccatcctcctgcctcagcctccagagtagctgggaccacagctgcatgccaccacacctggagaattttttttttaattttttgtagagatagagtcttgccatgttgcccaggctggccttaaactcctgggctcaagtgatccacttgcctcagcctcctaacgtgctgagattacaggtgtgagtcactgcaccaggccaggattaattttttaactataaatagaaattccaattttgtcttcccatacccaaaaggatcatcttgcacacccctaggtgcacacccactttggaaaccactgttctaaaggaaaagctatgccgtcctccctagtccccgcctcaacagggcatccagacaggaatggatccagacagctttgccttcccaccaggactaaaccaaggcctccgtgaaggaccaagtttcctggcctcttgctcatcccacaacctcaagacagaaattgaagcctcctccgccactaccactaccattaccaccagcctggcctgcgttcatgtcagattgcctttctagagggcagagccccaaaacctctcttgtaagcagcatctgttcctccacctggcccaacaattgcactttcccttgcctcctgattttagtctgcccacctccctattggggtgggaagttct

SEQ ID NO: 1244360 - DNA, 4001 bp, Homo sapiens
acccctattcaggctacacccaggctggaagaaatgcccaggatccactgtgctggcccgtgcccctggtgccaatctctactcctagagagcagggaggagggatcccttccctccccctcccaggccttgatgacctggagccttctcctggctggcgctgctctccctcacagggtcagagaagggactccagaagtcctccttccctagagcgtggagggcgggaaaaggcagggaggatcctgtatgaaatccctgcgctcggaagtcttgcccagcctgcctgggttttctcccggggaatcggttcccagagcatcggctggctttgctcccccacgcccgtccaagcctctgagagggcggggcctggctgtgtccacaggagaacggcagtgccaggcaagctagcctggctccgtgccaaggtcctgcacccagacatctgggaacctgcacctcggcttccaaaagcctgggcccagatgccctctcagctctgcctccgagatatccacatcacccatagtgtccgcaggcgagcggaccagcagtgaaagggagaggtttcttccaacctcccacccatccctccatccatacacatacaaagaggtgcggagaagaaaggtctgacaaaggcgctttggagagcgagaggtcgcggggaggtctggacagaactgagggccagaggatggggtcgaaaggccaggcggacgtgcatgcttggaccatcagatcacccctgccccaacggacccagccctaacaccctgggcgctaggacctgggggaggggggcgtgttgtgagccatcaaagaaggctctctacgtgcgcgcccgccggagaccagggatgaggtcactaaatgactgccccggccaacccccaccccgtctttatccgcaccgccccccccttaattgacctaactttctaaccctagctcttcgcttctggcaccggtcccctcccaagtctccagaccctaaccctggctcccgacccgccccgctacagcttgggaagcgggagaagcagcgcgcgcccttctgcggaccccctcccagggaagattgtggtgttagctgcctagggggaccagggggccaccgggacccagcgcaacctctgtctcgctccccaacccccggaagcgctaacagcacggttcttacgtaatgccgggcttctaagtacccccaacccgcacagcccccggggaggccgcgcagataccggggcccctcacagctcaccaccttggtgcctgaagccactttggagcccctaccgcaggggcggggaccagtgtcaatgggcagcggggcttggttctcccaaccagcaccccagaaagagggcccaggggcgggggcgggtggacagggagggaacgggcctgggtgaaaggggcctgtggagtttaaacccagtgaatagggtcctaagtgccgtgtcaggacgaaaagaaggcggaggtcttgggataggagctggcccgggggccgggggacgcctacctgcgccccgggaagcccctagctccgggcggctccagcgcagccgggcgctcagcgtttattgcttgtcaatcgctagcccggctcttaaagcggcaaggcctctccgcgagggggcggaggtccggaggagaggggaggtgaggagaacgcggaggccggcacaactcggaggaagtagtctttcccagcagctggtacgggggcagccaggtagtggtttgggagacaccgcacagaccacgacgccctgctggagtcccactgggaagggttagggaggcaggactggtaccagtacccgctggtgcccctcggctcccaaggatcccttaaaggggcgatggtaaaagtgcctaatgagaccggcttgattactccgcccacccatcttggcttagaccggcgttctagttccaggcgtgcctcacttttcctcgttatcctgcttccatattgagaaaaagaataggaggacttcagagagactcccaggaagcaggataccagccccagaaggcctcgggatcaggggcagctttttaaggactcagagggtggatatccggattccagactttccagaaattttgcaaaaaagaggaaatgtcttcctgaaaggattcgagagcctcttttaggtctaggtgagggaggcctggtccattttcctgcctatggaataaagaagtaactggctagccttcctcagagtcccagcccaaaaagtaaataaagggttaaacccactggcccgccttcgcccagcctccggctccaccccacatctgctagtaaaagatgctgggcctccaaatacgggaggctctgtgcagtgcgactagcatttggggccagctacgctacttctccgacctcggcgttcagccaccccgtccagttgccctgaacaaaatgtgagagtcatcccttttccttgctaactggattcctaagatcataaatggactgcatctttggccgggcgcggtggctcactcccataatcccaacactttgggagtcggaggcgggagcatcggttgagcctaggagttcgagactagcccaagcaacatagtgaaaccccatcgctacaaaaaataaaataaacaaaattagctgggcgtggtagcgcgcgcctgtagtcccagctacttgggaagctgaggctgcagtgagccgagattgcaacaccgcactccagcctgggcaacagagtgagaccctgtctcaaaagaaacaaaaagaaaagaaatggattacattctggaaacttgcttggaaatctcagaaatgggaatctatcccgaaagcaggggactggtccctgggttccaagactcagctctcccctgagttccaagggtataagtttggatataggaaaaagccacagaggcggccgaactgctgaaaaccacattgtttaggtgacccaggcttttactgagagaagaaagccatcgaacccagatagctttgacaggaattgcaggctttggtctctaaacaaagagggttcttggagcgcattgcttgcagctctttcctctatctgcaagctagaaaatccttcttcttcttcttcttttttatttttattttttgagacggagtttcgctcttgttgcccaggctggggtgcaatggcatgatctcggctcgtcgcaacctctgcctcccgggttcaagcaattctcctgcctcagcttcccgagtagctgggattacaggtatgcgccaccatgcctggctaattttgtatttttagtagagacagggtttctccatgttggtcaggctggtctcgaactcctgacctcaggtgatctgcccacctcagcctcccaaagtgctgggattgcaggcatgagccactgcacccggcctagaaaatccttataattgaattcaggaagagttcccctttccattataaaggctaccctccactgtcacctgtccacctctgggctggaaatcactcagctatttgtattttggaagaggaaggatcttgaatctctacaagatattaattacttcttaatcaagcaattattacctccatagcgacccacatcaaatcttccattccatttaggatcctcaggacagtctgggatctcagattctggcccacctggggaggtggagcccaactcattattcttagcggctgccccactgcattcgtcggtcaacaagtatctctctaataaaggccttgcagaatgccagcctctcacatctgttcaggaccttacaattgacaaattgtttcattctcacaacagccttgtgcagttacagaatgagaagaaacatttattgatgcagaataggatgctcctcttctgtgccaggcaaggtaccacttactgtgatactgagataagggccctaacctcctagagttcacagtctggggttgaagtcggaaaggagtgtgttacatagatacaaa

SEQ ID NO: 1244361 - DNA, 4001 bp, Homo sapiens
tgacaatgatctataatcactgagaaattaacatggatgataggaagtcaaagctgaggcctggaacgctggcaggagctagggaaacaggcactggaggccttggtgtgacccaaaggctgaggtcacaccaagtcatcacagggataagcaaactctcagcccgaaatgggacataatggaggacacgataacacctgcagctgggccgcaacaatgcccccgagacctgaggtgagggctgccttcactcactgacagaggtgggagttccaggctgtggcaagttccggggaaaggaagcgagaagcagaatgtgcccagctgggggcagagatgggcgaagggtatcattactctgccaccatgccgcccatgcctacatctgcataacagtacccaagccacggaggacggcggaggatgcacccctggcgcctctcaatgctcttgtcagtgcccccctcctccaggaaggaacaggagtggggaggagggggcactggaactggagctggcagagatggttcagggactcctggactcccatctccttcctcctcctgctccctgccttctccagaaaaaaaagtgcaagcttgcccttcagacccctcttgcccaggccggggcttggcattggtcagagacctgcgaggccctcagtgggctctgaaagaggccagggcagggacccttcccttcctgccagggtatgccagattccctccgttatctaggggaggactgagccaagggagttggtgccctctgcccaggacagctctcctgaaggtgccctcagatgacctctcccaggccaccctccccagatgccccgactctgctggaggaaggtaggctaaggggccagctgccccgcccccatctggcccgcccttccctaccttccctctggagctccgcttcctcagaagactccagggatataccctccaaggagaccccgctgcctgggctgcctgccatggcggcccccagacccggggactcccggagcgtcctacacgccgccgtctaccgcctccccagccaaagcctggccgggctggggaaggcgggagtcgaggagcgccctctgaggaaccagccaatgggaaggctcagccgccgtgaccgccttgctgattggctaaagccctgactggcgctgcgcggtgcagagcaggcggtaacccgggtgggagaagagtggtgggagggagccctagtcccacagattgcccgatccccagcatgtcagtgtcggtggggatggggaggaggcggctaacaggaagttttgaggagggggtaggcatgctgccccttcaagactggcgcggtactccgagaccctcccctcacagccagcttcaggagacccgagggagaaaagtcttggcccatcttgtccctgtaccctcttttctagaagcccctcctctaatacaccccatgccacctcctccctatgccctctgacctctgctctcagtcccctctccaggccctgtttcctttacaatagtccctcagtctaaggaagtccccaagaacgactcagccctccaccgggaggcagcctcacttgggcatggggcaaatacctcaagcctcagacgcctccccctacccacccttggtcagccactgggaggcagggtacgtgggggaggtggcatcgctgtgggtagggatggtgccccagccctgcttacccctcgcctcacagcagcttcttcccctcccccatctcccatgagttcttcctcttaatgaaggggatgatgcccaggaagcaagtcaggcatcttggaactcagttccccagaaaggaaaaatgagggcacatttgcacacagggaaaagtgtgggcagaagggaaggactcagctccgctccggtgaccccattcctctgagatcttgtgcccaagaggccaccatcagggtactgcagcctccactcagacattccctgaggagtggcaccaggtcgcattgcacccctggttgccatgacagtagaattacacaccaggacagtaacccagggatggaggagagatttaaagggacagctccacctgaaagcagccacatatcccagccttgatccaaaaaagggagggaatctggtgacaggggaagagggagcaaggctgcaggtcaggagatgccaggttcaggatctctaagttctcagcccagtgccactgtccatttatctcccaagtctcaggaaaagggcccctgactctacccaaagtagatatggggtctccctgcaagaggaatacacccataccctttccctcccttcaaccatactgacccatggggaagggcggaaaaaggatcttattagctttgccctttgcagagtccaaggcagggatctcccaggggaggaggagggaaggggagcctgaactcagaggcagggacacagctgtctctctatcctgtgggaagtataatgaccaccagataataaggggcagaatccaccattagatttttgaagctgggagctaatgtagctcaggataggacagaggctgcctgaaggaagaaaaacactttgtacttcttcctttgaatatgagaagccaggagcagcccctcgaacaacatgaaggggagcaggagccccaggagtcctttgaggaagcagaacccaccgccacaccccaaggctccactccctgtcccccatcctcccccaccacgcccccatcaagtggtctgcaacaacgaagccaaattgctgggcttgctcctcctcctacgccccagtcaggcactattggtgggtttactgggcagtcccggctggagaggccattaagcacaggctcaggggtgggtttaattaatgcctaagcagcttacagtggggcctaggcaggctgaaagaggcagggagaccccagggagcccagcaggctggacaggagatgggggactgagccctctgatgctgcagaagctggggacattggtgccatccctccactgcaaggagaagaggcctttcctggacaagtgtaccacagtttaggccctggctcactcccttcactttctcggagaggaggcacagaggaatcattctacccaaagtggcagccctggaacctctggcagaggcagtagtggggcctagagcaagggaaggagctgcatgggagggaggcatccaggcagggggaagttcagacaactcagagcagaaccatagcagttcccagctgcccgggcctcagagggcctctagcacagggaacttaaccttctggggtcctgcgtgcactacgggaatccatgatcccctagagtagaatataccttttgtgcatggatgtatatgtctacgatgagggctcactgctgtcaccagattctaagtgactcaggaccaataaaattaagaacaggccaggtgtggtggctcatgcctgtaatcccagcactttgggaggccaaggcaggtggatcacctgaggtcaggacagcctggccaacatggtgaaacccagtctctacaaaaatacaaaaattagctgggcatgatagcaggtgcctgtaatcccagctacttgggaggctgaggcaggagaatcacttgaacctgggaggtgaaggttgcagtgagccgagatcccaccactgccctccagcctgggcaacagagggagactccatctcaaaaaaaaaaaaaaagaaaaagaaaaaagttaagaacactgatcttgtcccatcatctcatcttagggaaatctcaggtcttcaaaaggaggtgactgtttcaaggacacagggttaatgccaaaataacaactcaggccaggcacagtggttcacacctgtaatcccagtagtttgggaggtcgaggcgggtggagtacttgagctcaggagtttgagaccagcatgggcaacatttttgtctttacgaaaaatacaaaaattagctgggcatggtggtgcacacct

SEQ ID NO: 1244362 - DNA, 4001 bp, Homo sapiens
gctccaggcagctggaagagactctgaggtggagagaagggagaaagggaagcaggtgtcaggttgcagatcctgccctgcaccagaaaaccacaagctgttgggtggatcacttgaggccaggagttcaagaccagcctgggcaacaaggcaaaaccccatctctactaaaaataccaaaattagccaggcatagtggtgtaggtctgtaattctagctactcaggaggctgaggcaggagaactgcttgaacctgtgaggcagagattgcagtgagctgagatcacgccactgcactccagcctgggtggcagagcaagactgtctctggccgggcgcggtggctcacgcctgtaatcccagcactttgggaggccgaagcgggtggattgcctgaggtcaagagttcaagaccagcctggccaacacagggaaaccctgtctctactaaaaatacaaaaaattagctgggcgtagtggcaggcgcctgtaatcccagctactcgggaggctgaggcaggaaaatcgcttgaacccaggaggcggaggttgcagtaagctgagatcctgccattgccctccatcctgggcgacagagcaagactccgtctcaaaaaaaaaaaaaagaaaaagaaaagaaaaccacaagctcctcactcaacctctagatgggctgaagcccagggctcagccacctgtacctggcaggctcaaggatgagacagacagtactcggagcaagtccgtgagtacaggcccagagtcaagcaggcagccacacaggagccagggcctgcagcctccagtctaagcaccactaattcagtgtgacattgtacaagtcactgtccctcactggcctcagtctttcctgcctgtaaaatggatggattgggctagatgatgtttacaggccttcagctctgagtgacaatgatctataatcactgagaaattaacatggatgataggaagtcaaagctgaggcctggaacgctggcaggagctagggaaacaggcactggaggccttggtgtgacccaaaggctgaggtcacaccaagtcatcacagggataagcaaactctcagcccgaaatgggacataatggaggacacgataacacctgcagctgggccgcaacaatgcccccgagacctgaggtgagggctgccttcactcactgacagaggtgggagttccaggctgtggcaagttccggggaaaggaagcgagaagcagaatgtgcccagctgggggcagagatgggcgaagggtatcattactctgccaccatgccgcccatgcctacatctgcataacagtacccaagccacggaggacggcggaggatgcacccctggcgcctctcaatgctcttgtcagtgcccccctcctccaggaaggaacaggagtggggaggagggggcactggaactggagctggcagagatggttcagggactcctggactcccatctccttcctcctcctgctccctgccttctccagaaaaaaaagtgcaagcttgcccttcagacccctcttgcccaggccggggcttggcattggtcagagacctgcgaggccctcagtgggctctgaaagaggccagggcagggacccttcccttcctgccagggtatgccagattccctccgttatctaggggaggactgagccaagggagttggtgccctctgcccaggacagctctcctgaaggtgccctcagatgacctctcccaggccaccctccccagatgccccgactctgctggaggaaggtaggctaaggggccagctgccccgcccccatctggcccgcccttccctaccttccctctggagctccgcttcctcagaagactccagggatataccctccaaggagaccccgctgcctgggctgcctgccatggcggcccccagacccggggactcccggagcgtcctacacgccgccgtctaccgcctccccagccaaagcctggccgggctggggaaggcgggagtcgaggagcgccctctgaggaaccagccaatgggaaggctcagccgccgtgaccgccttgctgattggctaaagccctgactggcgctgcgcggtgcagagcaggcggtaacccgggtgggagaagagtggtgggagggagccctagtcccacagattgcccgatccccagcatgtcagtgtcggtggggatggggaggaggcggctaacaggaagttttgaggagggggtaggcatgctgccccttcaagactggcgcggtactccgagaccctcccctcacagccagcttcaggagacccgagggagaaaagtcttggcccatcttgtccctgtaccctcttttctagaagcccctcctctaatacaccccatgccacctcctccctatgccctctgacctctgctctcagtcccctctccaggccctgtttcctttacaatagtccctcagtctaaggaagtccccaagaacgactcagccctccaccgggaggcagcctcacttgggcatggggcaaatacctcaagcctcagacgcctccccctacccacccttggtcagccactgggaggcagggtacgtgggggaggtggcatcgctgtgggtagggatggtgccccagccctgcttacccctcgcctcacagcagcttcttcccctcccccatctcccatgagttcttcctcttaatgaaggggatgatgcccaggaagcaagtcaggcatcttggaactcagttccccagaaaggaaaaatgagggcacatttgcacacagggaaaagtgtgggcagaagggaaggactcagctccgctccggtgaccccattcctctgagatcttgtgcccaagaggccaccatcagggtactgcagcctccactcagacattccctgaggagtggcaccaggtcgcattgcacccctggttgccatgacagtagaattacacaccaggacagtaacccagggatggaggagagatttaaagggacagctccacctgaaagcagccacatatcccagccttgatccaaaaaagggagggaatctggtgacaggggaagagggagcaaggctgcaggtcaggagatgccaggttcaggatctctaagttctcagcccagtgccactgtccatttatctcccaagtctcaggaaaagggcccctgactctacccaaagtagatatggggtctccctgcaagaggaatacacccataccctttccctcccttcaaccatactgacccatggggaagggcggaaaaaggatcttattagctttgccctttgcagagtccaaggcagggatctcccaggggaggaggagggaaggggagcctgaactcagaggcagggacacagctgtctctctatcctgtgggaagtataatgaccaccagataataaggggcagaatccaccattagatttttgaagctgggagctaatgtagctcaggataggacagaggctgcctgaaggaagaaaaacactttgtacttcttcctttgaatatgagaagccaggagcagcccctcgaacaacatgaaggggagcaggagccccaggagtcctttgaggaagcagaacccaccgccacaccccaaggctccactccctgtcccccatcctcccccaccacgcccccatcaagtggtctgcaacaacgaagccaaattgctgggcttgctcctcctcctacgccccagtcaggcactattggtgggtttactgggcagtcccggctggagaggccattaagcacaggctcaggggtgggtttaattaatgcctaagcagcttacagtggggcctaggcaggctgaaagaggcagggagaccccagggagcccagcaggctggacaggagatgggggactgagccctctgatgctgcagaagctggggacattggtgccatccctccactgcaaggagaagaggcctttcctggacaagtgtaccacagtttaggccctg

SEQ ID NO: 1244363 - DNA, 4001 bp, Homo sapiens
agatgaaggagccctacagggtggggagtggggcagacactgtaaggagaaacctggggcttacgtcctcagcgagggccacagcgctgtgcagaactggggttggactttgcctttcataatagcgaagcttctcatgaatctgcaaagacagagtatttcagatgcaccctggacaccacacatcccacccacggctgtggggacatttggggcagcagactgggccactgacagggcaccataagagaaagtcctgtgtagtgggcaagtgaaggccttcctggggcagggagatgactaggatgacctcagacggccacagacagctagaaagacctctagacacccttccacgcaggatgacgtgggacttcaccttcattaagtaactgaggcttttttcactgaaaacatccctcaggaagcccatctcctccttgtggttggagtcaggtctgagctgggaggtcagcagggccagggtttcatgcaaacctggggagaggtgagaaaaacaaaggatagcaaacgcagtgggtgctccctgcccccgaggagcccgagtggggcctcaaacagcacttcagtcctgccgtgaggacattctctccccaggctctcactgccagggcctggaggctgccaggcaggctcttgtcttcaggactgtggcaggtccagccggggggaggtacttaccagagtcctccgatagcactggcatgctggcgttgtcacctcccgacctctccctgcagattctgggagaagggggtggaggtgggtattgaagctccatcaagcatatttattgaacaaactgactacacatctactgtgttctctgagaccaggctgtggacagagaggatgggaacaaataactctgcttacttttttcagagaggaaggaaataaagctaagatgtgctgagtgtcctcgatgtgccaagcattgtgtggggtgatttctatgataaactttttgtctgcacaaagtcctgagaaatgactgcgaatgttcccattttattgatgaagaaacagcggcgtggaagctttcagtaagctgtgggtcaaaatccatattcaagcaggctcttccaggctggccttggaggtgccaagtgaccctgcctgacagtgtcagctgtcctccgcagcgcgccccctccactgcaaccttctaagagccctggctcaagtctcctgctgggacacaccttccacaactacctggctgggcctacaagccccctgtccccgaccccccaagacccaacccaaagggagcctccagactggagtgcagagaggagggggggaaatgggagtcgggcttccactatgcaggaggggggacccctatctcatgaggccctccaaaggtgctctgcagcacgtggacctcaaaaagtcctccttaggaagaggagaaggagagtcatgactgattcattccgcaaacatggagccagcccgcagcgccgagccccggtgccactaagaggcgtaagagcggccccgggccctccagcctccgccccgccccgccccgccacgccacgccggactcaccctcgggctgctccccgcaggaggccgagcaccgactcccgctcgctctccgaaggaacctgtgggagaacaaggagcgcactgggcgcaggagcagcgaccccgggggacctcggagggcggtcccggaggacgcggagcagcagggagcggggggcgcgcggcggggcgggcgcgggaagagggaggcgggggccgaggggcggggttgagactcccgcggtgggctcggtgggccgcgaggctgtccgggagcacgggaggagggtctcggcccggcctcccgcccctcccgccgcggcgcccagctccctcgtccgttcccctcgcggcctcctacctcgtcgcgccgggatgtgtgctccgcgaacgggagccgcgcgagtgcccagagcctgggccgccgctggctccgccttcccggacccctccctgcggctgccgcgccgggcgggggtggcggagcctgaggaggcgcggcgcggggaggaggcgcggcgcggggaggaggcgggggaggagcggaggccgccctccgcgtctggcaccgccgcaccctccgggccgggctccgctagccggcgtcgtacccgctcccgctctcccgctccctgagtcccctgcctgtgtccccccgcaccctggcacacagccagacttcccttccgcccgcgcaacccaccctccgcgagtggaggggtggacacctgctcaacagagaattcgattttgcaaacatttattgagcgccctccaggtgccaggcgctgtgccaggggccggggcttcaaagacgaccaaggcacagatcctgggtttgaagatctccagaggtggggcggggggccggtcggatgcgagggcaactcgctgtaacaatgcaacgcgctgggaaagatttatcggtgcacgctgccctggggacgcggagcaggggaggagaagtcaggctggagaggagggggactccattctgcccggctgcaggggagtgaggctacatagcagaggcgagcagcatccaggggctttactggaaaaagagctctgaaatggccatgacgataactgacttatattgtgctgtctccatgcccaggtactcctcagatcacttcccttcacagtagttcctgatatcaagaccattcttattttggttctgcaattgaggaaactgaggttcctggtgaaagaatgtgtataggggagagcataggaactgctgggtgagtgagcaggtggttgtgggtattaaaaggtgaggagtgggtgagtgagtgggcccccttccctcaatcccagcagcaaagaacggcacagcacatgtcaggagaggtggacccagaggttaagtctggaagtaaatctagccctgcacagtaaccagggaaaatgggttggcaggccccacaggctgtagtgcatggggaggctgtgagaggcagcaaatgtcatgatgatgtttcccctcattcctcaaaaattatcctcattcctcaagaaatatctacactattgctcctcaaaatgtaacgtgcctgagactcactagggggttgtgtaatgctggagtggtgccagattctgaatttctgacaagctcccaggtgatgtgacgccactggtctgcagaccacactttttgagtggagagagactgcatgagacacattcttagctgcaatgtttactgttggaaaaataatgagaaccatctgatccatctgatatgggtcaaatgattttggacaagaacaccaggaagtggtgttggaacaagtagatatttatgtgcctgaagggacccaatccctacctcacaccatattcaaaacgcaatttaagagagatcattggcctaaacataaagcaaatcgataaagctactagaataaaacaggagggtatcttttaaatcttggggtatgcaaagatttcctagaaaggatacaaaaaagccaggcatggtggcatgagcctgtatcccacatactcaggaggctgaggcaggcaaattgcttgagcccaagagttcaaggctgcagtgaactatgatcagtccactgcgcttcagcttgggtgacaaagagacaccgtttctaaaaaaagaaaaaatttttaaaaaaagcatggaccctgaaaacaattgataaatggacctcatcaaaatttaaaactcctgctcatcaaaaaacactattggccaggtgcagtggctcatgcctgtaatcccagcactttgggaagccaaggtgggtggatcatctgaggtcaggatattgagaccatcctggctaacacagtgaaaccccatctctactaaaaatacaaaaaattagccaggcatggtggcacacacctgtgtccgttccagctactcaggaggctgaggcaggagaattgcttgaacccgggag

SEQ ID NO: 1244364 - DNA, 4001 bp, Homo sapiens
atcaacagattaaaaaaaatcttagcagattggactcaaacatgcagattccatcctagtttatctaagcttaagaattcgaaaacagcccctatgaggtgtaaatttaccaattttgacagttgcttagaataaccaggaaacttacaaacctctctcagaacaacccttgcccagaaacttcttaaagtggcaggtttttttggtttgttaaattgtaagagaaaaaagtttcataaaatatcatttcttgcttttcacaaatgctcagtgaaggaggtaagccagggaccaggattcccaatttacagataaggaaattaaaagatacagaagtaaagggatttgttcaaggtcacacagctggaagtgacagccaagacctgaagcaaagtctcctaacaactcctcatcgcataaactgtttcatccaaaaaagcatccagatgagaagaaggaatcaagttctcctttacactccaaaacaccctccgaggtaaatgagttctatccgtcccaagctgaccgtccttaaaacccttggtatcttaaccatctatgactttgcagccttgagtgtttcgttaagcttttggggtttagatgaaaggaatcttttcctggcagttggaaacctgacctcagagaaaggccccgtgccccaggccgtaacccctgccccaccaccctactccagtcggccatgtaaacaagtcaaaccctgggtgcactgaagtggcattaaaaacaaccaggcccgttcactcgttttcagtctaaggggttcttctgcgacaggagtggctacaactaggtcacactggactggaatgtgaagggacttcccctggcttcattcaggaggctgagagaaagctctgaagaggatggagatgatggccgtggggagggtaccgaggcacatcccaaggaggtgcacacaaggctcggaatcctggaacactaggagttcaaacagcaatcactgcaggggttcccaagggccatgggggctgcagccaagcctcttggagcctttcatcaatacaaattccccatctccccagtcactccagggcgggggccccagaactctgtgtttaatggctatgactctaatgcacgtttgggagtcataactagttcaaagccctgtttgacagttaaggctgggagacagaaatcaactttcccgaggacccacaggtctcctcacccctcggccagtgaccagggaactggtcccagctccccgctaaactacggcctgccaaactaagttcaagaacaagaccctcctcgccagatttggacaccccttcacctctctccagtgcttgacagtgacgatgattcagaatcggggcaggctgcgtcccactagacggaagcccacagtcctccccaacaatccgacccctgggccactctggctggacaaatccaagtccagtcccaagccagaatctcaggggggtcccgtcaagcggcatgcaatccctaagcgctttgttcctactaagcgaaaccaggcacttttgagtcacccaaaaagcatgaatcacacagccgggcaatgggaacgggaaaggatgttatttttcggcatactcgaggattttccctttgtcccagctctgtcaatgcacttcccgtccccgtccccatgccccaggactcgcgcatttccctgctccatttttattttccctgcagcccttggcggcgccccggccgccgacccgcggctcccagaacggaggtgtccgggccggccccagtcgctcacctgcgtcaggtcctcgtcgttgagcagatgcgactcgcggggcttgaagcagttctgacacttgctcttgttgaagatgttggcctggaatttcctgcacgggttctccttggctgccgacatggtcggcgcggcggcgacggcggcggcggcggcggcgcaggcctggccggcctggcgctcccggcgggctaggggctcagcgcggccgcgccgcatccctcgccggccccgccgcaggcccggcccggcctccttcccggcgggcggttcgctgcacgcgccgaggctcctgagccgcccgggcctcacagcgcgcgcgacgcccagctcccgcccgcaccgccgccgcccggccgccgcgggcccatggacgcggcctcgggcccgctgcttcccgctgcggcccgcctctcaggctccggtcgccgccgtcccggctcgtccgcgccgccgcagctgccctcggcgccccgcggccgctgcaaatgggaccggagcgcctcacgcactacgggggcgggcgggcgggcgggcgggcgggcggccgggcgcggggaggtgccggggcgtacggggcggggccgcgcccgacgcgatcggcagccccaccggccaatggggttggcgcgctctcgctaacaaaggaacctctgggccaatggcagtcgggggcgggaccgagggccgccgagcgcaaggtaagttgtgcaggccgggaaggtgggggcgccggcatgggacgttcaggtttggtggactggcgccgaggccggccgggctgacagctgcagggcccgggcgggggatgcgggggaaggcggagccgacctcaggctgcctctctgcaaccccctcgctcccaggctcgccttcccgcgcccacgctgtacacccaacggaggcatcttccccaagcccagctcggagaggattagtttagcacctactgtgtaccaggccccctcgtaggagtcagttagcgtcgggaagggctggatactccaagggctcgctcattaaaggttcgcaacctctcctttctcatccccattttacataggaggagactgaggagcagagaagtaacagcgggtagtatttcaagggatgactaagagaagatgtcagcggacttgaagagctgtcagctccattaggggagatgagcgaaggctgactctctgccaggtgctgagctaggcattctttcccccatgatgtgcttgaggaaatgaagggtcagacacctggagtaatttgtgtaggatcactctgctaggaaggggccgagctgtcactcccgtcctccattgtccagcctcctggccaaaagacaacctggaaaaggctgtcaaaggctcaggcagaaggttgcaggagcccagagaggggagaaatgcgctctttagaaaaattcgggtggcttcaaggaggaggggaagtttaagtggacagtgagagggttgagtgtggctggaagtggagataggggaagaaggagcaagagggattggaagagggctctatcacccaggccttgtattccaagcccaggcgtgcacatgtcatcccactggcagctgggagtcatggtgagtctttaaacaggggggtgagctaacccagccttcacggaggaggtgacattggagcatgtggtagtggcagccacagcagctgtcgctcagggaatggaggaggttttaggaggagaagtagcaaatgcttccagagctgtgtacttttccacggatcatctggtaaatatcccagggaggtggatttcaacttagtgtaagaaaatgcttttcctcaaaagggagctgtgggaaggcagatcaaagtcctttggcagcctaagggggaaagcccagctccaccaggcaggagctctgtggcctcgggcaagtcccttaacctgcctggtgcctcagtgacctcatgtacaaaattggcattaattaattaatgtgaacattaaatgatataatgcttgttaagtagcataatgttaattggtgaatctaggcaaaaggtgtttattgtactattcttttttttttttttttttttttttttttttgagacggagtctcgctctgtcgcccaggctggagtgcagtggcgggatctcggctcactgcaagctccgcctcccgggttcacaccattctcctgcctcagcctcccgagtagctgggactacagg

SEQ ID NO: 1244365 - DNA, 4001 bp, Homo sapiens
tccctgaccgggcctctcaccaggcacttccagccccctctatgaaaagctccagggggaaaggccgagtcagcactctggccacaactctctcccagggcctggctttaaagtgtgctctggagctctgggaatggccatcctccccaccccttcccaccgcctgcctcctgaggccctgcgcagaggagcagaggaaggcaggagtgcgaggaggtaggggaactgcctgtgaggccgccctgcagtgggttagggggttacccggcctggtttgtgtctgtcccacattcaatgccaggtgggcccagaattgccccgggggtctccggttggtgtgaatgtgggtcaccgtggcccccacctttcccatctggcagatatgtgtcttgtgcctacgtcacgccaggccaacccagcaagcacgggccaggctggaggccccagactctccagggggctgtctggtccttgcacaaaactgcagacactgcacggactgtccccatcccccaattaaacagccagcaggaccaagctgggccgggcgattcccccggtcactccagacacccccacccccactcccccaggaagtggatctttcctttcaactcttagattcttggcgagggatctgtctgtccccacacttcactgttacccctgaataaggagcaggaagagaatggcacagttttggggttttctgatttttgttttgtttcctgttcgttgggttttaaaatctttagcagctcttttgccgctcaaggtctgtcccctctggagggccactagtgtgcccagagctgcccacgctacgcaacatcacagcacggcggcgcccagcctgttgctgcgtcccagtggcaggagcctcctcacagggctgccgagctcacgcggggcggatgccgcgcgccacaagcctccttgaagactaagtgtggaaaagaaaatatcaacgcccacgagatgcagggggcggggggaaggtgggggaaacgaaccctcgcggatagttggaaagccgtcctaacgcatcagtcctggggcagagcgaggagactgggcccgggaactcccggacagagagccctggctccccgggcgcgccctgcaggtcccctgccgaggacgggccggcgccgggtggtccgggagcgcggtgcgcgggggtcctcaagagcccacccgcttcctcctaggctgctggagtcccccgggctcccctcccccgccgcccgccacatctggttccactcaggtcctcccccacctctaggcgcgctcctcctcccctctcctcccccgctttcagaaaagcggagacgagttttaaaaacccagtcacacacacacgcacacacgcttctggagaaaagaggggggaaaaggagggaaaagtcgagagcggcccgcgcctcggcgctccccccgcccgggccctgaagttggccaagttggcagcgccttacccgggagggcggcgtccccaggggcgccgggacggccgaggtgcaggcacccgaggagcaggacgcagcgcagcaggtgacgaggccagggcgcgggggccggccggccgggccccatccccgagcgcggcgctcagtggacgcggggaccgagggcgcacaggcgcaacgcgctgtggcagccccgaggctgggctgtgatgaccgcccgcaaggggctcgcgtcctcctccgggtcgggacgaagtgatgcctcccggggaggaggagggaggaggcagcccgggcggagggagggcggagggaggagcgcagaaccggggaggagggttcgaggggtagaggggaagggaagtgggcagcgtgggaggggaaggggaggaggcgcgggtctggggctagagcgtcgggagggagagaaaggggtggcggagaggaggacacgccgggtccaggaggaccccagcgtgcgccctttctcttgctgctctgtttcccagtctctccccgcctcgccttccctctcttctgtcccggccaggatccccagacgctgcgtcacaactcccccgctggcgcgggcggggaagcaactgcaaaactttccgcaaacttcacggcgtggtgggacctgggctacgaggtccggccagcccggggcgggggcgtgcagctgacccaggtggccagacccgggccgccagcatccgccccgccatcccgcctctttctgcgggcgtctccagcagcctagcatcccctacctccatgccgaggaggacccctcccccggtctggtggggaaggggcggagcccagggcctggccaccagggcgaagattgggggagggggaggcagagcccttgttacgtgtgcggagcgcaacaattcttgcacgtcttgttttagcattttcgtgacccctgtgtcagtgttcccggtgcaggagtgtagcacttttgcttgttggggctgcatccagaaacctggggaaaatctgtccactggacgtctcagaagaccggcatcatcactcccaccaactggactgctggccggtagcaaaagaccagctggaaatttcataaaaggttagacaatccacagttactcagtgttacgcaacaggtctctgcagcacagagcacgaactggggagtcaggatgctggagtccagccctgcctctctgcggattccctgcctgaccttgggaaagcctcttggggtctcggggcatagggcaggactgagacgttgagaccccaagtgcaaagaagacacatttctcctaccacgagtaatcaaaaacactatgaaactgtaatatgggccgggtgcggtggctcacgcctgtaatcacactttcggaggccgaggagattgagcccaggagttgaagaccagcctgggcaacataggcagatcccatctcattttgttaatataaaatttttaaataataataaaactgtaatataaattgtattgtttcctatcttgtccaccttggtatgttttttggaaataaattcaatttttttcctttttattcctcctatcttgggtaaatgtttccccaactctgcagtgggggtgttgggtcagaaatgctcactcgtctcttcccatctctgtcaggctgaggctcttggtaaacagtccagtggtaatagagcctcgaagcaagcccccactgaaatcccctagaggcccctggaaagggtcccattagccaccctttggttagcagccagaccaacaaagcccctgcactccacggctagcttcagcaggtccgacagggccaggtcccttctggtggctgtggctccactgccccttgggacatgtcttcttggtgtggcatgttctgggatctcagtcctctgcacacaacaggccatgctggagctgcctcagaggtccccctcttggccttccctcttgcacaatcctgtaatctctgaaggatttaaggatttgccggctaagctgctctctcgctctcagaacacaggatactccttcccctgaaacagggctggattcccccttctccagcagcttgagtaggtttcggcgtttcctgctggccttccctcctactatcagtggcaggacagaagcccaccccttgacatcaccagcgcagagcatgaggccagagagcccaccacttgccggcaccaggtcccgccatgccgggcacacaggaggtgtgctctcgtctcttcacccaccggctcaacaagcaccgactgctagccctgtgctagctgctagagaaagagagatgggcaaacacagttgcagccctagaggagcctcatttagtgggggaaaataaacgttttgccatattccaggcaaagaagacgcaagggctgaggagcacaaaagtgtgctgctctcgcagggacagaggttggttcaagcttctaaggcccagttctagtctctgtcaagggtgagacttcctcctccagcgcgagacttcctcctccagcgcgacatgg

SEQ ID NO: 1244366 - DNA, 4001 bp, Homo sapiens
tgaaaccccatctaaatacaaaaaaaaaaaattagctgggcatggtgtgtgcctataatcccagttacttggaaggctgaagcaggagaatcacttgaacccaggaggcagaggttgcagtgagccaatattgcaccactgcactccagcttgggcaataagaatgaaactctctcaaaaaattaataatattaataataattaaaatgattacatgttaaattgatattattttggatatactggacacaatttatttaaaatgtcatctctttacttttcaatgtggctactagaaaagctaaaactacctatgtttctcacaccatatttttattggacagcgttgttctagacaggtcccagagctctcccccttcttaagagggaaatttctcaccctgcagttggggtgggggttggggggggtatggtcagaggggattccatatgcagagcaatactgcctccttgtgtccagcaagggaagcacagctgaagacaaacggatgggagaggggtttccaaggtttgtctcttgctagatactaatggcataaagatcttcttgttcaaacatcctttcaagctgtgccctattcgaggaactcaggtctcctgtacgcagctccccacagctgaacaaaatgcatttactgaagcccgacctagtaggcaaatagacactgaggctgacttacagaagaggcaaagtggtgcatacctggggaaggggtgcaggaaagggtataacgctaggaagaattcagctaatgctccatttgccgttttaaaaactccaggacccttccatccccagagggatttagaaggccaaaggaagcggtgccaacatgcccctttctctccctcgccaggggctagcttcgtccccttgaagaggctgagctgggctcacatctgttccttcccctcttgcccctcattacctgtaaaaatccggtgaggtcatcagtggagaacacgtccatcacctccatagcccccgcgctggacttgctgactactggagtgagcgggcagctgcaaggtttccccgttccccgcattaggctgggccatctcaagcccggctccctaccctcccagggctcccaagggctagggggatgagagttctgggacaggtaagtctggctaagggatcacccaagggccaaggtgcttaggaactcggctgcgtctccaagttggggcacatagagaatgagggacgtccgtgcctgtttctccggctggtgatgaccttatccactccgaggaagtgtgcggaacgcagcacagccccaaaattccggggatcctggatcccatcgaggacgagccacaactgctgggggtcgtcgcctgggctcgcctccccggcctctctccaaggccggggccgcagcgggctcacctccatgcagacaccctggtggacctggtagcggcacattgtgtccagtttctgccgtctgggccgcagaactggaatgtcccgcgcctcggccatccggagcagctcggcccgcttcccctgcagcccagctttacccgcctggagcaggagccgggccacagagcggcgggcggcctgcagagccaggagacacggggtcatgccaaacagaagctccagccgagaggtcggcaccaggtcatccagcagcaagcggcttagctcctccccaccaggccgctccccatgccgcgctgcatgggagaaatgacgggtgacgaggcgaccccaggtcgcgccccggacggtcgagagcaatgccatggcgcagctcccgccagggactcgatgccccttgctgcgtccccgggagcggtaacccgcgccgcagttcgctcccaggctcccaacaccgaggtgaagggtactcgacagccgtctccgccgagctctctcggacaggaacaaacagccccgattacccacaactggactaccgagctacgaccacccgctcccaggctcccacgtgggtccctcgcttccgggttcgggagcccgcccctccccggccccttcctgacggtgttttgcgcatgcgtggctgccaggctgtcccccacagcgcctccctcaaggctagaggagcggcgagctgagctggccgtactaccggctgcgtcctgtgttcctcgaggtcccaggaggccggggaccgcattcacccacgcaccagtgaagggccctttaaggagatgggttggccttcctggtcaaccaattcagtcttgttgcctccctccccacatcccggcgctggtgatttttcccagaacttctcactagcccatcaccagccagcaggaccccaacagtcacttcctatcccgggccgctgattctcttcctaagtgactctgagcctgtcgtgttcctgctgacaagctcactaacgcccccgtcccacaggtaatggcgagactcttgcgcagcactcagccccccagcgatccaggaaggcaggaaggagctgcctcttcagccccatctggctccttgctcctgtgcttaagttctgagctgttcgcacagcactgcatgctcttccagacctctcagccttgcacacctgtcttcgctttgtcaaactcctacatgttttcaaggcccaaacaaacccattcctgctacctaaggtaatccatactcccatgagtgaggcccccaatccacccacctgggacctacctggaagaaattctgagacacaagcacccctgatcacagagaaggggaaagaatggaaagacactcctgaagccaaggcagattggttgcgatttttcttttttaatgatcaccatgaaatccactgggccaggccctggtgttctgctgccatagtcagagtcagagtggagggatgaccccaggaggggacaagaagccaagactgggctggggagccgagaaggagatagataagggggagagggtgcagtggggcaggcagaggaggaagtctggagccctggataacaacacagatataaggtgaaggcctccctctgccaccccagccctgagccacagacgttgaggtgcaagaagatggggattttggccacaactcctttcccatgtcaaagggaagacactgagagcagacaaaggccaagtgcccaggggcacaagaacaagttaacaagtaaaacaattagggacaccacctcctttccccagcccatttttcacatttacaactgaagcaatttgacaagatgatataaaaatctcaaacaaattttctagcccctggtcggggtgtggacaggaagtggtatcccgtgatccagaaatcaacacctaaaatccagaggcaggaggcaagccatgaagggtggggagggaaggaggagctcccacagtcactaggtcacctgctccgtgggcctcatctggatgtctccaatctgtggaaggtacaaggcatgaggcagctgtgacactctcccctggccctgcagggctccctgctcccctcctctggggctggttgggttcctccagtgagtagacagtcagggccagactcacctggatgtgtgcgggggtgctgaggacgtagataacagcctcggccacatcctcgggtttgagacactgagagcaccaggggaatgggttgagacaaggacagaatggactcaaattccctcccaccactgagcttctctgtggcatccacacatccaccccaaccctccaggaggagccacaaaggctggaagagtggagtctgaaggccgagcttccctctgccttcatttagggagtcagtggcttcaccaggctcagagggaggccccaccttcatttgctcataggtggcagctgccttctcagggtccttgtcgtggagtttgaaggcgaattgtgtctccaccacacctggagagatgcactgggccaacagagagggccttctcaggggctgagctttgccaggtcttggggaggtcgaggggagaggatggag

SEQ ID NO: 1244367 - DNA, 4001 bp, Homo sapiens
aaggtatgccccacctccaccccaaccagcaacatcagcatcatttgagagcttgttagaaattttgctgggtgtggtggctcacgcctgtaatcccaacactttgggaggccaaggtgggcagctcacttgaggtcaggaattcaagaccaacctggccaacatggtgaaaccccgtctctaactaaactacaaaaattagccaggcgtggtggcacacacctgtagtcccagctactcaggtggctgagccatgagaattgcttgaacccaagaggcagaggttgcagtgagccgagattgtgccattgcactccggcactccggcctgggtgacagagcaagactgtctcaaaaaaaaaaaaagaaagaaagaaagaaaaataaacataaattctcaggccctgcctagacctactgaatcagcaattctggggtggagcctagcaaatagtgttttttgtttgttttgttttgtagagaccaggtttcactatgttaccaagacgggtcacaaatagtgttctaacaagccctcctggtgatgctgacgcatgctaaagtttgaaaaccaccactctaaccgctgctctgacaccctgtcctatgatttgaagaggagaaaaaaatgttacaccattctcacagctctcagacaagtttctctttcctcctctcttcctgtttacagataatgctacagagcaccccacagaaaacaagggaggcactcaaaagccctgagacaaagtgaccacttaatcctcaacacaagggccaagactagaacttcccactttcagtcatttccaagactgggatgtgacctcagaaaaaggtccagatagaaggcggctctaacagtcagagagtatggatatttgctggggtaagaggtcttattgccagcagccacaaaacctaactgttaagactgcaggcaggctttggaatcaaattaaactggattttttttttttttgagatggagtctcgctctgttgcccaggctggagtgcagcaatgcgatctcggcccactgcaacctctgcctcctgggtgtaagcgattctcacgcctcagcctcctgagtagcggggactacaggcacgcgccaccacacccggctcatttttgtatttttagtagagttggggtttcgccatgttggccaagctggtctcaaattcttgacctcaggtgttccctccgcctcagcctcccaaagtgctgggattacaagcgtgagccaccgcgcccagccgaaactggattttaatctctcttccgccaattactagctgtgaccttggccacccaactggtctgaacttcagttgctgcgtctgtaaagaggagatgcgaatgtctttctcacagggtgctttagatttaaatgatttaaaagatttaaatgagctaacacatataaaaatagttatcacagtgcctggcctatattaagtgctcaaatccattcactaaacaaatatctaccgcacgcttactaacatccagcaccatgccacctgctggctatgctgaatgaacatggttctgcccttgcggagtttaatagaggaaacaagcaactaaacaaatgcaaaattacagattgcgacggggctaaggagtcaagggaagacctgaggtgacatttagactgacacattaagatggagacataatgcaaaggtctgggcgaggagtggtccaggcaaaagaaacgctggagacagacaacatctggacgttgttgctgtgattaccagtcgagtcacaaggaactggacggggtaaggaggccagcgatctagctggggtcagagattatgggaagaatcagtagtagaggagggcagatgaggactagagagcggccgcaagacacgccgtgaggacctgggccactccttacccgcctggggcaggagaccccctcgcagcatccccgccacggccgcagccatctccaccggaagaatggacggaagccgagtggagacggaaagagctaaggattgtggggtagcgaaccccggggccggaagcagtgggcgtacccgccggctgtagccgtaagacgcatgcgctaggccgggccaacggagcccgcctttacctccccactcggcgtccagtctcttagcaacgactccggcttcctaggaactgctcctttctcaaccattcctgcccacaacaccccagcttgctgccagcaaagcccctccacacccctcaaactccagacccttcacatcaatttactgttttcttcgacctcaccccagcaattttctctgaatcaaccccctttcctcctctcctaagtctctgagtttctctctcctcctgccatcctgagttctgccatccttaggggccgccaagacctctcttttcgttcctctcccgcctcagaccagcagccttttattttagatcatgtctggaggtgagtagggaggtgggacggtgggtagagcagttggaaaacagcggggtaaggcctccaagagtgaggaagtgtcacagttggactcatcttttcacagggaagtcagcccagggtccagaggaagggggcgtctgcatcactgaagcccttatcactaagcggaacttgactttccctgaagatggggaactgtcagagaagatgtgagtgcatgggggagaaaaggggtgctagaaggctgaaacactcaggatgaccaggtccctgacgtgtactgatttgtcaactgatctttgtttctctccttactccacacattcaatcagtggtaatgcccagctgattttcccttcttcaaaataattccatttctttttcaccatcctcactcaactgtcttagataaggccgtgttcacctctctcctacacacccaccactttgggaggctgaggcaggaggatcacttgagcccaggagtttgagaccagcctgggcaatagagacagaatcctatctctaaaaaataaaaataaactagctgagcatggtggtgcacacctgtagtcctaggtggctgagacaggaggatcacttgaacccaggtacctgtggctgcagtaagctatgatcatgccattgcatgccagcctgggcaacagggtgagaccctatttctaaaacaaacaaaaagtaaagtatttttaattacttttttagagatggggtcttgctctgttggccagactggtcttgaactcctcaaacaatcctcccacttcagcctcctgagtagccaaagtgatccttttaaataacaaatctaatcaggcattcactgatagaaacttcctcccaaataaatcccaatgcctaagcatgagttgacttctgcttttcagccttatttctggccactctccacaagtgtacaatttcccacactgtgtactcacaccttagtaccttactactcagagtatgtgtggatgggagggggtgcaggggtaggacagcagcattggcatcacagggggcttgttagaagtggagcatctcagcccctccacccgatctactgaattagaatctgcatgggcatattggagtttcggaagggctgtattagcatgtactattccttctgcttgaaatgccttctccccatatccccccaccttcatggctaatgcctactcatctgtcacctcctctaggaagcattccctgattcctcctactgtgaatttagtgcacagcctatgtactccctttgtcccctgtacttgcttctgttatccacttgtcagggatgtttggccttattctttctttctttctttcttcttcctcttcctccttctttcccttcttcctcctccttcttcctttcccctgtacttgcctctgttatccacttgtcatagatgtttggccttcttcctattttttttttttttttttgagacggagtctcactctgttgcgcaggctggagtgcaatggtgtgatctcggctcactgcaacgtctgcctcctg

SEQ ID NO: 1244368 - DNA, 4001 bp, Homo sapiens
ttgccaagttggaaggcagtagtatgatcttggctcactgcaacctccgcctccctggttcaagcaattctcttgcctcagcctcccaagtagctgggattacaggcacctgccaccacgccggctaatttttgtatttttatttatttatttatttttatttttatttatttattttgtttgtttgtttgagacagtctcccgggttcaagctattctcctgcctcagcctcccgagtagctgggattacaggcatgtgccaccaggcccagctaatttttttttttttgtatttttagtagagacggggttttaccatgttggccaggctggcctcgaactcctgacctcaagtgatccacccgtctcggcctcccgaagcgctgggattacaggcgtgagccaccacgcccagcctctttttcctctctcagcttagtgtctgtttccctccattagaaacatggtctccacatgcaaagtcgtgcacatccgtggcagggagtaggtcccaggaggctgcaggatgccgcacaggtgtgcaggctgcagacaatgacggtagctgcagaacctgagatacgggaccacggcacatgaggccacaggcgaactgggcaccccagaaatgcctcattctgcccaggactcacctcctgggctgctgcagcagggacagccccagacatcacaccacccatcggcacaagcccgacatcctggatcttcaacgttttctgcagagatagagaacagtgtccacagctggccctcacaccagccggaacctactgaggaggggcaactagcctggcatggaccttgcacctggacaaacacacttttgacaatttaccaaactcccaaaatacaccaggaacaaaacacaggggccctgaaacttccagcccctgggtctgtgccaccctctcacgataccttcaggagctcgttgaggtctgagatttccaagagagtgaggctggcgatgtcctggaccagctgctgtatcttgggggggtactccttgggggcgttatccaggggtgcaccagcgagggcctcacacctctgatggccgctgctcctcatatgtcgcacggcacagacacatggcacctgtcgcctagcccccacccccaattaaaacagacttgtcagtcctggaatggaaggggctgcagaaaccagaggggcaggacaactgggggactggtgggtgccataagctcaggctggtaatcactagggccggaaattacctagctccttggtcccagtccagggttctcagacctcaaggggtccgtattgataagatttgcaagttactttaaattcttcaaagagccttagaaagccacgtgtttatttgcagccataccactcaaacctcaagtttctggtttgaatgaactacatcaacccagcggtggcgaaactattacttaggtgcatcttcctgcgcaaagcctcccaaaacatgggggcccctggccgcaaaacgccgcacccacggatgggcctttgctgcggaaaaggctgaggccaagggaggagcagggaatcgtccaaggtcatctggggccgaccccggcgctttccacggcccaggagggaaggggcgtgcgcaccgggaggcctcctccccgcgcccccgatgggacccccaagcccggcctggccgctgcagggaggccggccccgccgccctcctcgcccggatcgacccctcagtgcccggctgccccctaacccgcctgccggcccggaccgccccaggatcccgcgtacctggcaaggcggaacgcagcggcccgaagcccaaggcaaggcccccacagggggcgagcggccgccggcagcatcggtccgcgggctggaaggtcacacgcggttccccgggaggaggcgacgctctagccgcctcggccgccgggcattcgagctggggaggaacgctctagccgccacggctgccgggcattcgagccggaaatgacgctctagccgtacctcgcgctagcctcgtctcaccctgagattacccacaaggcggcgcgctgcgcagacgcaaaagcgtcgtctgtggcggcagctagacatcgggcgaccctcgtcccgccaggttttggggtcgcgcaaacgagcgacgggggctggggctccggattcaggtgttctttcttcagcgctcacgggtttctgtccgtacgcgatgcgagcgaacgtcgcggtcgaggctagggccccgaagcccgcagtaatccacgtctcccgcccgctccgggcccccagtgccgccgtcgcgggcggaggcgcgaggtctgggctttggcgccttcgcagccgcaggcgacatcctctttcctagctaaagccccaaacgcccaggtggcttcctgggagagcacggctgagcctccgccttcagatcagaacaggcagagcctccaagggcggcttgggcccagtgcctgcttatcctgcccgtctctccacacttcttctttccctgtccgttggagtccattccttcctggaaaagccaaagccgcgctcccctaagaggcctggatgtgaaggtgagtgagacgccctggcctctgggtgcaaaggccggcgcctgccgctttcaacactcaggaggcgcgtttcagccccgctggcccccggccgcagactcggagcgctgagctcccaccgttcccatcacccgactcccttcccaggaatgaggagcacccgggaagcttcagccactacacgaaggaggcgccaagcccaaactcctccccagctaccggcggggtcagtgcagagccgcggagggcacacatgaaccctggcacgcagcctcagggaggggcaggctggaaatgaccctgcctgcagctgggccatcagcctgaccacctgccccctgagcaaacgttgatgcaggtcgggcgcggtggctcatgcctgtaatcccagcactttaggagcccgaggcaggtggatcacctgaggttaggcgttcacgaccagcctggccaacatggtgaaacaccgtcgctactaaaaatacaaaaactagccaggcatggtaatggggtgcacctgtagtccagctactcgggaggctgaggcccgagaatcgcttgaacccaggaggcggagcttgcagtgagcggagatcaccactccagcctgggtgacagagtgagactccatctcaaaaaaattaattaaagaaaaaacgctgatgctttctgaaatacattttattatcgctgtaccattctggggcactggagatggcagctgagaagcagagaagctggagacctgaagcctccacccttggctgtggctgccgagagaggcccctgcagagggagccccaggccacacccagacaccacagccagctcacagtgcggccagagggcacaggctgcttggggggtgagggtccccattcctgccacctctcacagaccatgacccacagggctgggggcttcccctgggagaaagtccttccctccccatggcccagccctggggaaagaaagcagagactaactcagggactgcagtaggctgaggacaagggaggtgggcttggggtgaaggccccccctcactcgcagagaagggacactaccggcagtagaggacagggaggcaggacgacggcagttagagacgaggcgtttcaggtgaactgtatgtagtgttactccggacgtgagcatggcctgggtcagtcgaatgaaatgagctgggcctcgctgccctgtgccggcggcccctgtgcctgcggttgctgggccacggggggctgctgctgggggggaccgccagagggtgccatctgtgcaggaggaaagcaggcatggccctggtcctcccttccccagcccagggaggaaggcttttgtcccagcagagccacagacccacaagtgcttgtaatccatgtccacggactgcagctcatgcagccagctca

SEQ ID NO: 1244369 - DNA, 4001 bp, Homo sapiens
caggctggtctcgaactcctgacctcaggtgatcccaaagtgttgggattacaggcctcacccatgactttctcagctgtccactcatccactgctcaccaaatactagtaaaccaaaaggatggctggcctaaaagtggctcccacagggtcctggccatttcagaaggctgggccctttcttctcaaagcacatcaagcagaggtccaaccatgacccacacactgcccttgttaatctgacctctccatactcattccaaagtgctcaatagcattcatttgcagaagtaaaatgaactaaaattcatactaagatggtagtcccttgctgtatgacaagcctaggggtgcaactccttgcctgcaggtctccagacacagccatgatttaaggtccatgccagtgtctttagagaagccttgtgggtctctggagcctataagttcagagttcctgaagcctgggtttctgacatttccatgacaccagagactagctggggcaaaggaccagagataaggactcagaaagacaacatgttaaaacatgcccggcgccaggatctacctacctttaaacatctattcattcatttacatacttactaagctcaggagctgggcttttactttacttacattatctcactcacaaatctttgctcttcaccctactccccatcctcctcctcaaagtaaatggtaccaccattcatccagttgcttaggcagaaaccagagtcattgcagattccttctctttgctgtcctcacatattgttcaccagcaagctctgtggatgctaactccaaaacagatctcaaattcatccgttttcctccaagttcactgccaccacaaacatcttggctaaatcatctctcctcagggctattacgactttccatttgatttcctcatttccactcctatcccctttaaatttacataagagcaatagtttgcttctcaaaatgtaaaactggctcaagtcactctcctgtccctcactctacacaggtctaggtctcctgtcattcttttttttttgggggggggggatagggccccattctgtcacccaggctggagtgcagtggtatgaacatagctcactgcaacctcgacctcccgagctcaggtgatcctcccacctcagcctcctgagtatctgagaccacaggcaagcgccactacacccagctaatttttgtattttttgtagagatggggttttgccatgttgcccagtcggtcttgaactcctgggctcaagcgatccgcccacctaggcctcccaaagtgttgggactacaggcgtgagccatcacgccccgcctgtcattctttaggttttaaatgttatctcctcagaagccttccttcaccgtccaatctaaaaaaagacacacacacagacacacattatccttcttcacagcacttgccagtctacatctactttatatgttcatttattgccttatgcaccagagagaaccgttcgggggctagaagccaagtcttcacgttttctgctgattttccgaacacctaccgccgtgtctagcacaaagtaagacctcaatctgctgaatcaatagattaattttttcaaccccaatatgccaatgttactaatacttctacagagaaaggacccacccaaatccccaaccgccaaggaacccgtccgtgctgctgaggcaggagaaagacaagtgctcttcaaacgccctcactcacggctccacccaggatgtgtcacgtgaccagcgacaccgtccctcaaacctggagtaccccacacacttcccctcgcatccaaggtcctccgcggggatcagtgtcacctccttccctccctgctggagctccactctgcctccccgcctcaccccgctctgactactgcgtcccattaccggctgtccgggtcctcagcgccaacaccaccgacgccatgctttcgatcactcacttccggtctcgaaaagtttctacttccgctatcaggagatctacttccgggccctgcgtggcagttgaaagagtggcgggagaagttgcaggtgagcgtccccggtcgcaggcctgcggattgggcagggcttccctcctgaacaccgctctgcagaatcttggtggctaaggtgtccaggagcctctgcagcggaccgccagcctgagaggcgcagagcttgtcgggcaggggcccgcttgtcccactcccctgatttgcagatgtcaacggaggcccagcgaagggtcagagatgaggccccctccctagtcattcaacttactctacttagccagctgtgtgccagatgctgtactaagcgcggtggatgcattattttatttaattctcactaccttataaaatgggtgctgttaccatccctgttttactaaggaagaaactgaggcctaggcaggttacatgtctccttctgggtcatacctacagtgttagtaaatgttcaagaaatgattagctttgcatatgacccagcaattctactcctaggtatatacacgaaagggatttgaaaacatacccccacaaaaacttgtatgtcagtgttcatagcagcattattcataacaggcaaaaaaaggaaacaaattaaatgtccaagtgatgaatggataaacaaaatgtagcatatccatacagtggaatattattcagtcatgaaaagcaattaactactgatacaggctacatcatagataaaccttgaaaacaagctgagtgaaaaaagtcaatcacaaaaggccacatagtgtatgattctatttatatgaaatatccagaataggcaaatgcatagagacagatttatggttgccaggagctggggagggagggaaaggacagtgacggcttaatggctgcaggaattctttttgaggtgataaaatagtgatgatggttgcacaacattgtgaatatactaaaatctactgaatgtacacttttaaaaggatattatgctgtgcaaattatatctctatttttatttttattttatttttcttttgaagcagggtctcactctgtcacccgggctggagtgcagtcgtacaatcacagctcactgcagccttgacctcccaggctcaagcaatcctcccacctcagcctcctgagtatctgggactacaggtgtgagccaccatacccagctaatttttgtatttttttgtagagacgagttctcactatgttgcccaggctgttctcgaactcctgggctcaagtgatccttctgctttggcctcccaaagtgctgggattatacgcatgagctaccatgcccagcctatatctcaatttttaaaaagaacagtttttggccaggtgcagtggttcacacctgtaatctcagcactttgggaggccaaggcgggcggatcacttgaggtcaggagttcaagactagcctggcgaacatgatgaaaacgcatctctactaaaaatacaaaaattagccaggtgtggtggtggggcgcctgtaatcccagctaggctgaggcaggagaatcacttgaacctgggagtgaggttgcagtgagccaagattgtgccactgcactccaacgtgggtgccagagtgagactccatctcaaaaaaaaaaaagaagaacttttgacatctccatttcaaacgtgaagataaacaaggggttggaggtgttaaatcttgttaccacctccccccattaaaattttgtaatggtaactctactttgtttatacttcagcttgacctggaaagaatttgaggaggattcctgttagattaccaggagttagagttccagattgaatgtgttggggccatgtcatatttctctgtttctgtattctctatatcttatatttatgtcataaagcctggctatggaacacagctagtggactgaattgaatgctccagtctgtgtcatatgtctcttttccttttagggaattatttgatagcac

SEQ ID NO: 1244370 - DNA, 4001 bp, Homo sapiens
tagaaggacttatagaagtgcttctcggccaggtgctatggctcacgcctgtaatcccaacactttgggaggctgaggcagggggatcacttgaggtcaggagtttcagaccagcttgggcaatatggtgaaaccccatctctactaaaaatacaaaaattagctgggcgtggtggcgcatgcctgtagtgtcagctactttggaggcagaagcaggaaaatcgcttgaacccaggaggcagaggttgcagtgagtcatcgcaccactgcactccagcctgggcaacagagcgagcctctgccttaaaacaaaacaaaacaaaataataataacgaaaacatactgagccctcatcagagatggcattaggcaaaaatgccaatgaattgcctcttttaatcctcacagcaattttgtagcaaagacacaattattttattttacagttgaaacaagctcaaggacattatccgagaggctgagctaggatttaaatcgggctatttagattccacgcttgtgcctttaaccaccacaaaactgcctctataaatgctaaagaaaagaaaagaaaagaaaagcatatactccataaattgtaagttccttaaaggttggggtctttttttttttttctttttgagacggagtttcgctcttgttgcccaggctggtgtgcaatggcgcgatctcggctcaccgcaacctctgcctcctgggttcaagcgattctcctgcctcagaggcctcccgagtagctgggattacaggcatgcgacaccacgcccagttaattttgtatttttagcagacacggggtttctccatgttggtcaggctggtctcgaactcccgacctcaggtgatccgcccgcctaggcctcccaaagtgctgggattacaggcgtgagccaccgcgcccggccaggttgggttcttttttgagtcaccctgcccaggcctttaatttcattcagcaaagtattgcacatgtacatccttgcactgttcgggtgcaaggatccaatggagggcaagacaagcaggatccctgtcaacagggcgcttacaatctggggagaggcagcgcacagtcagaatgcagtgtggccagagttacctacagagtatttgaggcgcacagaacggcatcccaatccggaaagtcaggtggtcaagattttaggagcaaatattttaggagctggaactctaatagtagggggagcgaattttccaagaatgaggtgcagaaggtgtgaaaaatcctggggtgattaagctgccgatagcgcacacaggtctgcaggcaggccctcccagcgtccccagcatccacaagggcgccggcaaggctcgcccagcgcccggggaaaacgccggcgggtcccgagttccccgggcggtggctgcagcccctgctccagtcgccccgcacctgtcttctccccgaaatactctcggtaggtccgccaccagtgcggggcctgcgcctcctgctctgctcggcgccggtagcggtcgaagctccggtacttctccagccgctccaggttgctcaagtcgatgtcactgttgggcatcggccccagcgggggtgtccggcggcccaggacggctgcgggcagagagaagacgtaaggccggcgccccacagctcgggcgacagcccccccccccccccccgcagagctgcccacccctcacccgaggtgctgaagccccgccatctccgacactcgcacagcgcggctcgccaccagggcgccgccatcttccctccggcctgcgacactgcggccgccactaggacccgggcacaggtggccagcgcggtgcctgagcgcaccacagcaggccccgcccctaggcccgcccccgggcccgcgctgcggagcaggcctcagacgcctgtcccggaggcccctgcaccgtctgcctcgggcgcaggtggaaggtggccgcggtctgtagacgcccggctccggaagtgcccgttggacggcggggcggagccgagagcagtcatatgctcgcccatggctggccaccagggggcggcacagaccggggtcggccgccggggccctcctccaacccctggacgctgcgtcctgatttccccagggacgcaggcctggttgggagaaggggtgcgagctccgattccggactctgcttgggtttaaaacccagattgagggctgggcgcggtggctcacgccgggaatcccagcactttgggaggccaaggcgggtggatcacgaagtcaggagatcgagaccatcctggccaacacggtgaaaacccgtctctactcaaaatacaaaaattagccgggcgtggcatacgcctgtaatcccagctactcgggaggctgagggaggagactcgcttgaacctgggaggcagaggcggaggctgcagtgagccgagatcgcgccactgcactccagcatgggcgacaaaagtgaaaactctatttcaataataataataataataaaataatagtaataaaaacccagattgtggctgggcgcggtggctcatacctgtaatcccagcactttgggaggccgaggtgggcggatcatctgaggtaattagtttgagaccagccctacgaacatggcaaaaccctaaagatacaaaaatttttgtatctctactaatgatacaaaaattagccgggcgtggtggcaggcgcctgtaatcccagctactcaggaggctatggcacaagaattaacttgaacccgggaggcagaagctgcagtgagacgagattgcgccaccacctcggtgccagagtgagacaccgtctcaaaatgcccctccccccccccaaaaaaaaaccagatcgtgaccttactgtcttccttgtggtttcctcatttgggaaaaagcaggttaacactagtgcttacctgacagctgtcaggatgaaaagattaccctctggaaagcgctcgcagtggtttgtgtgttagctcaactatctccaacttctcattatccacacaaaggcagaagtgacctggttaagtgcagatgtgaatgtttctggcaggactcaggcttgcccttgtgatccagttctaccatggcaaaacttggtagcctggggaatctgggaccctcctttgccccagccctggccctcctgccctaaaaggcaagacttttccatcgcactttgcctccaggccacggggcctttgtatacgctgtgtcttctgcctctcacctcctcactgccccaccttggcctggccaccacccagccccaggagaggggtctctccaggaagcctgctctgacatcccaggccagggctggtggtgaccaggccagtggctctggcaccagcagaagcttgaccctcacaatcactttgagatggaatgagaatggaatgagggtctctccatccagcaggaagtggccacaccttccactggttttcataaacagcagccaaacagctaaacctttcacagtcatttctaatccacccagcagtgtgcacctgctacatgctaagtgtggaggggaatacgtggggcagtcacacccagtcctgctcgtaaggagttgcttattgtgacattccatactgcagttatgcagtacaggagcataactggattgtgtgtttacatcgtggctgttttaccttgtcctttttttttttttttttgagatggagtttctgtcgcccaggctggagtgtaggggcacgacctcgactcactgcaacttccgcctcccaggttcaagtgattctcctgcctcagcctcccgagtagctgggattacaggcatgcaccaccacgcctggctaattttttgtatttttagtagagacttggtttcaccatattggccaagctggtctcaaactactgacctcaggtgacccacccacctcggcctcccaaagtgctgggattacaggtgtgagccactgcacccggccaccttgtccttttgtt

SEQ ID NO: 1244371 - DNA, 4001 bp, Homo sapiens
cagctacttggaaggctgaggtaggagaatcgcttgaacccaggggggcagaggttgcagtgagcccagattgtgccactgggcgacagaacgagactctgtctcaaaaaacaaaacaaaacaaaacaaaaaaagccagaaagatttaagtcttctctcagagcctcagtttctacttccacaaaatggagaaatttcactcttgccttctagggacagtgtgaaagtaagttcaaagaacaacttcatgatatatagtgtatataaggttaatcattattgaggttgaactgacttcgtgcttaattaaatattatcaatcatagtccaagtcatcccaagttccagaagatctctgacagaaggatcccaggtcagggtcccagaaatacctcacctgtacaggccagatgtatggaacggtccgatttttctggaggaataaccaatcctgctttccgggcatgttgcataaactccttttctgttttaaatttaggttgataaataggaggtgtgaaacgttttttagttcttactggaactatagctgcggactgagtcaccagaactggctggaaggtaaaggaaaggttaggaacctagaaaaaagatctactatcttttacaaactctaagcaaagcactatagagagggaatatccaaagaatgcttcaggaacaattataaaacaatatcacagggaaaaaatgcattaggaccttaatacttatgggtgtctctaaatagaagacagttagcaacctttattaacatcacatttactaaaggctttcctttagaacttcccacagtacaggactatgctaactcctacggatactgagttgatcaaagcaagtttcaaaaactgatggtgatggggaaacaccaactcaatactgaaatgggcagaatactattctttattattttttgaggcagatcgctagcctagagtgcgatggcacgatcacggttcactgcagccttgacctcctgggctctagctatcctcccaccgcagcctcccaagtagctgggactaaggagtgcgccatcgcatctggctaattttaaaatttttttgtaaagaccaggtcttatatgttgcccaggctcatttcgaactcctgggctcaagccatccttctgcctcggactttcaaagtgctgggattacaagtgtgaaccaccgcgccgggccctgaatgctatgcttaaagcataagcaaagtcctcttgtaggcatctgctccatatgtactcgtgatattttgctcatcctatcgggagtctcgctgtaaactttattctgtcgttttagcacccaactgaccaataaaccctcgaaagatcaggagatcttttctctctgatcatgaggtttgctcagacggggcagtgacaatatgggacgccctcattttcggctactcttcaacgtagttcacttataagaatcgaagattagggagtccaccttccaacccattacttgtctctcctttaatatctcctcgccagacagacccaaaccaatccggaaaaacttaatatccgttaattcactcgctctcatggccctgtctaggctatccccattcgaccactgagctccgcagctaggtcctgtccacctaagcctcttccccggcctaggtatgactcgtattgtcccagctcaccaaggacaattgcacagagagtatttccctcgactctgtcctctcctgtagcccctagggtcctatcggccccgtccctacccacctgccgagaccaccagcccaaaaacctcgataaacaagagaacccttgaggtatgggggctgccatcttgttcccgcaaaggccgccgggaagggagctgagagtgaagagcgtcgggtaggagaaaagccgcatagggtggagctagcacaggagtggaattttccagggagcgcgccctccgccgaaatgtgagcagcgaggacgcgcacgtgctcgcgggagtgggggagggtggagtaaggagggcggagtacggccgcgcgtgcgcagggagacaacgttgggcgtagggtggaacgaactgttgtcccccgccagcgagagagcgcttgaacgcgagctgcgcctgcgcccgaggctttctgaaggccggggaatgggcattgctgtatgcttggcacattgccgtttattccattagttaaaaaaggaaaaggaggccgggcgcggtggctcacgcctgtaatcccagcactttgggaggccgagaccggtggatcacctgaagtcaggagttcgagaccagcctggccaaaatgacgaaaccccgtctctactaaaaatacaaaaattagccgggcgtggtggcacacgcctgtagtcccagctgcttgtaaggctgaggcaggagaatcgcttgaacccaggaggcagaggttgcagtgagccgagatcgcgccactgactccagccagagctagactccgtctaaaaaaaaaaaaaaaaaattagtcgtagggtggaacgcacggttgtcatgcgccagcaagagagcgccgggcttggtggcaggcggctgtagtctgagctacttgggaggctaaggcaggagaatccctcgaacacaggaggcggaggctgcagtgatccgagatcccgccactgcactccagcgtcggtgacagagaaagactttgtctcaaaaaaaaacaaaaaaagagattgactactgtcttctactatgtttactaaagcagaagacacgtgaattgacaaaaacatttgtgatttgtcatttcggaaaggagtcacagagcaattacgtaatttacttaaggttagatagatgataactggcagaaccgagatttgaatctaagcagtctaattccagaacccatgcaggtaactgctacgtgctgcttcatgttaagttgttaaaggattcgtgatgttgggatcaccctggtaaattcagtagtgtaaacgttgctgaaaggcagacactttccacacttagccgttggttattattctgccaattacagcttacagagttctcatctacaatattttgcaataagttaggagctacaggctgtacatacaagaaatttcaggctgaagtagaattgctacaaaggtcgaagcaaagtgctggggactatcagaagaactgaaagattacttttgggtttggagatcacgtgttgttgttgtttttggagacggagtctcactctgtcacccaggctggagtgcggtggcacaatctcggctcactgcaacctctgcctcccaggttcaagcgattctcctgcctcagccgccagagtaactgggattacaggtgcacgctgccatgcccggctaattttttctagtttagtagagacgaggtttcaccgtgttgcccaggctggtctccaactcctgagctccggcaatccgcccacctcggcctcccaaagtgcaaggattacaggcgttttttaaagcttgacttcgcagctatatcgtacattcttatgtggtaagtatttccctacaagttccagccacagtattgaacctatagcacgacacattaatagtgacatgaaattagtgctgtatgtatgtgttgaagagtatgtggggtcgtgtggggtggctcacacttgtaatcccagcactttgagaggcggaagtgggttagatcccttgagtccaggagttcaagaccagcctgcccaatatggcaaaaccctatctctacaaaaaaattaaaaaattaggccgggtgcggtggctcacacctgtaatccctgcactttgggaggccgaggcaggcgaatcacgaggtcaggagattgagaccatcctggctaacatggtgaaaccccgtctctactaaaaatacaaaaaaaattagccgggcatggtggcagacgcctgtagtcccagctactccagaggctgagacaggagaatggagtgaacctgggaggcggagcttgcagtg

SEQ ID NO: 1244372 - DNA, 4001 bp, Homo sapiens
agagtgtaaactaagacaactactttttttttggtagagacaagtcctgctatgttgcccagggtggtctcaaactcctgggcacaagctatcctcccttatgcctcccaaagcactaggattacaggcacaagccaccacatccagcctgtgatttctttttatgctttctttgtgtatctaaattttctacaagtagcatgtgttgcttttataataaaagaggaagtattcttgccactgagcttaagaaaaagaaaaaaaaagagaaaagggatgctaaaaaaaaataaagaacacatgattttccttcaaattcctagtgattgtctctctctgtcgcccaggctggagtgcagtggtgggatctcggctcactgcaacctccacctcccaggttcaagcaattctcctgtctcagccttccgagtagctgggactacaagcacccaccaccatgcccggctaatttttgtatttttagtagagacggggtttcaccatgttggtctgactggtctcgaactcctgacttcaggtgatccgcccgccttggcctcccaaagtgttgggattacaggcgtgagccaccgcacccggcctctcttagactttcaagcatcctttcatctgagtggcttcaaagagccggactactagatccacagaccacgttcctcctatctccactcgtggagaaggccggcataatgatcaccataagcttggagtcagagatgtgattcccagatctgccaccctcctatatatttagtaattacaagaagttagctaatttccttgagcttcgcagtctccttgaataaaatggaaacaagaatgccttccttacaagttagagtaaggcctttagagaatgagataatgcttgcaaagagcttagtacagtgcctggcccaaagcagatgcccagaaacatgcggctataattgcaatgatctttcggttgctgggctccagattccacttttcagaacttcagtttcactatgaggaaggggtgctgcctccctaatttggctagataagccttctccacagggcaaacccctgactcaatttcatgtttgaattcccagactgctaccgaaaccttcccttctgaagttctgttgcctcctgtccactacagggctgagcactcacgctctaatccgatcctcgtggtaccagatgtcttggatgggagctttggctttgccatatcgcactcgaggcctttggaagacgggctccctcagcgggggaaaggcgtcatatacgtcaaaccacaggggcttctccttcagcaccccggcccgaaccaggtcccgagtccttagggagggaacagaacgaaactgggtcacttgcagtagcctgccaaagcccctgaatcagtctagcacagtttgggacattaaaggtattatgcggtctgcaacacagaacggggaaggactgctccccacctacagagaagatctgtccacatcccaaaccaaacttaacaacgctcaggagagttaaatccctctatcttcttttgtgcgtcccacccacgttcggtcacggaaaaatgcaaagagcggtcttgcatgacctgataaggaaggcccatcaggctcttcctcccttcctcttcctagagacctccactcggggagaggcagctgcaataatctttaacatgacacataaattcaaggagaggcatcctcaggcacaactattcggagccaggagaaaacatgagagggcctcacccagctcagcccccgcaccctgcaatacgcctcgccctgctcaggtccgctccaaggaagagcgtgaccggctgagaaccccagcctgggggaggcaccctcagcccaccacggctgggagcacacaccgagagaagatgctccctacggtttccagccggctgcctgccatgatctgcgcctggtaccgagcgtgactagctgctaccggaaccggaagcggctgctccaggtaaagggcgcataagttgctggccgagccaaggatcgctgggctttcaccgcagcccctgcgggagagcggcgcaggcagaagcaagtgataggccgaacgggcgcgctccgaggttacttgccaggttcaggcaggagcactcgatagccgagccaaaagggcaggagcgagccaaagccggacagaagtaataaatgaccgagctgtgggagggattcatcatgatggttgctttactctctctcgccttgttgagccaactcctctgaaaaggtggggccgcgcggaggagaagtagtggggcagagcaggggtgaagcgcagcctacagtcctaggggagccaacaaaggccgagatttgaggtcaccagctctaggcccaggctgagcctaatgttgtttagagtcacagactacgcagaagaaaaccaaggccggggaggggccgtcacttgcccagcgtcgtgctagatctcgggcctccgcctctggctgtgtagtgctccccactaagcccctcgtccccggagtgccacctgcatccacgctaactaggatgctggctgcaactcgtgtttcccgcggccggtgtcgcgggctacctcctccttggaactcgaaaagtgaaagtgtccggaacaaacagacgccgagagggaaacgaaaaaatctggagaaagtcatctctcagtgttaaactgtaaaaaaatataaactgtgtgtagcataccctttgacccagtaatcatatttcggggaaagaaccccttagaaattaaagcatcaattcatgaggatgtttgtgcaaggatcatcgttgcagcattgtttgtagtgggaaaaaaaatccatcagatgagaaatagctggaaaattattgttcatactttctttggaaccctatgcagctattaaaatgaatgagctagatccacatgtatttaccaaggttaaggtacatgacttatgtttaaatgaaaaacgaagttgcaaagaaacatgtttagtggaatctcaacgtgttagaaaaaaaaaaggaaaaagaaacacctctatatatgtttgtgtttgaggatagaaattctgcagaaggacacccaaggctgtgaacattggatatctcggagtgaaactgcaggcaggcaagggagaattttttcttcctttacacatgcttcagagtttgacttgtaaagagattgtattcatatttgaacttttaatccaatgaatgttttgaatcacacacaatgtctcctgggagcctagtcaagtcatcctagagtcctcccactctgaggctggtgaaggggaggacgggactgtttgatgagtagttactgcttgtgtgtgttatcttactgaatccacataccttcccataaggtagctattaacatcctcattatagatgagaaagcaaggcctcaggaagttacataacttgtctgataagcaactgatagagccagccttgggggggtggggcagccagggccctttccagtgcctcacaatgccgcctaagctatgcctaaagctcgaggctggtaggctcaagagtccagcagaacgccgctccccacccgccccccccacaacacacacacacacacacacacacacacacacacacacgcacgccagggatccagtgatttgaggcccagggctaacctgaggtggatttcactgctgcctccagaccctctggaacagagaagagagagcacagctctggccccaggccaggtgtaaaggctctagtatcccagccctcaggaggtctaaaagaccttgctctggggagagtaaacatgctcccagctaaatatagtcttcccaggcctcataacaactttctaattctgtcccagccagcaagcactatctgccagcccagattacaggcacacttctcttctcccaccaggaactgctactgtaggttagtgcagtcactgcagctaaagagttaaagggtttattccaagatcaa

SEQ ID NO: 1244373 - DNA, 4001 bp, Homo sapiens
agctcaagctatcctgcattaggctcccaaagtgctgagattacaggtgcaatcccactgcaccagctagaaagctatcaatcttgacccaactcccaagcaccacctatcttgtttcacatgtggagggccctgctttcttgccctggccattcattcacctggtagaaacggcctcccttgaggatgggtaccagcccaatcataggctcacagtttttcagtgcttgatggaagatggtgtaggggttgcgttcgatggttgcctgttcctctgcagaagcggcatggtacttctcaaactgcttccttttcacagcttccagagtctgcaaaagaatatggtggaagaggctgccccaggctccctaaagggtttacccagccaagctagtaccttgccctttactcccatcctctggttctgcgctggcaatgcagctcctctcacagcacatccaaaacaaagtttttaagtgcctccccctttgctagactaggacagaaagagtggattgagatttgtggcatggagggggtggggggtgaggtggggaatggcagttgttttattttttatttgttcctttttttttaattgtgtgtttacttccgaaacaccaaggaatggcagttgctgactcttacagggcttcattaaagcccgtacacatgcagggaagttaatctgaataatagatacatgaatccatttgctcttaagctacactgaaagtaccaagtacaaggctacggggtaggggggcaagaaagatgactgaggagggaagtgctgtttacctgaatcatgagggatctggccagtactttgtttcctcctatcatcatcatgttggtgaatttacttcaaagagaaaagcaacacgtttagctctccaaggctgtatcacagaatcctcaccagaaaccctccctgggatagtcccagtccatgtaacaagtgtttgtttccatctaacctgatgactgggtcttcaaacacagaacttgttttccctgctggagcagctttgatgagctgagtcttcttgagctcccgaacatatttctcctcctcagttagctcctccactggcttgcgataatattccttgtcaatcaagggatccttgaattcaggactatagcggctccatctcacctgagttagcctgggagggggggaaaggaggaggcaggcaaaagctgactccacaagcgagtaggtttgacttaacaataggcatgactgccaacgcgccgacgagggggagcggcgcggagaccgcgagctaaacctgagccacaacaattcaggcccttgtcccaagtaggaggacattccccaagcaggcgggtaaagtctcctcctggtcaagtgctaacggtaaggatgggcttggcgcctacacacccatcccaattcacaggcgatcccagatctgagctctttagctgaaccgcactttcagctccgcgttagaaccctagatcagccagactccttaggcgagaggtagtcactaaaccttcggattggcgcagggtcacgcagctaacttagaagcttgaatccagatactccggcccccagggcaatgctctctctaggggcccacgcggcctgcctgtggcccccttccttcctcgcagcgcccccccgccgctgctcgccaccctctcaccctggaagctgcaagacagcccgccgcacgcccaacgccaggcccgaccatcctcgggcaaccttcactgcgggggcagccatcttggctggccacgaggaccccacaaggactgccctcggcgcgcctgagcgagtgacgggaaacgggtgaaaaagactcctcagggtcctaaatctgcgtttctctccactgatctggacgttagagtttttcactccggggtccaaaggggagcgccaaaaggaaacccttgccctccctgtatccgtcgcagtctggcgcggccctcggtgacggcactcactcctctcaggaccccatgcaggccccgccccgtctcagctcgtgcagactctcgcgagttttgaagccgcggggccgggcggctgcaatatggcggaggcggaaggggaaagcctggagtcctggctcagtgagtagccgcggccgtttctgcctgccctcgagccgctgggctgcccctgtcttcacccccacgtcccctccccgggctccacggcgtcgcctcttggcagcccacgcccggtctcgccctcgccgcgagcagcctgcgatcacgccccttccctatcagggcgccgggccccagtccggcccccgcttccctcgctgcggcgcgtcctcttgctctggcgcgcggcggcgtgaactcgggctcctgtcgggcaccgcaggctcggggaaaggcgacagccaagatcttcgggctgacatgcttcggcgctttggggagattgtggtggggtcgccgcccggcggtgacaccaggaacccagcgccccaatccctgactaagggagaagcttcggattggggctgagtctccggtagtggtgggtgctgccgactgcgttcagtcgcctggcagcttcagaattgtgaccatgtgttggagaagtgacggcttcgctcaggcagaatgcttgaagtgagaataatattccaaagagagcgatgatagagaacagagagctctacctttttcctgcagtgaccacagaagcatggtgaaatcggtgtcgggaattccccccccacacacatacatatacccccttgaatatcctaacgagtcagtgttgatagcctattctgagtaaggctgaggagcacagtctgaagctgtagttatagaagcgtattgctgtcattgcactgtgaattacagtgctacgaaggaaatgtgtgttaacctggttagcaggtagtactctgcctgagggttaataagtgaactttcctgtaggctagacctggaagcctcctttaagtggagagagaaattggactggtaatgggataggtgagatacctagtattgccttgttctgaggtctcttatttagtactgcttccgggatcttggaggtgatagctatttcctcaaattgtctgatttttcctagtaagaaacccccttcaggaggttgagcttcagtttaaaggggagcatatcccaaaagagagaaaaagtaagatcacgtttgcaaaatctgcagttgcaggcaggtcataaggcttctttatatatggaagtgttctccaaggagctcaaagtactttacagatattcattaaattagtttaccaagtattctagcaaagcaggcactactgccataatttcacaaaaagaggacatcctgactccagtcaaaccacttgcccagaaatgcccaacttgctataaccagagtggaattagtttgctttgaaggtattaatatgggtattgaataatttaaatgacctaagctgagtttaataggctacatttagagttacattttgtttttgttacttgtttttgagacagagtctcgcgcgctgttgtctaggctggagtgcaggggtgcgatcatagctcactgcagccttgaacccctgtgctcaaataagtcttctacctcagcctcctgagtagctgggactataggcacacgccaccatgcttggctaattcttttgatttttagtagagatgaggtcttgctgtgttgcccaggatggtctcaaactcgagttcaagtgatcctcccacctttcccttacaaagcgctgggattacacacgtgagctaccgcacccagcctagagtcacattatgaaatgagagggacacacttggtgggggggagtcacatggtatctgtagagacataagcttcacagttgttacgacttaatgtgaactgtaccagttgaacaaaccagcagttggggttcagcatcgtctcagtcagcgtccttgtcaccccacgtttgcctgaattgttgcagaagcctctgctt

SEQ ID NO: 1244374 - DNA, 4001 bp, Homo sapiens
ccttggcagcctctgaagctgcaatgggacaggctctaaaaagaaaaccccaaagccagccacagcagcaaacttttgagccaactcgctagctcagtttaaaactacccagttctagcacagaagcaaaagaaggcactgtccctttaaatggggctgtcaatgcccagatcgttcctgaaaaggggcgaacaacaacaacaaaaagcaacctaccgtcttggaatctaactcatggtggggctgacctaatactttatctacacttgctgggtctgcgaacgtgacgaaaccgaagcctctgaaaggagacaaagagggagaaaaacaaacaagaaaatgtgacaccattgaaagcaaccaggagtgagacctaaggctgaatgaggagcaaaagttgccccccacgcacccccacctcccactcccctcctccaattcccctcctgcctacagccctccacctcgcaagaaaaaacatcaaggttaacgggggaagtggaacgggggcagggagggtggaggtaacttggaaaatgctggtgcctccactctttggccacctcagtttcctctcctcctccccttccctttcttaacgctttgttttattccgaagaaagcccggcacttagaagagatttaccaccatctttctaagagggatcttaagagtttggggagctgggagtgtgggggaaacacacattaagatcaaaagaaaaaaaaaaactatgcgaaagtaaatgaagctgaatgtcattttaaacagagaaaaagaagcgacgggaaaatgacttaaaagcagagagatgggtatctctgtatccagagttcagctccaattaacaataacctctggggttactagggggcggtgggggtggtatagagcgccgttcgagatcagccacgcgcctgagccccattctaatccgcttagctacttccgaagacacctccaaaaataaaacttaaactttgttctaaaataaagacaaaatccagaagggaatggtttacctggagcgtttcgtagtgggatctctcatgaccatacattctctaatttctccaaatttgctaaaatagtctctaaggctatctgtagagagagaaagagagagatgggggggggagagaaggtgtggaaaaaaaaagcaatgcaaattttgatcaaggacaaaatccaaaagtagttttctgttgttattctgttttgtttttgcattttttgcacacgcgggggaaattcggcaacagaggtcgcatagagggctcagaaaggatttgctatttaaaaaaaataaccttgcacaggagaagtggggagccaatggcgggggggggggggctcctacaccgggataacaaagagcaataaagaagccaagaagggggggacccaggcgtccccccctccctcccttacctggtgaggtctgccagctcagtccaccgataaacattttactagagggagaaaacataacagaagtgagcaccgatgtcagatcggccattttgacgtgtaacttacaaaagctaaaaggaaagcgggggggagcgagcgagcgagagccgggaggtggggtgggggagaaggtgacggcgaaatgcaatccaaaggtgtgtaacttccacggggggggcgcgcgggagaggcgggggggcgcgggagatgcccggctccgcgcaccgccgtccccgccgctgcaaggagagcgagcccaaggcggcgcggtgggcagcggctggaaacttacccggggtcgtgctgggagtcgttggcgctgcccgaggtgccttggctcccatttgcctccatatctgagcccccccgcccccccacccccaaaaaaccaagccccacagcgatcggagcggagcggcggccggctccgagccccgagatctccgctccctcctccccctcctcctcccccccgcccgggctcctccgaatctctctgcgagcggcggagccggggcagcggcgagagccgtcacacgtgggctcggcttagctcagccccgctgcctcgcacacccccccgtccccgcccccccggcccatccccacctctccccctcctcctccccacccccatctcctcctcctcctccccctcctccccggcgcacgtggggcggagttctagaacgtcgtgtaaccaatgccggtgacgtcacgcacccccgtgcggcccccgcctgcccgcgcgcgcacactcggccccccacggccggacccacaagggtggcgcgcgaaccccgcgggcggaggggaccccgcctccgggccggcagggcgcagggcgagggggagcgcaccccgacttccctggatcacatgggctgcggggggcgggtggatcgggggaggggaggcgcggggagcttgctgcggctcctcacccggacctgggagaagacgccccccaccctctctagttcgccctctccattcaagtttgccggcccctgccgccgagatccgggaatggcaccagccgcccgccctccgctgtgccctgtttccagccaccgctcagaaatttaggtcaaggacgtcgggagcaaacccacaccctggcgctcctttggcggcccccgagacgccccaggatcggggggcttcaggatggcggagaccctcctgcacaaacaccagccacaagttttattttccttttgcgctggaagttctctctggctctggctccacaccggcacgtcttgcgcggttccccgcccttccccagtagaggtaccaatccgtgcccgggaaaggttattttggaactttgagaaactgacgcgattccagtggcgagaaagtgccgaagaaagggtttccgcgttaatcatacagtgttttaaaaatgtaataagataggttataggagtcaaggtcacatgattgaggttcaaagcaaatgtttgtatataacgagaagtacttttggggtgtctctgggatggatgggaagggtggttatttcaggaaacccctgtgtaatccgttcgttatatattttatttctcacccagcctttgtatgccaggatagtaaagtgcatgatactgaaatagcccaagacccctcacgacctgcagaggtagctagggtggcagaaggcttcagaatcactcccaccttagcagcagtagtattgtgcagcacgggttctggcatacagtaggtgcttaataaatgcggtttcataccttcatgcactgaaaactccaaaaagacaatgtctgtagccttccaaaggcatcgcatgaaagtttctccggcagattccagactgcccaaattcgggctggtttcaatttatggggcatttgaaacaatacggatacaattacccatattgttttaaatctgtatcgttttaaattgttgcaataaactgagttaatatggcatgaggggcaacataaagttgtggttcatcaaatactgagattaatgttaagcatgaattgatgcccaattaacacttttccattaattttcataggattaggagacaaaggaatacactcaacaccaaaactgaaccaaatccactgtgggctttggaaaaatggaatattgggaaaatctcaacaccagccatagccttgagtgaccagaccctcagtctccctgttccctaaattgcagtaattcctccttgacaggattgatgtggtgaaggtgagaggctgaagtgaaccaatgttgtaaaagttcctttttcactgtaaacctgagtcgtgtttattatcaatcactactcaatataatcatattgagaaggtgctctaaggctttaaaccacaaacccaaacatttcctgtcactccaagctccttcccaaatcatctggggtctcatgtgttgaacagccagttgttacaatgattgtttattatgattgattattctaaacaaaatgcagacaacagagctaattgtattgtgtttgggatttttacagtagaaccac

SEQ ID NO: 1244375 - DNA, 4001 bp, Homo sapiens
tgtgatgtataaaagtacccatactcaaatgaaaggatctgagaaagaaaaggaaggaaaaaaaaatcactttgaaacccccaggccttatcagccttagatttcatgccatctggagtcaccccagtggatgcccagctcagctccgccagcgtccccttcccttcccaaagcacattccaaatcccaagtgccccaagagaaacctgttgcctggacctgtaattagcgccctctcccctccttcccactgctgtcccccttggccacaaagcaggctgtgccttctcaaagctgatccccacagccacagttggtaacgcgtgctgtgcttggctgacaaagaaaagttgcatttgctctctggtggagtttctctgcacagtccccaggccgggaaggcagactctccaggagccgaaccctctcctccccaagcctaaccttggcagcctctgaagctgcaatgggacaggctctaaaaagaaaaccccaaagccagccacagcagcaaacttttgagccaactcgctagctcagtttaaaactacccagttctagcacagaagcaaaagaaggcactgtccctttaaatggggctgtcaatgcccagatcgttcctgaaaaggggcgaacaacaacaacaaaaagcaacctaccgtcttggaatctaactcatggtggggctgacctaatactttatctacacttgctgggtctgcgaacgtgacgaaaccgaagcctctgaaaggagacaaagagggagaaaaacaaacaagaaaatgtgacaccattgaaagcaaccaggagtgagacctaaggctgaatgaggagcaaaagttgccccccacgcacccccacctcccactcccctcctccaattcccctcctgcctacagccctccacctcgcaagaaaaaacatcaaggttaacgggggaagtggaacgggggcagggagggtggaggtaacttggaaaatgctggtgcctccactctttggccacctcagtttcctctcctcctccccttccctttcttaacgctttgttttattccgaagaaagcccggcacttagaagagatttaccaccatctttctaagagggatcttaagagtttggggagctgggagtgtgggggaaacacacattaagatcaaaagaaaaaaaaaaactatgcgaaagtaaatgaagctgaatgtcattttaaacagagaaaaagaagcgacgggaaaatgacttaaaagcagagagatgggtatctctgtatccagagttcagctccaattaacaataacctctggggttactagggggcggtgggggtggtatagagcgccgttcgagatcagccacgcgcctgagccccattctaatccgcttagctacttccgaagacacctccaaaaataaaacttaaactttgttctaaaataaagacaaaatccagaagggaatggtttacctggagcgtttcgtagtgggatctctcatgaccatacattctctaatttctccaaatttgctaaaatagtctctaaggctatctgtagagagagaaagagagagatgggggggggagagaaggtgtggaaaaaaaaagcaatgcaaattttgatcaaggacaaaatccaaaagtagttttctgttgttattctgttttgtttttgcattttttgcacacgcgggggaaattcggcaacagaggtcgcatagagggctcagaaaggatttgctatttaaaaaaaataaccttgcacaggagaagtggggagccaatggcgggggggggggggctcctacaccgggataacaaagagcaataaagaagccaagaagggggggacccaggcgtccccccctccctcccttacctggtgaggtctgccagctcagtccaccgataaacattttactagagggagaaaacataacagaagtgagcaccgatgtcagatcggccattttgacgtgtaacttacaaaagctaaaaggaaagcgggggggagcgagcgagcgagagccgggaggtggggtgggggagaaggtgacggcgaaatgcaatccaaaggtgtgtaacttccacggggggggcgcgcgggagaggcgggggggcgcgggagatgcccggctccgcgcaccgccgtccccgccgctgcaaggagagcgagcccaaggcggcgcggtgggcagcggctggaaacttacccggggtcgtgctgggagtcgttggcgctgcccgaggtgccttggctcccatttgcctccatatctgagcccccccgcccccccacccccaaaaaaccaagccccacagcgatcggagcggagcggcggccggctccgagccccgagatctccgctccctcctccccctcctcctcccccccgcccgggctcctccgaatctctctgcgagcggcggagccggggcagcggcgagagccgtcacacgtgggctcggcttagctcagccccgctgcctcgcacacccccccgtccccgcccccccggcccatccccacctctccccctcctcctccccacccccatctcctcctcctcctccccctcctccccggcgcacgtggggcggagttctagaacgtcgtgtaaccaatgccggtgacgtcacgcacccccgtgcggcccccgcctgcccgcgcgcgcacactcggccccccacggccggacccacaagggtggcgcgcgaaccccgcgggcggaggggaccccgcctccgggccggcagggcgcagggcgagggggagcgcaccccgacttccctggatcacatgggctgcggggggcgggtggatcgggggaggggaggcgcggggagcttgctgcggctcctcacccggacctgggagaagacgccccccaccctctctagttcgccctctccattcaagtttgccggcccctgccgccgagatccgggaatggcaccagccgcccgccctccgctgtgccctgtttccagccaccgctcagaaatttaggtcaaggacgtcgggagcaaacccacaccctggcgctcctttggcggcccccgagacgccccaggatcggggggcttcaggatggcggagaccctcctgcacaaacaccagccacaagttttattttccttttgcgctggaagttctctctggctctggctccacaccggcacgtcttgcgcggttccccgcccttccccagtagaggtaccaatccgtgcccgggaaaggttattttggaactttgagaaactgacgcgattccagtggcgagaaagtgccgaagaaagggtttccgcgttaatcatacagtgttttaaaaatgtaataagataggttataggagtcaaggtcacatgattgaggttcaaagcaaatgtttgtatataacgagaagtacttttggggtgtctctgggatggatgggaagggtggttatttcaggaaacccctgtgtaatccgttcgttatatattttatttctcacccagcctttgtatgccaggatagtaaagtgcatgatactgaaatagcccaagacccctcacgacctgcagaggtagctagggtggcagaaggcttcagaatcactcccaccttagcagcagtagtattgtgcagcacgggttctggcatacagtaggtgcttaataaatgcggtttcataccttcatgcactgaaaactccaaaaagacaatgtctgtagccttccaaaggcatcgcatgaaagtttctccggcagattccagactgcccaaattcgggctggtttcaatttatggggcatttgaaacaatacggatacaattacccatattgttttaaatctgtatcgttttaaattgttgcaataaactgagttaatatggcatgaggggcaacataaagttgtggttcatcaaatactgagattaatgttaagcatgaattgatgcccaattaacacttttccattaattttcataggattaggagacaaaggaatacactcaac

SEQ ID NO: 1244376 - DNA, 4001 bp, Homo sapiens
gaatgcattctccaataaaacagccacccgatgagattcatttggaaagcaaacaaaatgaatagccgcttgctcccttgctcagctcttagcgcacacgacgccagagagaaagaggagagagggagagatgaggacggcggggagggagggagagagagagagagagaaagggaaagagacagggagggaggaagagggagggagagagggagagagagactgctgcagcctgaacacaacaattgtagaaaccatgtttatttttaggcagctgtaaggtatgctagcacagtaataccccccaccccagcttccctcatatctgaaggaatatgttttaacgcagagatgcccttaactactgctgcagtaaaaacaagcctgtgtcgtccaagctcctcagaagtaaagaaataataaacgactttcctactccctaagattctaaaataaggatggggaggtctatttaatacatttaataagcttactttcccctgatgccctaaaatcttccagtttcaaacaccatgcttataaaagggacctggtcagtgggtcatgtattagaactcaggttcctattaaaagctgtctgaaatcaaaggcagtgattctcttaatatcatttaagaaaactaaaataggattccacgtaaatcacctctacccctgtgcccactaaaaggcctactgccctcctatctaaagatgctgcagcagtggtgaaagcaacagctgcttgctacagccctctcctccaccgtgcatttctaacgcaatagctctttaatttaacccttccataaggacacaacacctacaccccaccctttcatttttaacccctcacagatcacgtctttttccactaaacgtctttcccacacgtctggggctgtcattttaaattaaccctttggcacctgaaacccctccccctccccctgagaggttgccctttaacccttccctccaacccaacgtgtctgtgagcctggctcccagagacccagcgcctaagatactcctttgccggtggccaacctcctttacccctaacccgggggtgccttaacctcctacagcccccttcccccgagcatgcgcacaactcgctcctcggcccgaatgcagattaacccctcccgtaccgtgtctctctctgacttcagctcctcgatctccttttccttggcctgcagctgctgctgctgctgttcgatgaggtccaattgcagcagaaggatctgtttgaggcaggcggcctgactggaggctcccgagccgccaccacccccgagagggctcttcctcatactcttccatctgccctcgctggccgccagggtcccggcggtggcggtgggcgcgaggggtggcggcccgggcagaggtagtggtgggggtcccgccgggtccgaggcggtggcagcgggggaggccgccccacccttgtccccagcccagggcgtaggctctttggccgccgccacgagagagcccgtctgaatgggcagcaccgcctgatacttgggccgggggctgcagccggctccggctgcggcaggctcccccccaatgccggcttgcttggtggccgggggcggacagggcaagggcaccgaaccgccccagctctcttcctgctgcccgggggccgccccggccgggagtaacaagccccggcccttgccgccgcagccggccggggaaggcgcggggctcccgccctgggaggaggccagcgggggccccggctccttgagcttacggtgccgggggaggaagtgggcttcggccgccccaggctcgtcctcgggcccgcccagcgccgcagcccgctcgtagtccagtcgctgctcaggattgccgccggcaggggccgcggccgccttgaacaccgcggatctcatggtcatagtggtccggagcagcgccgggcaccgaggcggaggagggggtggggaaggggcgaggtgcggggggtcgaggactgaggggggggaggggagtttggcgggctcgcctcagcagcgcggcagcaggcctccgctagcgcggctcctccggggcccgggcgccatcccgccggcgtgcggagacgtggaggccgcggctgaggcccgccgccggcccatgggggcctcgccgccgcctctgctgccgccgccgccgccttcgcctcagaggcaggagctcgcacccagccgcccccgagctcatccccggagctcgcttcggccccccctggcccggccgggcccgcctcgtctccccaccccgcacccccccttccccgccccggccccccgccccggagctcgcctcaaccgccccgagcctccatttcccccccctcctcctcaggagggggtggagggctgggtccgcccaaagccctcctactccgggagagggggtctgtcgcctctcccgggggtctccgcggctcggggtccccctcccccacagtcacccccggcgcctcagcgtttccctttaaaaaaacggagccgctcgtagccgccaccgccgcagccgccgccaaccggaggacgcatgcgcggggaggggagcgggcgggagtgcaccgggagccgagaggagggaggcgggccgcgctattgtgaaaggggccgccgccgcctcgaggggggcagggaggggaccgcgggggccgggggccggcgaggggaggccggggctgaggggcgaggaccgaggagcgcgcggaggagcggggtgaaggtgggctgccgagggaggggcgagccgggggagggtctggagggggaagaagggcgagggcggccgcgggaagaaggggaaagcggaggctccccgggaaaaaagcgcgagagaatggagttgagaggaaagaaggaggatacaggcggccaatgtgtggcctacgtgggagcgccccgagcgctccacgtccccggcctgcgccgggcggccccttccccgggcatcttggcaacgcgcctggcccaagccggaggggccccgcggccccgcacgcctcctggaccagtcaggatccaggctcctctttgagcccgcgggtgtttcatgggggtagaagtctaacccctccaccccctctcctccccagcagtcccacgcgggtatgggagagaatgaagttctttgtctctaagggattcaaaccagaaacggagggacctctggttcccagagggaggaaaatccatgatgtctgctgcccagggagctattgccaccgcctccttgggatgaagtattgccagctaccaacagttccttcccaacggccatcttccagccttcttaaacgactcctagcatcttcgggaggctcctgaaggactgaagcaaaggaaatctctgaagggatttagtccttgaaagggagtagggatacttagggtgttctgtgttgagcgcttcttcctatctctccagcttcatgtatgtgtgtctttatgtccaagcaattgagccaacaagtcctcagaattccttgtgaaaaaaacgttttttttttttgagacggattctcactctgtcgcccaggctggagtgcaatggtgaaattcagctcactgcaacctccgcctccggggttcaagcgattctcctgcctcagcctcccgagtagctgggattacagtcacgcgccaccacgcccagctaattttgtatttttagtagagacaggatttctccttggtcaggctggtctggaactcccgacttcaggtgatccgcccgcctcggcctcccaaagtggtgggattacaggtgtgagccaccgtgcccagccctgaaatagtcttaattgcttgtttttcttttttgtctgaggtgtgctttttaaaatctctatggagatggagaagactgacattctctggcctgatgtgaaaacctctcattaaaactgtgtctgtgctttgtgggctgaaagcatgaaacactggaaattttaaacaaacgtatgtgaatgt

SEQ ID NO: 1244377 - DNA, 4001 bp, Homo sapiens
tggtctgggccagggcctacagctctctaggcctttcccatctcactgcctcctcctagctcttaggagttaagggcttccctggacttggggtgagagaagggctgttacagttaatggaaaattaataggatcattgtaaaccacctctggtgatattctgggcaccctgaagatgctatcctgatagatattcaatcagctgtcacctgtagtggcttaacagcagcaccctggaactagagaagccccacagttttggtggagtcactcctgatatagcatccacaatattcaaaggacccaccagaagtccaaagatcttgagataaagaaggcccagcttttcagaccagaacacagagattctaccggggacccaagaaaagcaagaagagggctgttatgaagggttaatagaaccagtggtgggtagggagtaggaggaaagtgtggggcctagcacatgcagaaaatgatttctagaagcttccagtcccagtgctgtatactggctgatgttttgcaatctaaagaaaccctaatttatctccagggcagatgaacatgtttaggagctgaacagggtagcctggagctcaaggtctaggacaggtggggcagcttcacagagaaagacacatggattacagaaaacacaatggcctgaggaaagacagggtactcaccattctaccgtggcaagggtactggctgcctgcttctcactgtaaggagacagaggaacataaaagtaaaggaccccattaacattaccatagaatcaacaaatgacacacatctacccctgaccttctctacaactcttattcttctccctcacagagactccagtctctccacaagtcaccatgccagagagaggcaatgggagctacatgaggagaaagcaacaagtgatcctgcagggcatgaagtcagccacgaagttctgaaacaggaatgagtgtcatccaagattattcagcagaattcaggagtcctgatttccagacgcagagggagaacacttctttctcagggagcagaactgccaactatgaagagacacaggctgcccaactggggctcattttaggccctgactcttggggtgaagtggcagtagttgaaggagcatgaatccacaggaatgttttgccagtctctgagtctgggagtagtacccacctgacctgtttactgggggcagagtccagagtgggacaagagggaggggaccacaacctgtgatcagagggcagcagggctgcacaggtcctcctgagtgtatttgacaccaagtggggtggaggttatggagaggaggccacacaacagggacagaatcaggccaatccaggccttggagtcagcatctgtccaatgagcccaagtaacagggatttcaggatagggcctcctaggctcacttagggagccaggcctaggtttcactgacactttccttcatgcctgctttcctcaggcagtgcagcagagccctgcgggaggctgcggggataaaagcctccatctgtggtactgcccacctccctgttcacagtatcctcttccctaggccattctccctcatgggggaaccggcaagaggcaagccagaggtgctgcctcaccgcccactggcagcagccccagggaaggaagggagggaaggagggacaaggatcaggcctgggaggcccagggttttcagacctaggggatctggtcccagggggcgggccaggttggcaggggagcccaggtgcccaggttctaggggcggagcctaaagactgggaggcggagccccaaatgacagaaggcgggactcaggaaagccggtgggggccagggcggagccgggcaagacgcggtcgttgcggttcccaggcttgcagtgcagggggcacggtgactcacccaggcggcgtccgcccgaccctctgaggccgcgctcttgccacttccgtctcccgcagctgctgaggccgcgcagtcccgaccccaccacagtgcccctctcctgaaccaatcatatctctagcctgtacccgccctggccaatggccacgccaagtcccgccctgcccccatcacgcagccaccgccctcactctcgaccccactcattggtcgagtcgggcaaacgccctcccagcctttagccaatcggatgcctaaagacgagactatacctggaggaaggaggcgcggcgccggaggggagacgcgaccaatgggaaatcacagcgcgtccttgcggcagccaataggagagcagtaaagagggggctgctggccactgctctggggaccggaagtggaggcggctcgtcgcctactggtagcgcaattagaggcgggcattgtaggttacatgcctaaagccacttccggtgatggccccgcccaggaggtacttctgaaacaggtccccagtggcacctcagtttatccattcccgttttggtttcgcagctgtcatccggtcccaacgccagaataggagaaaaacctgcaggctaagagagaagggagggctgggcctgaggttcagtcttggtcatctccgactggcggcgctaggatttcccccttcctgtgtcttgatgggttcctccaacactcactttgtatcgataaacgaccctgcagttcttcacgacctgcattgcgctggcagtcctgagtgaagaactctcctctcatcccagagatgggaaacctggatctgagactgccagctagctgcggcctcctagtctgtaaagcgaagggagaccaggacgctcccaaggacccggcttatcgcccctccctttccttcccggggacccagaacagaccacaagacggagggtggccgctggaggtcgccgtggccccgcgataccaccaaccgacagaaatggagaacagttgattcagattcagctgatattctcaggtctggagcgggcctgagcgctttaattagcccggggctaatgtcctcacccatctttgtttatagaacgttgaaactccagtactgttggtaagttccaggaagacaggaactttgcactacttgaactccagggtctagaacagcctgcaatctagcagatgctgtaaattttttaattaaatactgaactcctgtaggacggtgattgtgtttttattcattcccagcacttactatagtgtttggtgattacaatggctgcagcatttgttcaaagctctatcacaggctttctacagtgtagagcttaacctgcctatcccttttcccagatcaggggaaacagaaagtcaggaggttgcacgcagttaataccttgtgttttcccaagggcaggtatcaaatacaaaactgcgtccgccgcagctggaatacgcacaggcatcaaaatggggccttttgggccgggcgcggtggctcatgcctgtaatcccagcaccttggggggccgaggcgggcggatctcaaggtcaggagatcgaggtcatcctggctaacacggtgaaaccccgtctctactaaaaatacaaaaaattagtcgggcgtggtggcgggcgcctgtagtcccagctacggagtcttgtagtcccagctacggagcttgcagtgagccgagatagcgccgttgcactccagcctgggcgacagagcgagactccgcctcaaaaaaaaaaagggcaggggggacttttggacagtcctttaatattggggaagtgccccaaatttctttttctttttatttttcttttttttttttgagacggagtctcgccctgtcacccaggctggagtgcagtggcgccatctcagctcacttcaagctccgcctcccgggttcagccattctcctgcctcagcctcccgagtagctgggactacaggcgcccgccaccacgcccggctattttgtatttttagtagagacagggtttcactttctccttagccaggagaagtgccccaaatttctaatcccttaagc

SEQ ID NO: 1244378 - DNA, 4001 bp, Homo sapiens
ttgagtttgatgctcatcctgatcataggatagagtagacagctaggctggatgtagccagaatgaatagaaggcctaagttaagattaactagggggttaggtatagggaggggagttcatagtagaagggcaatagagagggctaaggttggggcagtgatgtagagggtaacagttgacgttgagggttttaaggattctttggtaaagagttttatggcatcggcaaaaggttgtaatagtccataggggcctacaatattgggccctttgcgtagttgcatgtagcctaggatttttcattcagttagcatgaagaatgccatggcgattaggataggtacaataagaagtagaaggttagttatggacatgttgttaagaagaggggttgaacctctggttgtaaagttttaaattttatgcaattgctggggtctgccatcttaacaaaccctgttcttgggtgggtgtgggtacagtaaaatgctgagataatatcatctatggggcaggggcactttatgaagtgggccccatttctcttatcctttcgtactggaagaaatgtagaatagatagaaaccaacctggattactccggtctgaactcagatcacataggactctaatcgttgaacaaacgaacctttaatagcggctgcaccattgggatgtcctgatccaacatcgaggtcgttaatgctactgtcgatgtggaccctagaataggattgtactgttatcactagggtaacttgttccgttggtcaaattattgggtcaattgtatgtggatattcgccttgactggtatagtctcagcatatgttgctcggaggttaggttatactccgaggtcgccccaaccgaaatgtttaacgcaggtctggtagtttagggcctgcgggcctatttggtcttgtttgcattcataaattaaagctccttagggtcttctcgtcttgttgtattatgtccgcctcttcacgggcaggtcaatttcactggttgaaagtaagagacagctgaaccctcgtggagccattcagacaagtccctatttaaggaacaagtgattatgctacctttacacggttagggtaccgcagccattaaacatatgtcactgggcaggtggtgcctctagtactggtaatgctagaggtgatgtttttgataaacaggaggggtaagattcgctgagttccttttactttttttaacctttccttgtaagcatgcctgtgttgggttaacagtgtgggtaataatggtttcattgattatttatagatattgggctgttaattgtcagtgaagtattttggtctgatgtaggcttatgcggaggagaatgtttgcatgtcacttatactaacattatttcttctatgaaatgatagattggtccaatgtgatgtgaggagttcagttatgtgtttggaattttttgggtggttgggtgttgagcttgaacgccttcttaattgatcgcttcttctaggccaactttggaagttatattttttactctctctacaaggttttttcctagtgtctaaagagctgtccctctttagactaacagttaaatttacaaaggcattagctggttctgtagataaatttaaagttgaactaagattctatcttggacaaccagctatcaccaggctcggtaggcttgtcacctctacctatgaatcttcccactattttgctacatagatgggtgtgctctttcagctgttcttaggtagctcgtctggtttcgggggtcttggctttggttctctttgtaaagttatttctagttaattcattatgcagaaggtataggggtttgtccttgctactttatgcttggttatgttttttcatctttccatcgcggtattatgtctattgtgccgagatatcatttctatcgcctatactttatttgggtaaatgttttagttgaggttatttggtagtagaattagttgggtttggggctagaattagctcagggtggtcaaattaaattgaaatctcccaggtgtaagcagggtgctttatgttaagctacaccttggtttatccaacttatctcctctatataaatgcataggggttttagttagatagtccttgaaatatacttgaggagggtgatgggtggtgtgtgcgtgctttatggccctattcaattaagcactctgttcttaatttactactaaatcctccttggaccctcaggtttcataagggttattgtagaattttctggggtagaaaatgtagcccatttcttgccacctcataggctacaccttgacctaacatttttatgtagatacttgtgcttactttgtggcctttgtcagggtttgctgaagatggcggtatatgggttgagcaagaggtggtgaggtgaattggggtttatcgattatagaacaggctcctctagagggatgtgaagcaccgccaggtcctttgagttttaagctgttgctcctagtgttctggcgagcagttttgttgatttaactgttgaagtttagggctgagcatagtggggtatctaatcccagtttgaatcttcgctattgtgtattcagaaatattaaagccactttcgtagtttgttttatatcaactagggttttctacaacttaggtgaaatttagctttattgagggataatgtaaaacattctttacgccagtctctattagcttgggttcatcgtatgaccgtggtggctggcatgaaattaaccaaccctaaagttagtatagctcagttaaactttcgtttattgctaaaggtttatcactgctgtctcccgtgggggtgtggctaggcaaagtgttttgagctgcactaatgcgtgcttgatacttactccttttgattgtagtgatttagagggttatttcaccagggtggcgatgcttgcttgtgtaatcttactaagagttaatagaaaggctaggaccaaacctatttgtctatggggcagtgtaggcccatctagatattttcagtgtcttgctttgggtcattaagctacatagactgtgattgcacagtgtaagcaaggctaggggatgggcatacaagcaatgggtaggggggaaagccttgcctttggggttgggttagtttagggtgttggtttagtagtggtcgggcatgcgttgaatgggatggctgaaaaagggataactaaatttgtagagtctgtgaagtgaggctaagagggaaaaagacgtgttagttgaggggtgactgttaaaaatgcgtacagcctaaagataaaaatttgggctctggttgagttggattaaggctttttgtttttggggtttggcaaagatgtcttttcctgggttggtgaggccaaagatgggggaaggggatttgcagaattttattgtagagttgatgtgaaaagcggccgtgggtgtgtttactgattgttatgtcctacaagcattaattaattaacaccttgtgataggtatgctcgcctgggatattgaatgtaggtgtgatcaataatgggatggggcaggaatcaaagacagacactgcgacatagggtgctctggggccagcgtttcacaatgctatcgcgtgcacaccccccagattaaaataccaaatgcatggagagctcccgtgactgattaatagggtaatagacccgtgatccatcgtgatgtcttatttaaggggaacgtgtggttggtcttgactttatggctgtgaggtaagaacaagatgccggatacagttcattatagctacccccaagtattatggacctggatcaagaagagtagcactcttctgcaggatattgatttcacagaggatggtgaacaacggaccactatctgagggggatatccgtattgacgaggacttgtttaactggaatgtgctatctaccatgagcgattagatgtactatgtactcaaggatatatagtgttttttgg

SEQ ID NO: 1244379 - DNA, 4001 bp, Homo sapiens
tgcattcacccagacagtggcaaattatgcgagtggccctatttaaacaccactgaacctattcctgtaggtaccatgtgctgagagccgaaagccttgtagaaagttctttaagcgctgtgccccacaggattgagctaagacagggcgccgctaaaggacattttgcacttcagtccagagcctggtgtgggtgataaagggccagccctgtaaggccaggactgactgagtgtgcatgacggctccagaactgtctaaaggcctctcctgctcccgcgagacctcgatggaggcaggaatcccaaatatgggagcaaacacaacagatcagcacatgtccaaaccgcgccccctccaccatcaccgcgtgaggtctggaagcccaccccaagcaagaacggcagggcctgcccctgctccaccccattaaatgtggctggttagaatcctctctaatgacacaattagtcacccacttgtcaagcaaagcgcctgctcagagggggtctggcgcacttactcagcaaagagaaatgcctctgagcacagcctggctgcctcctcctcccccgaagggcttctctccagggtaaaccattgtgtccagcacaggacagagtgggcacgcagacacgcaggcacgctgacaatgcgcatcccggctctcctcccttccaagaaaaggagctcaggggtaagaacaagggattacaatccgactcggagaccctggcggtggcctggaccggccaagcgtggtgaactccagggaacatgggcacacagtgtaggggctgggatgagtggatgagggaaatccgactcctctcagatatccacaggcaggacaaggtggccaaggccgagctgatggacagcatggcgggaggcctggggcagaggcagggagggccgctttggggtgctcactggtgctccaggagggctttatcctgcatcttcactccatccaggcccagcttacctacaacccgggggagtgggggtaggagggtgttagatgtgtagcttgaaaacgacaataaaaaggactgctgggatcgggtgccttttctttcagtcccagcccacgggcttcacaaaacgccacagcactgactctgaaatctggacttcaaattggctgaaaaagaaaagccagctttcctccctcgccccccgaaagtcctactttttaaacatcaagataactctcatggcaggcctggaaataagccacaggcacgtggatttgggaaccggtgggcgggaggggtcagaagtgggtgaggagcaaaattccaagccctggtcccgaggcctgggagccagcagctgcggagcacgccctgggctgggagaggccgaggggaggggagagcaaaacacctccaaacaaactccttcgggctcgcccctcgccacactttctgggggagggcggcgagtttgcggggctgcggcttagcatggcgggacctgcatttcctgcgggccgcgggttctgcgcttcctgggggcagcctgggctggaggccgcggccccgctccctggctcggcggggaacggcagcggcagccggagccccgggggtggggagggggccgcgagggccccggtgcgtacctgcctcgcctccaccgcctgctcctccgcctccgctggcgccgccgcgggatcccctggcccttcgggctcccccggtcccgcaggctccccgagctcccccagccccgcgggctctccaggctcctccggccccgcgggcgaggccgccggctcgggggcgcaggggcgggacggcgccggggccccggtggcctcggccgggggcgcgggttccgggggcgcgcgggcaggctccgggctcgcggccgccccacgccgcaccagtagccaggcgagcagaagggccagcgcggtggccagcgcaggcagcgcggccagtagctcggccggcgcctccatcgcgccgcggccgccgagtgcgggccagctgggaccccgagggagcccgccgcgccccgtcgccgcgcccggtcgccgcgccccgcctcggggcggagcccccatcgccgcgccccgcccccgccccctccggccccgggagggtgacgcacaggctgcgggcgggggtgttgagggggcagagccctgaccacctgggaggcacaggagggccaacccctgcccggcctgggcagccttgacgctttggggcacaatttagctcaggttcaatttgaaatactgtatgaggtgcccttaggttgtcatctttggccttagtacggcggttcgtcttagagcattttggaaatgtgggaatgcagagagacaagcaaacccgggaagcttcatggaaacggcagcctggattggcttgtaaagcaatcataatgccggattacgttcagccactgccgtttttataggcatgtcaggagttgcttttaatcctcagggttgccttaatgcactttcacagaggacatctccagatcccggccagtgaatgctcccttcggagctgaggccagcagccttcaacacaggcctccctgttaacagtaacatggctcccccgcccctagacctgaaattcagctgcaggtccttggtcaacgctattcctcttaccagactttcttctttgcacaattccagaatgcatgcagggtgggagggtacaatgaaggaaatgaaggctattgtttttgtttctccagatcctcccaggcctctgttgctgaacagtggattttgagataaacacgttgtaaccaaaaacatactttcctaccactccccacccactctttagttattttaaataaacacaggacgggcatgtcaggtatcacgccaaacataaggcctaatgttaaaaaaaacacggttccagtttttgctgaggatgcctttaatacttttttgggaatattacagtgcctgagctgatctgtgatataaaccagatattagatggagtgcttctttttaaatgaagatacacaaacgagacccctcagcaacagggagagctgaattctgctgcactgcacgatattaagcgggccatgcacttccttttagtggtggttgatgaaaagagcctataaactataaaatgtgaaataggctttatctacgggcgactagcttttaaccactgtggaagtttcagccagtgtatgggcctattttttttcttttgagatggagtcttattctgttgcccaggctggagtgcagtggcgcaatcgcggctcactgcaacctccacctcccgggttcaagcgaaactcccacctcagcctcctgagtagctgggattacaggcgcccaccaccatgcccggctaatttttttctgtttttagtagacagggtttcaccgtgttggccagactggtcttgaactcctgacctcaggcaatctgcctgcctcagcctcccaaagtgttgggattacaggcgtgagcctccgcgcccagccaattttttttttttttttttaaagagacagggtctttctttctttttttttttttaaagagacagggtctcactatgttgcccaggctggagtgcagtggctattcacaggcatgatcatagctttctgcagcctcgacatcctgggctcaagtgatcctcctgccttagcctcttgggcagctgggattacaggtgtgcatcaatgctcctggcccagggccttaattttgtgctccatcccattgttttaaagtgtaaatacatttttttaaagtcctgttctgctgacaaagtacattgttgactttcaaatgagtaagaaagaaaataaggacaaaacaatgccaaaaacacaactccaaatcatgttgctttatttaaaatgatgaacaagtttcacccaagtgaaagtttaaaataccaacccaatagcagatccacaggctttcatggcagaccccatggctagacggacgcagaactaggagactgctcag

SEQ ID NO: 1244380 - DNA, 4001 bp, Homo sapiens
atatttaaaaaaaaaaaaacaattggctgggtgcggtggctcacacctgtaatcccagcactttgggaggccaaggtgggcggatcacgaggtcaggagatcgagaccatcctggctaacacagtgaaaccccatctctactaaaaatacaaaaaattatccaggcgtggtgatgggcgcctgtagtcccagctactcaggaggctgaggcaggagaatggcgtgaacccgggaggcagagcttgcagtgagccaagatagtgccactgcactccagcctgggcaacagagcaagactctgtctcaaaaaaaaaaaaaattggctaagtgtagtggcacatgcctgtaatctcagttactggggaggctgaggtaggagaatcgcttgaacccaggagaccgaggttgccgtgagctgagattgcaccactgcactccagcctgggcaacggagtgagactccatctcaaaaaaaaaaaaaaaatgagttgggcgtggtggtgcacatccgtaatcccagctacttgggaggttgaggtgggaggactgcttaatcccaggaggttgagggtgcagtgaactgtgattatgccgtcacactccagcccgggcaacacaatgaaaccccatctccaaaagtaaatcaataaataataaaatgaggaaagtgcttccctgagttctgtgagccactccagcaaagtcacaaaactggaggaggggccatgggaacctcggttggccagagggcgggtgacacctgctacatttggtcatctgtcctcaggttccacacccaagtattcaacaaacctcagactgaaaatacaaaaaatactggcccggcgcggtgggtcacgcctgtaatcccagcacgttgagaggctgaggcaggcagatcacctgaggtcaggagtttgagaccagccaggccaacatggtgaaaccccatttctactaaaaatacaaaaattagccgggcgtggtggtgggtgcctgtagtcccagctacttgggaggctgaggcaggagaatcgcttgaacccggaaggcagaggttgcagtcagccgagatcgtgccactgcactgtagcctggcgacagagcaagactcagtctcgaaaagaagaaaaggccgggcgcggtggctcatgcctgtaatcccagcactttgggaggctgaggcgggcggatcacaaggtcaggagatcgagaccatcctggccaacgtggtgaaaccccgtctctactaaaaatacaaaaaattagccaggtgtggcagtgggcgctggtagtcccagctactcgggaggctgagacaggagaatggcgtgaacccgggaggcagagcttgcagtgagccgagatcgcgccactgcactccagcctgggcaacagagcaagactccgtctcaaaagaaaatacaaaaaataaataaataaaacaataaataaggccaggcgcagtggctcatgcctgtacatccagcactgttgggaggcggaggtgggtggatcacctgaagtcaggagtttgagaccagcctgaccaaccaacatggtgaaatcccgtctctactaaaaataacagaaattagccaggcctggtggtatgtgactgtaatcccagctactccagaggctgaggcaggagacttgcttgaacctgggaggcggagattgcagtgagccaagatcatgccactatacttcagcctgggtgacagagggagactccatctcaaaataatagtaataataatacaaataatacaaatttaaaaagcaatactatgtaacaactgtttacatagaatttacataccaggtgttataagtaatcaagaggtgatttaagtccagaggagggggttatatgcaaataacatgccattttgtatcagggactctggccttgtggattctggtgttttggaggtactggatcccatcccccaaggatacaaagggacagctgtacttgggactggcatctgaagtggaggacactcttgtgggactgagaccttagcctgcaggatcgggtactgtctccagggagaaagcgtcacaatggaacagggttggaggacgcccagcgggtgtccgcggagactggatggaaccgggttggaggacgcccagcgggtgtccgcggagactggatggaacagggttggaggacacccagtgggtgcctgcggagactcgctggagcagggttggaggatgcctagtaggtgtccactggagacttgcttggtgtttggggaaaatccccacacacattttggtgaccagagatgaagtattccatgttggatgttgactgttgagtgtgtgagagcagggaaaacactgtttttttttcctgtctcagacaccagcccagccctggagtcagccgtgtctcccaggaacctggttccttgtgttgggggaatggcatcagagaccaagacatgggggccaggcacgcttgttgctgctgtggtatacattcacaaacgttaacaaatatttttatttttacttatttatttattgaagatggggtctcgctctgttgcccaggctggagtgcagtggcatgatctcagctcactgcaatctccgcctcctgggttcaagagattctcttgcctcagcctcctgggtagctggaattacaggcacgcagcaccacacccagctaatttttctatttgtagtagagacagagtttcaccatgttggtcaggctggtttcaatctcctgacctcgtgattcacctgcctcggcctcccaaagtgctgggattacaggcgtgagccaccacgcccagctggctttctttttttaagtacagagtttaaatttgtaatgttgtcacacagtggaagttccctgctttcagtccctgaatagcaaaggctatgccttggccatcgctgctggaagagacacggctcagtgttggatgaatgtcctgactgttttcgccccagagaatgaaaggcgccaaccgtcctgggaaaggtgagaagtcagcgtggacaagctggggtgaccatcactgcagagctacaggccagcgtcctcttcgtgtcctagggctcgttttgttcctggtcctgcaggacagcctggggtcaccgtcactgcggagctacaggccagcgtcctcttcgtgtcctagggctcgttttgtccctggtcctgcaggacagcctggggtcaccgtcactgcggagctacaggccagcgtcctcttcgtgtcctagggctcgttttgtccctggtcctgcaggacagcatggcagcgattgaccgattgaccattaggtgagctgcgcctctttctctttcggcacaaatgtgggaagaaagggtttatttgtcggtgaaatccctttgggcccaacccacaagtgtcctgttcagtgagcctggtccccccagacacacaccaccatccgccctcaggtccctttcagccacctcagaggagcaaacatcacgcctgccagactgcagtgctcaagccagagttggccaagagccagcacctcgcatgtggctcccccagctcccacagcacggcaggggtcccagcaaagtctccccagacagggtgacagccaggcctctttcgggctccccagccccctctccctcccgagctctgtccttgtggggagtcctgtccaaggccctgcctggaggtctggctctggaggccccgagaaggaggccaccagactcccccggaccccttctctcacctccagccctcggtctccacatctctgaccttgtcgtctccattggctgctgggactccatggattccctccagagaccacataggagtgctccacagggggatcgtggacaggccacttggctctgcctggggtggcagacacctgcccacgggcaccagtcctgtctgggtattctcaggcccagggcagccctgactcattggcacagagagtcagaccccaggacatgtccc

SEQ ID NO: 1244381 - DNA, 4001 bp, Homo sapiens
tttatatacttgccacgtgccaggcacagttccagagctgcactgcccaatacggtagccacagccacacagggctgctgagcgcctgaaaggtggctaatctgaacaggggtgtgcctaagtgtaacatacacactggattttggagacacctgacaaaaagagtgtaagatatctcaacacttttttataccaatgcacactgaaataatattttagatataccagataaagtcaaatgtcactaaatgttactaaatgacacctgtttctttttaccttttcaacaaagtcactgaaacgcttcaaattatacatctttgtatttctatggaacagtgctgttccagattctcatccgagcccccttgatgtctctgtaacaaagtgttgcctgggcccgcacagctggggagctcatacctcggagaggatgtccaccagggccttccggggctgctcctgcaagtggttttggtactgggccagggcctgcagcagcttcaccgacttcatcagtgcctcctggtcctggtccccacagagggacagagggtatgagcagggcacacgactgtcccccacccatcccaagccagcctacattcccccagtccctccaaagctcttaccttcaccagccgacctgactgaaagagggcgagcactccaaacaggtttgcaaagagagcaggtctcagcattgcctagaaaaggattccaggcacaggcatgaggggccctggaactccccattccccaagcctcccacccctggggctgctgacctccctggccccactctcaccttcttcacctgatgcaggtcatatttttcttgtatctgctgcaggatgctgcacaaggggaggtcttcaaaagactgtaacagctgccaggagttgtgtggcaggaggaagagggttcaggagagtggcccaactacgtcttcacaaaccttaacctcccttcccccttcaacttctcccaagaagcctcaggtccctagtcccaccttctatgtaccttctatggcccctagattactagtctgaaatgctcagccactgggtcttctctccgcacgtggtctgagctcccctcaggctgatcctgcaggcctgggtctttattgctctgccccttgtcaaggcgcctcagagagtggtctactccaatcagctgaatgcctctgcaggcctaagggagcccacccagcgctcactgctcccagaaagtgtacctaagaggccgggcaacccaagcaccaaatagaaaacctggccaggccttgctcacaccttctccactttcatgaagaggcctccctcaggttggcctccagtctgctctgccactcccgacctctctctcgggctgcccctccgccacagctgagacaccacacccgccctcctcataccccaccattttgacctggatggctgggaccctgccaggagcaccacctcacctgtgccagggccaaactgtagcagggccgggctgtttctcgcccgaccccgagtcccgtgattagacgcttcagggcatatttcatctcggacccctgcggaaccaagcacaccctcgtgttcaatggtgacaacaaggtgcacgcccccgcgcaccctggcatccaggttcgcgaccacgtgcccccagtctcaactccctgggcccgccgccgcttccttgccgggatatgcgcagcctctgccccagaccccgccactccaccttcggcctgccacgcagatactccagcagcttctccgtggccgcaagtcgcgtctcctgctcaggcttcgcaatgtcccagaagaagtccaagaactcgcgactgtgcttcaataggccatagcggtcggcaggccgggcgccactctgcgtcgcttctccaggcgacatcggctgggcgggatcccggctctccatctccgccacactcaccgaaacacgaaacacgtgtgctccggccccagccgcttccaggtcagggcacggcgcatgcgcaccggtttgtgtcggctcggaggcggaagaacccggaggggcgggggaaccaagagagaccggcccagagttaaaagagcggcatttccgccgtagctctgagcggaagtccctcgcctagcggcgtcccatctttcccagccttctgctcacacccgctccgccctggcggctgtggcatctgcccctttggagccccaggggggcatttctaagggcccatctcggaaacaaacctaggtgtagcacttcgatccgactcgtcccagagcggcccctgcgctccgaacattgagccattcaacaattactgggctcctgctggcgtgccgtgctaggcggttggaacaaagcctctgctctcgtggaggaacacggagccaaatgcatttaaaaagatcataattatgaagagaattaggaatgcaagggtcaggaggaggcttttaagtgctggaacgtgaatacatcacccgttaaaaacacggctaattactattcaatagggtctccaataatgatttgaggggttggtcagggaaggcctctgtgaggaagtggcatttgggatgagagctgagtgacaagaagggcccccctcccccgtactcctgcaaggatctaaggggacgaaatcccaagccttgcaactacagagacccagggctggaggggctgaggctggcgagaagcaaggctgcatggggccccgggctgggatttcattctgagggtgatgggaagtcactggtgagtttaatgcaggggcaagcctggatccgatttacattttaacaagatgatgctggctgctgtgtgggggatggactgtaggtctgcgcaggtggaagcacgggaagaccatttagagatagtggtggactggacccagggaaaatgagaacaggtcagatttgggctgatgtggagcaggtggggtgggtgatggagttagatgtcgggggagaggaaatgagggggatgccaggtttgagactgaaataactgggtacattgtggtgccattacggagaagaattttcttgggagtgggaggtaaaggtggtgggatcaaacggtctattaaatcagagaagccttttacaatggcaggggaggggaactgctactggtcaccctcgcttcttggtttgagaagctgtttatagagggctgtggtccagagaggacctaacccttgggggaggtcagggctaaccttcgccttgaatttccacacgctcaactccaacccctttgtacccaagcccctggggcgccttctcaccctctcagccgcttccctgctttgctgtctgttctagaaagtgaaatgaaaacattcaccttgcacatctggtgccccaggaggcaggaggtgagcggagcagggggaagctgaaagataccaacccaggctctcccctctctggttgttggtcacctgtgctgcccatcagggaagccctgactccagttgcttcaaaagctgttggaaaattaaccaagaagcaggaatggtgcttggtttccgggagacttgatctttattttgtacccagtctggttgaggcagataggtaaggggtgtcctgaagggaaggacagagatgccaacagtaccctgggctctgcctgtcctgcttcgtggggcccagggcctaggcagaggctctgcactctttccactgtcctcctgaaagctggatctgaactcagtgctagccccaggccctactgctttttcgttattaccctgattttcttagctgataaaatagctagagattccatccggtgtgggtgatctgaagaatgattgttagctctggatgccagaactcaagtctaggtaacttaaaaggccagaggttggggcctgagccagcagtgagcacataataaatccttttttttttttttttttttagacagggtttccctcttgttgcccaggtggggttgcaatggtgcgatcttggttc

SEQ ID NO: 1244382 - DNA, 4001 bp, Homo sapiens
aatgggggtctcactgtgttgcccagtctggaatgcagtggctattcacaggtgtgatcataaactcctggcctggaacaatcctcctgccacagcctcctgagcagctgagactgcagatgtgcaccaccatgcccggctcaacgttggacttttatacgtgaagaaacataaagccatactgaaaagcgactaagctcctgttagttttctgagggtcccctctcctcacaatgagctttcacaactctgaggctgggtctccccagggcctgcaagagcacatccaggctttctgacctagtacataaagccctttcatggtctggcccctgacctacccacctgtgcagcctcttctggttcccacatttacagttccataaactcatgctgcttcctagacctagagaagcaaacctctccttttttttcttgtctgccatagatgtcaccttcttcagaagacgtacccctacaaccatccctggtctggctcaggtgctctgagcccccttaagcccgatgggcacctacatcacagcatttgtatttctacctttgtcaggttactcctccaggtgttcattagactgagtttcttgaggaccagggtcacacagttaataccgatacccttctggtgagccacagtaccacacaaaatcagctctcagtaaacaaaaataggctgggcgcagtggtccatgcctggaatcctagcagtctgtgaggccgaggcaggaggatcgcttgaggccaagaatttgacactagctggggcaacacagcgagagccctgtttacaaacacacacacacacacacacacacacacacacacacacagaaaaaaaaagctaaaaattaaatttaaaaataaataaatggaaacagccaaaaaagatcaaaagggggtgggttgcaagtgagaacatgtccatggaagtcagtccgctatcagacgccctgtggctctcccaggtgcaaccagaagaaagctgtagagggtaggaagcagtcatatctagcgattctttccaggctaaaggagctggataagtgtcatccagctggaaagtgcacgtggtaggaaaaggcagtcaaaaagagaactagccaagcaaggcctttcttctgggtttttccagcaggaatcctaagtgacgcctgccccgctccccgaccctcctctaccaaataatcccatcaaggtggctggtttcaacacttcattctttcctcttcccaaggaccccaattcctggcccttctacccttaaactctttcctggctcttctgcacttcatccagtccggggatcctgcctcctgcatgccaccctaagatgtggttagaggtagcgcaaggccatctccccagccagtggtccctgaggcccctctgtcagtctcccacttcctatgtccccatccccaaggcccagtgcgctgtaggctcttcctgccttgccccccatccctaagggtcctatgcccagtaccccacttccccgtgatctttcctccatccctggtgccatccccatcctccaggccccgtgtcctgaactctttccggggaccgcttcccctctcgggttctcccgagcgcccaaggcagccagcgccaacctttgacattctctgaggcctctaataatctggtcggagttattctgaggcgggaatccttctttagagacttcatggtgccgcccggcaccatgaaacgttgccctgcaccgccggcccagagacaccgaggctgcgccgcacccgccagccaacggccgccactgcgtccacagcaaccggtgccccgcgcgggggcgcgcatccaccgatcaacttgggcggagacggcttggaaacctccttcttcatcgggccgcgcacgcgcccgccgccggcggcttcaagagcgacggacccctagaaagccctgcgggcccggcctgtgacgccacaggcggcgccgacgagcgccgtgacgtcaccagccgggcggggcggggcgggggacccgggcgaggacccccgcgagttgcgggagccgagggctgggtgggagtggctggctggtaggggtgcatgacccgcctcgccccgccctgctgctaggccacggggggcgggtggggcgtcgggggtgccagcccctgcttcccgccttcctcgactaaggccacatcctgtcgagggacctccctctgcccccctcacagcggttctggggggggatcgggcctttcaggacgtgctgaaaccccttcgtggcgtaccgtaggttttaggtgtccctgcctgccgtccccaactcgcaccaacgcgcctggagacctcccgggtccacgctcgctgcagccactttggcctttcatcacttcccaaaccagccaaaacttttgccctgacttggggcattctcacagtccttggagatgctgcctctgattattttaagtttataaacgcacccgcttttttcgccttcccctggagccctgaggcattctgggattatttcggttttttgtgtagttgcctattgtcaaactggctctcagaatgtatgagagcaggagctgcctcaggccctgcccccaacccaaagtttagcactagtagtcaggcagtaaattgtacctcaaatagtgaaggggttctagagccagacaattgggttctaatcccagctatgtcggcttgttagctgtgtgttcttgagccaatgccttgacctagagagccggttttctctgctgggcacagtggttcaggcctacaatcctagtgctttagaaggctgaggcaggaggattggttgaggccaggagttcaaaattgacctgagcaacgtagggagactccattctaaaaaaaaaaaaaaatttttttttttttttttttgagacggagtcttgctctgtgcccaagctggagtgtagtggtgccatctcggctcactgcaacctctgcctcccaggttcaagcgattctcctgcctcagcctcctgagtagctgggattacagacgagtgccaccatgcctggctaagttttgtatttttagtagagatggggtttcaccagttggtcaggctggtctcgaactcctgacctcgtgatctgcccgcctcggcctcccaaagtgctaggattacaggcgtgagccaccgtgcctagcctaaaaaaatttttttttaattagctggctttggtggcccacacctgtagtcttagctactctggaggctaaggcaggaagattgcttgagcccaggaggtccaggctgcagtgagctctgattgcaccactgtactccagcctgggcaacaaagtgagatccccatctcatacatccatacatacatatatacatacataaaatggaggtcataatgctgctctcacaaggccactgccagggttaaatgaatatgtatgtatttctttttcttagcgagtatctcactctgttgcccaggttggagtgcagtggcacaatcatagctcactgcagcttcaaactcctgagcttaaatgatcctgctgccttagccttccgagtagctgggactacaggcatgtgccactgcacccagctaattattaaattttttgtagagacagggtcttgctatgttgttcaggctggtcttgaactcgtgggcttaagcgatcctcccgccttggcctctcaaagtgttgggattacaagcatgagccacctcacctggcctgagtgtgcatttaaactacgaaacagggtgccctccataaactgtagtatcttctcagtcaattctcaaaatcatgctggggttgaagggaggggacacattataagcccattttacaaacggagaaactgagctccagagagaagggtgtaatgtcacctgactagcgggaagcacaaattgaacctggttttctaaagtccaaggccagggctctttgaaccctgtctcctgggacatttctgagtttgcaag

SEQ ID NO: 1244383 - DNA, 4001 bp, Homo sapiens
catcaaaaggcttgttctgggcttcaattcgctccctttcagactttcggaggaaaggagcagcctccccaaaaatggccatctcagagtcggaactcatggctgcaggttattgatggtagcccagttaaggaccctggctgggagaggaagaaaagaaattgtagaaattaagaaactggaccattagattcacatttaaaactttaaaaaaaaatttactgaccaattgagtgcttagcattgcattgggtatgaccacctccctggcttggttgaggataaaatgtcagtctccttgttctgtgccagtgctgacagacacttaatcatgcatttggaaagagactgttgtttctggctcacctattgcagtctcttagctgctttctctgtttcatttgttaggtatattaatctttataagctgcctatcattggcttatagagaacataaagctataatggtggcaggatagtctccagttctttcacttatagtttttatcttcccaactggattataagcaccttgcaggcagggagcactcttctttttatggtatccttcacacctcttagaacaaatgctggacacagagaaaggctcaaagctggcttggtgaattaaaagaacaataggaatatgttgctataattttaggaactattctgtacatgacagaaatattttcattataaacttgggagttacgaagacttcctaatatacaggaaagcagaaatgtgtggctctttgttttgcattgttaaaaaatgttctgttatccatcaatttctgttgtctctgtataataattttgacaaactcaacttcttcactgatctttagcatttcttaaatatttattataaaacgttattacctatgttttcttgctctattattaacatttttataacaatttcacaaaacttgttcttttcaggatccccctcttgccacattagctagcattcattaatgctgtcaataatcttcatgtatattctactttataataataaagataccttttccagggaagctcatttggatacatttctcccattgaaactatgttgactcagataacataattaaaatgcttcatcttgctgaatatgctgacaatcatgtttcgtattgtgtgtgtgtatatatacatatgtgtgtgtgtgtgtgtatatattcgttaatttttattttatagattgtgaaacaacatgcagttaagcaactttttccaaggcaaagattcagaccattctatttatccaattagacatcatctctcataggtttttatatttatagtgctgaggaaaagccatggtatagaaaatttaaattttctctataattgagtaacactttgaaatgttacattgcatattgtaatgcagtcatttaaaagataaactacaatgctggaaatagtgaatgaaattcactattgtgaataaaattcccaaggactctgagaaagcattttcatatattgcgagggatatgagttaaggagaaccagtttctaaagtcattctccattttttaagagaagcgtgatcaaccatgaaatggaaatgattttttttatcacttccctcaccccgcccctcaccactgtccaaaccactgcagaagattccttgcactctgtgaggaatgagaaaaaaaaaaatcagaatcttaccgtagagatgcgaccttaaagtggatcagaactgtaagaaaaagagcaaacctcttctgattaaattataacaattcccgattatagaacaattcttaactgagaaccaggaaatgactgggaagactacaacatctaattaaaattgctacggagtaagctggtgcttcactggcagggctgccagggacagtgggagccaggatgtgtggcatgcacgcgggcagccagacatcccttaccgtcctccagacagagccctgtcctcacacacacttaccttgaagctttatgaggagagacaagtcatactcattccaagggtacttttataggctcaaatatggaaaacacgtaacctcctcctctttcttaaaacatatttggcaaaacatgtttttggcattgaaggtctccaagcctaattcccctcatattaaagatgtttggatataattagaaatatttcctctcatattgggttaagtatatgaatcaatctcctataaataatttgagtcgttggcaatcttaaagttgttggcctttggaatgtaaggtgttgtttcaaagacagctaagttctggaatccctggactttgttgcctactgctcttctgtttcacagagtcgcctgtgtgaagtcttttcaactgcctgcgcagttacagatagtgtactcgggaggaaaacttctgctctttagcagagggttataaaaacgttgctttctctcaaaaagatttcctttttttttttttttttttttttgcaatttattgtgctttttcaaagttgcttggaaatttaattttgaaacttgcttcatgaagagcagccaaagatagcttcttttgtttccttcaatcagtcgcctcttattcattgtcaaatcattccaccggcacttcggacttgctccgaaattgcattgccttccaaacagagatgtcctgcttctctcatttttttttggtgcccaagttgcttgtgaaatcttgtttcctctatgaaactcaacataagaaaatattggaaacagggtatttctctgtctaaatatgcagcatcgatgatttttcctctatcagcagtccatgggatatatttagtattttgcttacaaacaatacctgaatattgttttctattttaattttttaaaaaagtttattttactgtctttgtggcctcacgtctctgtctgtcagcattgtctggctaggactgggacaacatttgcttaatatacctggttttgcacccacatctgtattattgtacttatatctcaattgatttaatggctatagcttgccttatgaaaggagatatctggatatactagttgtaaaggtcacatagttttattaccataagggatcatctaattcatctttctcattttactaataaagcaactgagatccaaaaaatagaagagaatctccacaaatcacacagcagtttagactctggtcatctgacttgcggtccagcgtactcacttgtgacactcttctacctggggtagattaaagccatcaggaagggtattgcagggatgtgcgtctgagagggcctttcctagccatctattagcctgctttgttaccacaggtacctaattttactttcttacatgtctgtttctttactaggcacctgcaaaatgtgggtaatgattttcaggaagataaaacattttaataatgctctcaataggatctgatgggaatcttcagacaaccttttgtcttgctctggataaacttttcaataagtaggaagtaagatattgtttttgtttattactgccacgttataaagcacttaagcaattccacgtgatacaggaacaaagtgaaagaggggcttatgcagcgagaagagcaattccacaccctttctaaggccagtgcgacagtgtgaatccaacttacctgttaaactaccatgtctaatttacatcattttcacacagtgccatttagaccaagatactcttgctttctatttgatgggaagttaccatttagctcttcctttattctgtcgaggaaggttatatttttggctatgcatctcagctgcatccagtttaaaaatcttgatcctctaggaaaacgtctctgagtggtccagattgctatgatatctactttttgtaccaaactcatacccatcattatgtgtgttgaatatagatttgaataacctactttgagatcatattttcttgacacttttagtcatttattttggctctttatatgattatctgggagaccataaagattgga

SEQ ID NO: 1244384 - DNA, 4001 bp, Homo sapiens
tcctcacatgtgataaagtgcataaaccgctgaagcatatagtcttccaccctacaacgtgcccttcaagatttcctccatctcaccttccatctcagctgccttcgttataatgatttccctatggagcccaaatgaaaagccaggctcgcaggggtcacatccttctgctgccaaagctcgtgctatatcgcacaattacaccatatgctttctccagataaggacggggaagaactgaatttaagatgcagaagtaaggagatgcataaaatggccacttttccagaacccgagacaggcagggcatacttaaacatcaaaagcaagggactcaaagaataattaataaaggcagattgatgaaggagataaaacaataaatagattataaagttttccagagtgagatactatcaagaataattaaacctgactcaaagaatcctcagtttcaacgttaaaaaacaaaatctcagcaaagccaaagtattatgtttggtattacattattcagcgaaaacagcagtctttgtttcatctgcagtctgcatctaccccgcctgctttcccctaccccaccccagcccaccccacccccttccatccaccgcagtgatcttgaagggagctgcagaggccctaaagaaacagagataacggctgtaggcagaggccacgttatccaaacctcaccagcccggtctgacccgccgagtcgccaacctccttcctaaggccctagttccaaacaggcctggctgggggcctcccgcttcccagggccgcatccgcccaccacaggcccacaaagcccccacaaatgccaggactccgcggcttcaacttccctccgaaccaattccagtccgattttatgggatcagggtgtgacccccaactgcagaaggcaatgaagagactgcggcgagccattcccagctcgcttacacaataaagggatcccgaggcgagtgctgaccctccccccggccgtcctgctgcagcgcgccccgccacatttcccgcctcgccccctcaaaccgcctgggcctcgcagggcgtccacccccggcctaggcgctccacggagggcgcggcaggacgccctcctcccgcgctccttccccggcgccggcggagtccgaccctccccacgcccgcggccggctccggagcccctcacccgccgcgcgcttccccggccgcgcagagccaatgccctcctgtccctccacccacgggtcgggcgcgcgccgcccgccttccaagcccatggtgaacccctctggtgctgcgggggaccggtcgcgccaggcctaacccacccagcaacccacgcaggggcccttcctgcccagcgcccccccaccctaccgccgggactgcgctttccagccccgcttagaatcccctctcttcctgggaggcagacactggctcgcggggcacgccgagacctccgccgggacactagcccctcgacctcgcgcccccagggatcccacccaccgagaacctggtcctcacgtccccacccccagatctccatcccccagccccccaggggtcgccctcctgcacacccaggccctgacccccgcgggtttcacaaggacttcattccccgctcctccgggagtctctccatctccacccactgaggtcccagtgcccccagcccaggaccctgctcaaactaacctaaggtccccgcagcacaaaccctacagctcagaagcccctctgtcttccccagctcccgcttcggtcccccgttcctgtcctccagagccgcccgggacccctcagcccaggagccattcctccctccacaaactgtcccccagccctgggccgtgcactcggacccgggtagccgcacctctcaccttcagccgaagatggtggcgcgggcgcacgtccccagccgcgaccacagatccagcgcctcagtcccaaacccaccgctgcctccgccgggctcctttagcactgctgctcggggctgccccacccacccctaccctcattgggccagctccacgcccatcaccgccgcccccagacccactggttggtttgcgcgcccatctccaagggaagacgttagcaacccgaacgaagctaccttcccgagtccggctccctccacccacctggaatgacgctcattggctcccgctcccagcccaggccacagaggccccaatctcatgggctggctcttacgcccgtcataggctccgggaggtgcggccggggcagtggcgcgggattggctggctcgtgcgtagatggacagctgaggctggctgaacgcccggcgatcccgcgaggctgcgggtgcgggccccgcggcggccggcgcgctgcgctgacattggctgtgcgggccgcggggcaggtgggccgcggcaggaggctggcgctctgactgcagactcctcgtcctagcgtcaggcagccgccgcagccgcagcacattcgagcgcccggtcgccccctgtgcttgcggcagccggcatgtaccgcagcgggacggggttccaccgcggagtcgcgggccctcagcgttgcctgcaggggcggggcggagcgcggtccagagtcctgacgtcacccccggggctgcgcggggttggggccgcggcgctgcgactcacctgcagtgggggaaggaacgcgggggagggcgctgctccgcccatgcgcacagggtttggcccgggacccggctgcgctccacgctgcggccactgtcccgaccccggccccaggcggactctgccgggatcggccgagcgccaggcgcaggacacggtcctccaaggtcgcagttttggtgttagcggggtgagaggctctcctgcccagcctccaggcaaggctgagattccagaagaatgagaagagaaccgaccttggagagaaaacttggaagaaactttattcacctcattcattcactcgttcagtcgctccttcattcattcatcagagctccctacgtgaagggctatgagaggttcttaagaatataaggctggattcctgtagcgctgtcatatcccctagggcttatgaaaacgttggagactgaaaaacagtggccccaaaataacgaaaggaaactggaaaaatcaaagtaaataaaatttaatgaaatgtctgcagaatctaggcaactgcaacaaaactcttgcataattatatataaatataataaagtctaaatcacatgaacaaaatgaattattcatacaaaacctgaaagtcaagatcataaaaattcacagcaagatgcagttattaatcagttattaatgtaggctatgggagcattttaatacatgtgataatgatgtgtttgcctaagcctaggaaacgtctagtctggcaaaaagtgaattaagcaaaaaacaaggcaggaagtcctaaggaagggttggtggaattcagaagaggctggaaggcagctgagtgcagagtccttcctggggaagtccgaaccaggctctgttttgtcctttgtcctgctgcatctggtcccccacccccacctgcctgctggggtactaccccgtgtccaggtgtcttgtgacttggctctgtgaagaggtctgtccttctaatgcagtctgcacatggagtacaaattaactttccaaaatatatgaatgatattcctctaatgaattttaaaatgtgtttagagaagaccaaagactccctctctgaggcctgagtctccactttgtcagccaccgaagtcatttctcagtgcaatgttctatgcttagtgcatccactcgcgaataacactgtaagccacagagtcagtagtttctcataattcaaaaacttttgcatatatatgtgtatatatatgtatatatgtatatatatgtgtgtgtatatatatttttttgttttgttttgtttgtttctttgagatggagtctcgctctgttaccaggctggagtgaactggcatgttc

SEQ ID NO: 1244385 - DNA, 4001 bp, Homo sapiens
tgtaatgagcaaataggagaagccattcttcctttggtaaaacctgtatatattttaaaatctacctttaagaatagttaagttattggtttcaaactcatcaatttcgtcttcttatgagtgtggcaagaatgagaacgtgtaaaatgatgtttgctaatttcaatgattgcattcatgatcaagctgaaaataacccttaccttcttggttcccaagtgacagtcagtgtccttcaggaataaagcgtcttcctggggataatttgagaaaaaaaaacaaaccaaaaaaacccaaatgagctacaaagagtttaaataaatatagaaaccatgtttgttccagtttatctaccttaaatagatacacagtagatggtgtggaatgaaataaatttgctgttttgaatttttacttttgattaaaatcattattctttaaatagttggttaattacaacatttaattaatactctcttgagaaacttctgtgtgtacaatgtactgtgtcagctccttaagggggtatgaagaggaaagtacagtatctgccctataggaatgcaaaagttagtaagggataagagaatgctcaagtaagtctttgaacaggattaagacaaatttttaaggagtctaaacaaagtactatgggaacttagagaaaccgcttctgactggggggctgtgaggggtcagggaagaaagaaagtagggaggggaatgctccagattgcagcttggatgcttaggggcagtcacctttttttggcaataggagaaaagttataaattgtggacaaagacttctttattctcttcaatgctctaaattcctcctgcagatgatgaaggtagggcagctgaaaagtcacctgggactaaggaatctcagctctaggagtttataaactacgtggctatctcaaggaggcatgagtgtctgaaaaattttcaatatcaaatgtaatctaagcaaacttcccaattaccattcagtgcttttatggagccaggggaatatttcatgaagccctatttaggcaggaacagacacttaggatttggtttactatccttgttgcctccttccttctccgtctttaatgcatcttaaataatctccagttatatcctaaaattctcacaatttcttaaaaaattaaagtattacatactatattctgaatcctcaatttaaaaaaatatggaggcagagctacagaaattctaatatcagttctgttaagtagctggtatgatttctttgggtttctgtttccttccgtaaaatgaatcagatgcaccagaaaatctccaagattcctttcagccctatgagtctataacagacagttctccgtagagatggtggcctgaattcaaagtatcacaaatctctgagggatgctattgcactgtcagacacagtccagtcccaagtccataaaatatgccatgtgagaacagtctgcaaaccagtcaattcatatcagactatgacactttgtaagatgggtaagatgcttgggattatttcctcccacaaccatttttcagaaatcctgacatgggaaacaaattaaataaacataaaaatttcaaataatagcttaagcaatcacagaagagataccacaagttaccaagttaatttgctaactgaacagtataacattgacctaaataatcagaggaggaatcatgcattatactcagttttgttctgcaggtgaatattttttgtcttataattgcttatattcttgtcttttcaccccttgtaaaagtttcttgaaaggcagttgtcttgtctttccatcttgtctccaaccttgccctcaacacaagaccttgcacttagtaggccctccgtaaaggctactttattgtcttccccccttgactggtaacctgatcaggtgcaactatagctacgtggagcaaaaaagtgagcacttgtgagcacttacctagagatgctgcggtcacagcaatttcaggagtgtgaccccccagctctctttatactcccaaatctgccagcccagcactctaacttggctatatttgggggagcaccatttacttgttagatgtaaatgcgtcgtagccctgatctctcactcttgttaagttacttggataaatgaccagtggaggctgcataatgccaagtcagctgcatagggattttgacgttggacacagatctttgagacttagagagtcctaggggctgagtggaactggagcagagtgtgctaagaaggtcactgaagggcagaaccacaggatgctttgtcaagcaatgggtgatcagtagtgtggacagtaactacacctcatttacccagcattggtatgggatggtgtgcttctcatctcagaaatctctggaaatttaaggttgaccttttaacacatccagtcttatttatgtatttgtttgtttaaaaatctactggaagaaaagctttccaaaatgtattttacattatcctgctctgtgtaacctactatcttgaatagaatttaagtttttcttgatcactctgggggtctgggagatgatataataaagtcatcaaggatctggttcttagtggatcatgcctgcactaattgttcctgctgtgaattttggtgtatacttttatttattattattattattatcgaaacagagtcttgctctctcctctaggctggagtgcagtggcgtgatcttggttcgctgcaaactccatttcccaggttcaagcaattctcttgtctcagcctcccaagtagttgggattataggcatgtgctataatcccatgtgttatatataggcatgtgctataatcgcccagctaatttttatatttttagtagagacagggtttcaccatgttggccagggtggtttcgaactcctgacctcaagtgatcctcccgcctcggcctcccaaaatgctgggattacaagtgtgagccaccacacttggccttactttttagattttctgtctttgccttcatggccagcctctcaggtataatttctttctgtggtaagtttgtctttactagcctgattttgtattattgattgggaaagagattacaaaattaagatcaggctaaagtaagagtaaataagttctgagtgcagctctagtgggttctaatgaaaatacgtggactttgtgacaattatagttacttaggagtttttttattttttgctaaaatataagtgatgtttgactatgtaggaacaactgtatatgtagaagttagagccatttactgcaatacagtgtgatctgtttaaattgtatataatcagtgtttgttgaatcaaagtttccttaatcagtctccagtgggtagaatttcatgtaggtagggcatttccaaaagatagtttgcattaatcaaagtgaattttagaccagaggaggagcaggtagagataggacttccacaaagtattttctcttccttccttccttccttccttccttccttccttccttccttccttccttccctccctccctccctccttccttccttccttctttcgttcctttctttctttctctctctttctttctctttctttcttttttttttttgagacagagttttgctcttgttgcccaggctggattgcaatggcgcgacctccgcccaccacaacctccgccttgtgggttcaagcgattttcctgcctcagcctcccgagtagctgggattacaggcatgtgccaccaggcccagctaattttgtatttttaatagagacggggtttcaccatgttggtcaggctggtctcgaactcccgacctcaggtgatccgcctgccttggcctcccaaagtgctgggattacaggcatgagcctggcttccacaaagtattttctaaagtagatttgacagaatgcagattgggagggtcgcttcgaaataaatggtcctgtggttaaatgagcttaagaaatgtg

SEQ ID NO: 1244386 - DNA, 4001 bp, Homo sapiens
aaacaggaaagataaccgtttacattaattgagtgaccaaacaacaacaacaaaaatcaataaaatgtggcaagctcctgggattctactcaccgctcctccctcagtcttcaccgtcacttttcctccttctctgctctggatggtccctttgacaaaggattctttgggctccgccacaaagacagatgttttggcatcaaagggcctattctgggcctcaatgcgctccctttcagactttcggaggaaaggagcagcctccccaaaaacagccaattctgagtctgaactcatggctgctgaactcagaggtcctaaaggagataaaactttcacattagagagtctggattgccatgtataccaataaatcttaatatttattgtatttcataggcccagttggaaattccactagacaggtctactgttcaccatactatagttactgagacaaacataatcacaagaacgaaaatgcatcaggtggtctctgtgtacccaatgccgtatttagggctttgcatccactgtcttatttcatcctccaggactcacattctcattgggaactgaattacagtccagtgctgctgtcaagtagcttgtgaccttgggtatgtcacttgatgtttttgagcctaagtgactccatctttagaatagggattataaattctgcctttctaaattcacagcccatgatatatgtgaagatactttgaaaaagaggtttaaatgatgactgagaaagtaatttgaaattgttcaggccaccatttatatatgagatgtcatgaattatcatgtcacaaaattccatgtcttgaatgtaatgtagaagaactttatttcctcctttacctgttcagccagatttgttgaagttcagtggcttattggagattataattttgtttacctttttttcttttaggttaggtgcttagtatagtttctctgacataattttttgcatattaaatacagttcatcagtttaacccccttaaactaattagggataaaaacagtagccaacgttaacctcattcttctacatctaagggctccctttactattccaaattttcctttgaagcatgcaggccctgtttgctccgttctatgtgatctgtaggttgccagtggtatcagtagaatgaaaggtttggcaaataattctaccgcagtcattacatgatcaaattacttgaaactcatttgaatcgtctcttctagtctctccctttagaaatgcagtaagtagtgggagggcagattaatacctctattatatataagaaaaatgccacagcactcggcattgtgtaaggtgactttttacaagggctttaagaagtttaaagaaaggattgtcttacttccattttacattgttggacattatgtttactaaatgaattctaacagcaggatacatttttatcaaatttgagatttttagccagggaatctgagggtagactctttttttcctgcacagacaatatatttattcaaagcgattcccctgctcaaatgtcaccccaccaatgcttgagccgtaaatgaggatgtgtgcattgtcctgaaaggacagtcctccctttctcaccgctttcctgaagcacagttgttaaagggtatttactgagacaagcactttctgaaaggttgctaagtgacagaaatccatcccagagcctcttgcattctcctccaggaactggttagtccaaatcttaccttgttagcaagtgagaagatgtagcctgggagtgagacagttctataaaagaaaagggaaaagcacttgattagttgaccaaaaagagggggaaaaaatcccatttatggcatggcttgctattgtaaacagaagtaacaaaattcatagaggtaaaacgtgcagttccagaaggagcagtaccagaactagcagctgctgctgacactgggcggtgtgaccagtgtccctcttgaaaggcccgtcctgctcccacttaccttggagctttttaaagcaggacgagtcagcctcattccaagggctcttttatatggatagctatggaaacaatgcagctgcctcttctttcttaagtcaaaaggaattgtttggcaaaatacctcttggcaatctagcgtccccgcataattctcattcatattaagaatggttggatataattagaaatatttttcttattgagtatgtggataaatctcctatggataatttgagaagatgatctgaaagagtcaagctggtggataaaggcagtggctgggcagccaggatacctggcttccctcggaacttctttttggctttgctgggcacagcattcgggcttgcctcgcatcactttcgcatatttcacgtgttaagtcacataaataaaatacaaatatgtattttaattttgtgacagttaatttttacctgttggtcctttctttccagccctgcaaaattaagcgatgtgccttcaacaacttaaagagacagaaggtcctctctgttattccaatattcctgtagtttcaggaatttccttgctcgctcacctttttgcttttgccaaagttgttccctctacttagcacaccatttcctgtccccctacccatttgacttgcctgaaataaaaaaggttgaatattttctagtagcagaggtgtttttagagagtacttttcaacattttttcgtgtcatagcccgctgagaaaaaaatgacaatattagtgtagcatgctagagtaatgtggaagggatttgtctatatctgtaaagggcttggggagaatatttttaatttttttacattcctttatgtaatataaatataataactatgatacacatagcattaaggaaaatattaaatactgaatatgtcggaaacttacaaataatatcttcttgaaaatcctaaggaaaaatttgagctatatcctacaaataaaacttgtttgtttctgactttattcttgaaatatgacacaaatttccagatcaaattttcaaaaatgatacaaacagtatctgtgttcttgataattaccatagcggggatttttgtccaagaaggagggatgaaaatggaaaaccaagtaatttacaactgttggagtattttaaaaattcaccagttcttctttctccttcattgaaaaatataatgttgaatattctcgtacagtgaaaataagtttttaatccatttaaactctctctttcatatcaaatatttcaaaggataatgaagctctaatcttcaaaaacttcatgggttaaaggagtcatcagcattggtcaaagggcacaccagtcacaaatacacacaagtacctgatctattcaaagtctaaggtttggagctattactgtgggctacctcttccagtacaacctacttagccttctggcacctttactctggctggatgctctctgggctgcatgccttgtcccaggcatcctggaacaccaaccctcccagcaattccaggggtctcttgactgcagaagacagcattacattctcagctggctgctgaagtccttcttggttccatccagcacatggcaaataccaccattgtgcttgcctcctgtaggaatcataggttatgctgtcagactcgaatgcagcccagtcaacactctgaggaacccttagtcagccttctcccagctaggagccacctcccaaggtccccctccccatccagccattctgagactgaagagatcaacattttatggcacatcagttacctttttgatgccaagatacactggttgggaagctctgttttaaggtgagctgttgagctgtttttccaaactaaacagccatttttagtgcccacagcaatagtttaatattctcttgttccatctctgctgccaatgggcattttccttatgttttattaaatagttcttattttatgttatttacaaaatgatcttcacttttttttt

SEQ ID NO: 1244387 - DNA, 4001 bp, Homo sapiens
ctgggattctactcaccgctcctccctcagtcttcaccgtcacttttcctccttctctgctctggatggtccctttgacaaaggattctttgggctccgccacaaagacagatgttttggcatcaaagggcctattctgggcctcaatgcgctccctttcagactttcggaggaaaggagcagcctccccaaaaacagccaattctgagtctgaactcatggctgctgaactcagaggtcctaaaggagataaaactttcacattagagagtctggattgccatgtataccaataaatcttaatatttattgtatttcataggcccagttggaaattccactagacaggtctactgttcaccatactatagttactgagacaaacataatcacaagaacgaaaatgcatcaggtggtctctgtgtacccaatgccgtatttagggctttgcatccactgtcttatttcatcctccaggactcacattctcattgggaactgaattacagtccagtgctgctgtcaagtagcttgtgaccttgggtatgtcacttgatgtttttgagcctaagtgactccatctttagaatagggattataaattctgcctttctaaattcacagcccatgatatatgtgaagatactttgaaaaagaggtttaaatgatgactgagaaagtaatttgaaattgttcaggccaccatttatatatgagatgtcatgaattatcatgtcacaaaattccatgtcttgaatgtaatgtagaagaactttatttcctcctttacctgttcagccagatttgttgaagttcagtggcttattggagattataattttgtttacctttttttcttttaggttaggtgcttagtatagtttctctgacataattttttgcatattaaatacagttcatcagtttaacccccttaaactaattagggataaaaacagtagccaacgttaacctcattcttctacatctaagggctccctttactattccaaattttcctttgaagcatgcaggccctgtttgctccgttctatgtgatctgtaggttgccagtggtatcagtagaatgaaaggtttggcaaataattctaccgcagtcattacatgatcaaattacttgaaactcatttgaatcgtctcttctagtctctccctttagaaatgcagtaagtagtgggagggcagattaatacctctattatatataagaaaaatgccacagcactcggcattgtgtaaggtgactttttacaagggctttaagaagtttaaagaaaggattgtcttacttccattttacattgttggacattatgtttactaaatgaattctaacagcaggatacatttttatcaaatttgagatttttagccagggaatctgagggtagactctttttttcctgcacagacaatatatttattcaaagcgattcccctgctcaaatgtcaccccaccaatgcttgagccgtaaatgaggatgtgtgcattgtcctgaaaggacagtcctccctttctcaccgctttcctgaagcacagttgttaaagggtatttactgagacaagcactttctgaaaggttgctaagtgacagaaatccatcccagagcctcttgcattctcctccaggaactggttagtccaaatcttaccttgttagcaagtgagaagatgtagcctgggagtgagacagttctataaaagaaaagggaaaagcacttgattagttgaccaaaaagagggggaaaaaatcccatttatggcatggcttgctattgtaaacagaagtaacaaaattcatagaggtaaaacgtgcagttccagaaggagcagtaccagaactagcagctgctgctgacactgggcggtgtgaccagtgtccctcttgaaaggcccgtcctgctcccacttaccttggagctttttaaagcaggacgagtcagcctcattccaagggctcttttatatggatagctatggaaacaatgcagctgcctcttctttcttaagtcaaaaggaattgtttggcaaaatacctcttggcaatctagcgtccccgcataattctcattcatattaagaatggttggatataattagaaatatttttcttattgagtatgtggataaatctcctatggataatttgagaagatgatctgaaagagtcaagctggtggataaaggcagtggctgggcagccaggatacctggcttccctcggaacttctttttggctttgctgggcacagcattcgggcttgcctcgcatcactttcgcatatttcacgtgttaagtcacataaataaaatacaaatatgtattttaattttgtgacagttaatttttacctgttggtcctttctttccagccctgcaaaattaagcgatgtgccttcaacaacttaaagagacagaaggtcctctctgttattccaatattcctgtagtttcaggaatttccttgctcgctcacctttttgcttttgccaaagttgttccctctacttagcacaccatttcctgtccccctacccatttgacttgcctgaaataaaaaaggttgaatattttctagtagcagaggtgtttttagagagtacttttcaacattttttcgtgtcatagcccgctgagaaaaaaatgacaatattagtgtagcatgctagagtaatgtggaagggatttgtctatatctgtaaagggcttggggagaatatttttaatttttttacattcctttatgtaatataaatataataactatgatacacatagcattaaggaaaatattaaatactgaatatgtcggaaacttacaaataatatcttcttgaaaatcctaaggaaaaatttgagctatatcctacaaataaaacttgtttgtttctgactttattcttgaaatatgacacaaatttccagatcaaattttcaaaaatgatacaaacagtatctgtgttcttgataattaccatagcggggatttttgtccaagaaggagggatgaaaatggaaaaccaagtaatttacaactgttggagtattttaaaaattcaccagttcttctttctccttcattgaaaaatataatgttgaatattctcgtacagtgaaaataagtttttaatccatttaaactctctctttcatatcaaatatttcaaaggataatgaagctctaatcttcaaaaacttcatgggttaaaggagtcatcagcattggtcaaagggcacaccagtcacaaatacacacaagtacctgatctattcaaagtctaaggtttggagctattactgtgggctacctcttccagtacaacctacttagccttctggcacctttactctggctggatgctctctgggctgcatgccttgtcccaggcatcctggaacaccaaccctcccagcaattccaggggtctcttgactgcagaagacagcattacattctcagctggctgctgaagtccttcttggttccatccagcacatggcaaataccaccattgtgcttgcctcctgtaggaatcataggttatgctgtcagactcgaatgcagcccagtcaacactctgaggaacccttagtcagccttctcccagctaggagccacctcccaaggtccccctccccatccagccattctgagactgaagagatcaacattttatggcacatcagttacctttttgatgccaagatacactggttgggaagctctgttttaaggtgagctgttgagctgtttttccaaactaaacagccatttttagtgcccacagcaatagtttaatattctcttgttccatctctgctgccaatgggcattttccttatgttttattaaatagttcttattttatgttatttacaaaatgatcttcacttttttttttttttttgagatggagtctcactctgtcacccaggctggaatgcagtggcatgatcccggctcactgcaacctccgc

SEQ ID NO: 1244388 - DNA, 4001 bp, Homo sapiens
atttaacccaagctcctcaagcatctgaggcttgaactggcgataaggggtttggaagtgagcaccactcttgggaccgccttttccgcttctgtgacaaccaggtgttgctgagggaacgtttaaaaataaacacccttaaaaaataaacgccatcttcaaagagagtgtgctaatggcaaacagcaaagatatttttgaaccatttcaatcaaggtggctacacgctcgtatgcgggaacctgccttttgcttccttgggttgctaagaacaaaatcaagcatctgacatcagcatctgtttgacagtcccccaaatgccacctcctctcccgcctgacctgtccttgccttttttttttgagatggagtctcactctgtcacagactggagtgcagtggcacgatctccactaactgcaacttctgcctcccaggttcaagcgatactcctgcctcagtctcttgagtagctgggattacaggcacttgccaccacgtcctgctaatttttctatttttagtagagacggggtttcaccatgttggtcaggctggtcttgaactcctgacctcatgatctgcccacctcggcctctcaaagtgctgggattacaggtgtgagccattgcacccggccacgacctgtccttgtctaaatgtgctagttcccctgtccctctgtgcccttatggccggtgggaggagggagaaaggaactggcaagcttggattgcctggagatctccaacagccgagggacagggcccaacttctcacctgagagtcccacctgcaggatgagagcagaagacagcaacagccaggagatcccagacctggaagaatatgcacatacacaacttagcggcacttggggtggctgcgtccatgtagaatcggcttctgacgagttaactaaaaaggataaaggggccaggcgccatggctcacgcctgtaatcccagcactttgggaagccgaggcggaaagatggcctgaggtcaggagtttgagaccagtctggccaacatagtgaaaccccttctctactaaaaataaaaaataaatttaaaaaattgctgggcgtggcggcagatgcctgtgatcccagctactctggaggcttaggcaggagaatcatttgaacctgggagacagaggttgcagtgagccgagattgtgccattgcactccagcctgggcgacaagagcaaaattctgtctcaaaaaaaaaaaaaaaaaaaaaaaagactaatactttaaagaggcaggctggaagatggaagagcagatgggacgtgacccacaggaagccaggcagggaggaaaaaccctcagctgtgcagaaatctggtttctctcagcctgcactggcaccttcttcagtcttcctcactcccatttagaatcggacagcagggaccgcatccctgcttaaagtcaacagttcgagggcaggggcaggtctccttgtctgtgaacaggcaatatctctgagattaatttacacgcaatgcccacagccagtgtggtcttgagaggacaagacacctggcagatgtacagcccaggtggggaaggtgagggcagagtgaggtccccagtcctgttgacccttcatgggtcacagaggcaatgggagaaggtcaagccatggcagctgggctcacggggcatccaaaaggatcctgcccaagaggacacttggagaggaggacaggggagagtgtgtggaggagagagaacctgcagggctcctgcttgggggaggtgctggagccagagggtgctgggtgtttgggcccagggaacctcgctctctacaccttgcttatcctaagaaaactcagaaaggcatgaggcgccacctcagcagagccaggcagggccagggaaccacgcacggggtgtggatgtgctcaccgggtgggtgtgctccaagcagctgagacctagaagaggagcctgtgacttacctccgcccacaagcgagccacagagggctggctgctccccggggcttttataggccattggtaacccccgcggctcattccttctctatatttggcaagaggatgagtggcccccccaagccgagaaccagcttcttccacacgtatctttgtcgttgccaagggaaaggtataattagaaatgagcaggatccatcaccattttccgaccgcagaatgtcaggagcttgggatgcctttctctgaacttggggccggtgctccctcccctgatgggatgggatggcctcactccaggaggagttgcgggggcagccacctccgttctcaggcgctcatcacaccctgaacgcggcgtgagcccctagctattgggcaccaaggactgaagtcgggtggcttacttagaaatctcatcatatggaaaagtgaataagactgagagtgaaaagttgaaatcctttttgaattttgagcaagattttatcacaaccttgggttgtgattgcaaaacctgtgccaggaataattaataataataataattaatagcaataattcccctccccccttgccctcttctcccttctcctccttctactcctctccttctttctcttattttctcctatgcaacgttctgtctcattagtatcattattaacttaattctttcttaagctctaataggaccagccagttaagttagtgacgtggatctatgctgccagctcgtattcccggcgacagctgcctgaggacctgtggctattaagacagattaccaattaggaaagaccagctgctggctgggatggggtagggggaacggtggtggcctgcagagaaagggcggacaagggggggctgtctaacaaatgtggtcatctctaaatcaggagtggaaaaataaagcctcaagagaagagtaaagtatgtcggacgcttttgcccattctcgttctactttttttttcttgacaaatctttgggaggatggctgggtgggcaccctgtggttgcttattccaaatagaactgtttgtccatgtttcccatagaaaccgccccttccgtacacagcagtaccaagccccgaagtggaggccactccatgaggtctgcgtgggaccggggaggcagggctgcggtctcagggcaaaggcacgtgtatgaaacatcctctgtgctctggcccttacacacagtgcttcgagaagacgcagaggaaacagaagacgcagcctttacccttaagggtttgaattctagatgatgagtcctgtggatgctacagacgcatttacaaaattgaggtgatttcacattgaagcaacaagtttatgaagcgcctgttccgtgaatgccaggcaaggccagtggccgccaatggagtcagttgggcagggctcactcaccccttgcctgtccaccagccactgagcgttgcccccacccactgcccctctccctccaggtgagactgacatgtccatccttggagcccctcctcatccaaggagagggtaaccgtcactcctaaagtgtccgtccatgtcgtaaagggagtggtcccctggggctctgccctgttggcccagtgatgcactgtctccttgggagtattggtcaggacagccacggacaggtaaatatcaccgaggggagcagcggtgttaacaaggtccgtggggtcaggggacagggcaagctgtcctggctacatctccagcagtggtgtatgcagggcaggctgtgggtgtggcgggggtggacgtgggaacttgcagttcctacgtcaacacccagacctgttgacaggaggaactgtgtggaaatgaaatagggggcaattttgctttttcccttttgcagtgaccaatgtactcatctatctatataactacatccatactcacctccaggagacagaaaagaaatattcccttcaacatttcttttagttcccttaagagagcacccatatcacgttaggacctaatacaagctctaaaatgctga

SEQ ID NO: 1244389 - DNA, 4001 bp, Homo sapiens
tttaataaaattttatagtgattgtatgtgttgatctgtatttctctttgtttttagttggatttcaacctaacatattttaaaatctgattcttattttcttaggtttataatctcgttctttcttctcctctttttaaaaataccaaccagtcttctaaatatttttctgaaatggatagccagtataaagtttcaagccaaaatgaacttaaaaaattttccctactgacaaattaattatgagaaaataaaataagtcctgctgtcctgatggcaaggacagggtgagtggccagaataaaagaaggtgacctctgtggagcagaagtgtcttggttgccaatgacaatgacagcaatgatggcgacaacagcaatagccaccaccttctgtaggctttccagagtcttgatcttttgtcatcagcattaactttccctcaacttaaaatgttagctatggaatttccacatactctattttcaaaatcagtcttatctgtaaaagtgtcctgatgacactgtgaaacttagacatattttcaggggatatatattggaacatttaatgtcaggttttttttctttgaagaagaaatgttatttatattacattatattttgtttctgtgtttgtttttacaccaggcaacttgaattaacaacacactaccacgtggaggttactataatgcagtgtatccaggaaacacagaaagatgattgctacccttcccatctcctgtcttattatagattaattgtttcccaacttggggatcaagccccaatagagcctcaggttgttgcagggggttcttgaatccacccacacagtgatcattgcctcaagtttaaggaaggaacatttccacatgaacagtgttttctgttcttttctaaatgaatatagctgctatgttaaatataaactcatttaaaataattcttaagtgtagaataggttttcatgattatatatatccttaacatcatactaaaagtacatgtctccacatgaacaattagcaggattccattagttttgattctccattagcagggttccattaaatgttttgattctgtggaggagtccttgaaaaccactgacgtcaatcacagttggcaagagctggaaggaccttagcagtcaatagaatccagcctcctcgtttactgatgaggaaactaaggcctagaaaggttcagggtcattcagtgtcatagtggtgggtgataagtggcggtactgggacatgagtcctgttccgctaaatgcaggtttgttaattccacttgcaacacactgtatttcaagatacataaaggctaactggcttgacccaggcaaatagaatcagtgaaaagcctggattggcacctagaaatatcgacttccagataaacacaccttgattttatcatgcggtctctctgatatatctttatgggttaagttggagtagtagttcacattaaatattacatatgatggctgcattctttctgtagttctaacaacatgtgaaagagaagtttcattaagttttgtttgattaagtggcctgaaaagtcaaaattttatgagaaggcatttttaaagaacagctgccccgatatcctattcccaatactaaactaggaaataaaatggtagctcattaagatgtagcaatatagagattcctttgttctttagagtgtaataataaattattcttacctcttgtattatcagatgaagaaggtggcaggctcaaagcagacaactactgttgaaagaaaaaagagaatgtgggatgcttttttttccccatttaatcacaaaatactagtaactatattgtctacaatgtcgtccttaagaatgttggaaagaataattaaaatttgggaagcagtagacatcccttaaatgaaaaatcatcatcatcaggaatgtaaaagtaagtgttcttccacatatacataccttcaagaattttgaggaaggatgggaaagaggcatctcagctccacttttatagagaccattctgcaaacacagcagccacctcagctgtcctagctgggaacctacttggcaaaaccgtttttggcaatctctttgcacaatattcactgactgtggctgtgaatggatataattagaaatatttcttgacacccataaataatttaacagaggatgatctagggttctttataggcatttgataggggatggggattcagggcttctaacactgtttctccagtttggctgttgcatcattcatcacagaattcaaagccagattcccacttactcctctgcctataaaattggtccaacagaatgagtctgatgtgaggaatttaggattaattaatttgttggttcttagagccattaaggagtctggaatgaattttagacctgacactatgattggaagcagtgagcgatggattttaagacaacattcctagccacagtctggattttagaaagactggcgatagattcttttaaagtctgaaagtctaaatatgaaggtgaaagtgaattctcagattaggcagtggtgatggaccactgggggaggcataagggatttagaatagatataaacacttctgttctttttctggaggactttccatggatatctccagcttgtatgttttcactgaaggaacaacaggatgctgtgtgatgttccatgcatgtttcctctgcataatggaaggagacacaaacatgcattcctagttcatgggcagactctcatgactagctatagctctaatgaggtgggaaccacatatttttatttaaggtgggaggaaagtcatggtatccacgatattctccctgtggattgaaaagatggatgggccatcacatatgcccataatactcataaattggcttttgatggttttgctacatacacagctgttactgaatatggcaggaaatatacctactctaagtgtgaccctaactgagctctggtgagatattttcaactatcattagctggcttaaattaccaattaatgagatcactgtttttataattctgttgacttagaatttatctttgacacattgatagattgaatcttttatactttaaaaatttattttgataaaattctatgaaataggtcatcaggcgttaaaaacaaaatctccatgaaaataactcaccgaagtctagcgacttacccaaagtgctaggctctaggccagaaggaaacttgttctattttttctctcagattttcacaactcatttatttttacttcttttggaacttaacatctgacttgcagacataataagtatgtattatatttactgtatttgaagttgaaagatgaaagaagaaaatatgaatgagaccaagatacatagatgagttataggattacagatagtgaggactctttacataatagttaaaactctgatcaattacagatagactgatcactcagattttgaaagctctgaaacaagaccataatattctagtgggacccctattatgggccaccaggagtggatcagagaaccttgcagagcttggacaaggagagaagagaagcagcactgggtgagggagtacacatttcccttagacttgcctcttaaaggattgtctacatagaaaacacaggagattaatgcgaaggcttttgtatttgtatggttctttgtgattagatatgagtgggaagaatggctccaatctaaataaggagaattattttggaaactgtctttaagcagtctgtgtaaaagctgctcgctctctactttcctcagattaggaaatattataggcttctataaccttgcatttccttatctattaaaaacataaatgtggtgaaaatcaaatactgccttcaccttacggggttgtatgaattaaattagattttatatatataggtatcagaaattatattattatatcacatatgggagattatgtata

SEQ ID NO: 1244390 - DNA, 4001 bp, Homo sapiens
taagttaggcttcaacttttgaaccaagaaataaaatggggagtattttctccctgttttcacttactgctccaccttcagtctttacggttactttccctccttctttgctttgtatagtgctcttcacataggattccttgggctccgccacaaagacagatgttttagcatcaaacggcttgttttgggcctcaatccgctccttttctgattttcgaaggtagggagcagcttcgccaaaaacagccatctcagcgtctgagctcgcactcatggctgcgatttatttagcaaaggattctgcctagggaggagagaaacgggagagagagatataaaaagcagaagtcacaaatgtgagttaggatttgaaatgaaagaaatgttgaacatagcctgtgctgtaactattcctccaaactggcactccccagtgttctaacatagtctaaaggacaagtatggagtgagactgtaatttgagatttcatttttaggactgtgaatttccttttcagatcacatatcttgatcctcagggatagggtacctacaattgaattagaatgaaacctctacagctaaaactattgatggattgttttatagcaactgtcattatttaatttcctctcctctttctgcataatgtttgtctatgccatatgccaggacaatcatatggtgagaaaagaaagtttgtcttgttcaaatgaaggttcatattttcaaagctatcaaaaaatctttgccttttaagatggccattttctctcataaagcaaataattatttttaacatctttatgttgatatttggtgttgtatctctcagtggattgttagaagaacataatacattctaatactctggattttttgtaatttgggttgttcccaacagacttagcattgccttgattccaaaatcttttttgacatgagagatttcagctgtcagttaacagatctaaccacagaggaatgagagcttcagcacaaaggcccttcttcccacataaattccatgggtttcttttctttccacccagaaaacagagaaaaaagttttaagagtacatcacatgcatgtaagccattgtcttctgattaatagataggcctctgcaatgtggacatgttagattggttgagtttttcctttattttcaattagaaagttacttagggaagggcaggattcctcttaaattagtcatggtatttaacacccggtggatgtaatacttgcgacctgttaagtaaataataataagtctttctaacaacaaataacaaataatcaaaggtagctaaaatatttatatttatatttctaggtaaaaatctttctggagtctttaaaaatgtctataaaatgtcctaagtcctcaatgctttgccatagaagaagactggcatggactagtctattgccactggacagttctaagcacagctgagaactcactgttgaagctaattctgtcctaaacggtctttgaatcttggaacccaaatgaggatagtctctgagaagaagacattttgaaaaagttattttctagcatttataaacactcactcggaaacactctttcctgatataactgcaaaaacatggaaatggtgtataattcaggattgttcacagcttcattagactatatcccctctgtcatcaataaattaataaagccaagtcttacctctggagttccagataaaaatgcaggttcagaagtgttccactctgtaaaacaacaagcttcttattagtgatgctccgaaattccaatattatagttacagaattgttattatagttacagaattgaagtttccctaccccaaagcttggttctatgaagacaaaagttaagattgagagagcagtttaatgctcacagataactacgaggtcagctcttttccccacctggggtttttcgagttccaaggccttcatcacttacctctgggttcttggtggaaataaggcacaaggggcagtcctgcttatataggaactaatgtgctgatgctgcaactacctcctctttgttagggcaagacatttggcaacatgaaccctcagcatagtttgtagtgacatttgtcatgtttggatataattagaagtattcatatcattttgtgtatgcaaaccaatctcctataaataatttgacagagaccgatctgccagcagagaatgctttctagtgtgctgggaagggaatctttgacagtgcctgatggggcctcagagtaagttcttaagagctatattcaatttggcaaactctttcatgcacgcctgtggtagccaaatgatcagatacccggggcacacggctgtcagggccttaagcacgtttccttatttgctaccacgggaaccccccactgcattcccttgggccactacagatgctcactcttgaagtccaggcttagacagcagagattctaccttgagtctccaccattgggccagtgcccactcatctaactttgaaaaacattattagtagaaaataatatgtttattacagaaaaaaatacaggtaagtaaaaaaagtctctgtaatctctaatgcagaaataagatagaggcgtataagtgggatcatattatagatgcatatatagtacatgtgtgccttgtaatatgctttaataattaatatatcatatcactaatgtaatttataccctattctttaaataaattatgattttttttaattaaactctttcctttttttaaggtcagatatattgaggtataatttacatagagtcaaattcacccttttaaagtgacagttttatgaggttttttgcttttatttttaaaaatttttaaactttataataaaatttacttcttttgttgtatgattgtatgagtttttatacacgtattgattcatgtagccaccaccacagataggatgcagaacaattccaggcctatgggtttgataaatatatgcaggtgtgtaacctcttacactgtaattacataaaaattaaagccttagagattaggctaaattttccctttgatgaacactcacaatgctggtatctcccttttctcccaaggtaactacggatacccgtttagtttgtaatattgcagaccttttctgtacatttacatatgtattttctgggaaaatataaattagtaaaactggtctaaggaaattgggccatagaaaatttataatatataatatagatgtttaaaatatagatagtatgattatttatttacaaactttcttttttcattctacactcttggatcatttgccatgttagtacataaataataatatgaaaacatttcaaacatatgcaaaagtagaggggatagcataatgaacctagtatattcatcatccagcactgataattatcagttcatggtcagtcttgtttcttatatattctcaccattccctctatcactggattattttgatattactcatttttaaatttctgtgtaaaattccgtaggtttaagattgtaataattttgtttatacaagttctaaaaagtttctcctgatttaataatgatctttactatgcgatctcaatcttctagaagttttacatctttaggtagtcagagttataaaaaattttcttttatatttttggttttttgtgtgtattgtataagaaaaactttctctaactcaagaactcagagtcatacatatattcttctgtattttcaagctaatgcttatgaaatagtgagatgtgtaatcctgtattttcaatctgatgcttaaaaaatagtgagatttgtaatccagctgtgtgtgtgttcgtgtgcatgtaatctgtttctggattccatattttgtaccgtatttctatgccaatagcataggttttgatgaccagtagggccaattttccctaattattcaaagttgtcctgttaatttttaccttctactatatga

SEQ ID NO: 1244391 - DNA, 4001 bp, Homo sapiens
agagtgaatgaaagaagtgacaggccaagggaaggacaccagtttgatgccactaggcagctgttgcccagacaccagggacaaggcctggcaacccacccaaaggcacagtgctttatgggaacaaatcagaaataaaggcgaggagggatcctgaagggtgaaatagtcagcttttcctgccaggctcagcttgtaaatggagtgatgtatgacctagaaaacctgcaggtgttttcagggtcctacagtagcctcagtttccccagagtgagccataaccaagctcagaaaagggacaattgcctccatctcttggctaagcagttcctgtcccttgcggggactgggtctttggcataatacttgtagggttatcccggctgtgggtatgagaggaattctcagagggcagggaggtcatacaattagagctctgggttttaatttccctgcctgcttgtcacagaaccttgtcctgtgctcttattttgacctgatccctcaccacccccagccctgtcctaaggctgagatccctgggggctcagcactcccaacctgttattaatagctcttcataccagtagccacttgaccttttccactctggtgccaaggcttaaaactgctcctcttcagaggtctctggccccctccctcttcagcccacccctctcccaccagttccattccttcagcagctgggccagagagctgggaggtctaaaatgactgagtcagcatgcagggcccacaccagctccagggagaggaatgttttgtgtgaggagagcagggtggggcaaaggaaccaggcccagcttcctgacccggttggagagagggtctcagcccagggtgggccagtcctctgcatgctacagataggaacccaggctaaggccacagaaggaaaggcccgtctgggtaaggaaagagagagaggaatccgggctcctcttaccttaaccacaacctccttcccaccctgccctcacctgccgtaagagtgtttgtgagtgaagcctttcccaaactgccatgcacagggaggatattccctgactgtttatatcacttactccaagttacactggcagctgccatgatctgtctgttctccataaagatatcccactacctcctaggaaaaggctagtctgttttactttgctatggtggtcctcataatgccttataaaagggtggatggatggttggttgtacctccccccattcccaacttagctgcacaaatctagggtagcaggacagggctccctcaaagcagcacctcattcttgacggaaaaggtttatgactcaatctccccctcatcagccccaacacccactccactgccccatgggactgcgatctggggcatggacaccctagtcctcatcccagtccagcccacataaagtagatcgctaagctccagagcaaaaggactctcaatgtcatccccacctctatcccaatggctgagcctcacttacctttacactcttggggtcaaaggcaggttccttgggagcctcaggagctggggcaggggctggtgcaggggctggagctggagctggagctggcttggctgcctccttcttaggctcaggcttcttgggagccatgttgtcttgttgggatctttggcagaggagtgatctaagaagaaaccgagagacgtggcgtctgggagatgagataggagcctgggctgcctcccttcccttttatcctgggcaggagcccccacagaggggctgggtgaaagcaagagcaactgctgctgactataaaaggaagaaacgccagcagggtacagctgacaactgtgtattgtcaccaggtttggggccaccagccccctccccttcatgccacagctctctcttcacctctaggacaggctgatcccttcttgccaattggtggaaacccagaaggaccagggaaacagaccttctcaaatatgccggagcagccagagagatgagctgacttgagcagttgataagcctcacacaaagcccaggggagggtgaggctttttttagcccctcccgagcagaggcagcccactgcacattccttctaagccaagatcctttaagctgagagccactctgggccctcagctctgcctagaggcccaactctccaggcatggagctctgaagcaacagctggtccagccaacccacactgccccacaccctcccaactcacaggatgaaagcctccattttccagagcaggcatcccaggaactccacagacctcagatccctagatctacccccttacacacaacctcagtcattcattcaacaagtagtgagcactgaacccatgcctaggcacctaggagagaagcagagagatgtggtagaaagtcgaggagactgagggtcagaaaacttggggtttagttttcactttacctctaactcattctgtgctctgtgtgtgtgtgtgtgtgtgtgtgtgtgtgtgtgtgtgtagtgcttactactatcagtaccaggaactgttaagtgctattcatataaaatctcattaaatcttcaccatgatcctataaggtagatactattttgtttgtttgtttgttttaacagaaacaaggtatcgctctgttgctcaggttgcagtgcagtggtgcaatcacagctcactgcagcctcgtctttcctggctcaagcgattctcccacctcagccttccgagtagctgggactacaggtgcacaccagcacacttggctaattttgggggagtttttttgttttttgtttttcagtagagatgaggtcttgctaaattgcccaggttggtcttgaactcctgagctcaagggatccactagcctcggtcttccaaagggctgggattataggcataagccgccacgccaggccaggtagatactattattattttcactttacacatggggagattgagactaaaactggatgaacaacttggccaaggtcactcaaataattagctataagctgggattagatgtagatatgtctgagtctaaagcctatgcttgaataatgtatatgataatccagttgtcggggagagacatacaagtttctgcatttattggaggagtcaggatggatacacgctgaactgttaacagagacacctctggggacctagggggtaagggtgggaggataacagcaatttgcagttttttacttttttcacttcctgtattaatggaaatttttataacgagcatttactgtttatgtaaaaaaaactttgaaagtcaacaaaataattcagaaaaataacaacaaaaaagcttatgtatccactacacaaaactgctttgtgctgaatctttagactctacagttcagaggaaaagaggaataaagctgagagaggcaaaaaaatcacttcgcctttctaggcccagtttcctcacctgtaaagcaagattgctagactacagaatcctggttgctgttagctcctaagcctgcaattctgggtgccctggagcccacatctgcccatttcccagctctctaactacaggttccatgccccagatcattgccttcagagccagaaggacccttagagatcatctggccccatgctgttttacaggcaaggaatctaaggtccagggaaacgttgaagttgcctcaagacattcagctacttataggcagagctgggccaactaattctgtttcctggggtgcagtgctctctgtagcacactgctcttcactgctcctcctgtagcctatacacgctcactggtggtgacagagaagccctcaaaggaaacgggcaggaaaaagggccaggacttgctcaagggaatactagaacgagaccagggcccagattctagcccagccctggtcctgagctgggatggtggctcctttgctctgtgcacctcacctcctcccctcatcttctgcctcacctctcttccttgccgg

SEQ ID NO: 1244392 - DNA, 4001 bp, Homo sapiens
ctcaaatgcctggcctcaaattaccctcccgcctcagcctcccaaagggctgggattataaacatgaatcacctcatctggcttctcttctgtcttggagtaaagaaccttctaatcaaaggaactgggtaagtataacacaataatagggaaaatgtctctcataaaagatacctattttttttctacttcaaagcaacttcaacaacccccatgaagatgcagatatggaaaagaggattgcaaccaggggtgcaatttctcacgggtgagaaattgagagaggagagtgaatgaaagaagtgacaggccaagggaaggacaccagtttgatgccactaggcagctgttgcccagacaccagggacaaggcctggcaacccacccaaaggcacagtgctttatgggaacaaatcagaaataaaggcgaggagggatcctgaagggtgaaatagtcagcttttcctgccaggctcagcttgtaaatggagtgatgtatgacctagaaaacctgcaggtgttttcagggtcctacagtagcctcagtttccccagagtgagccataaccaagctcagaaaagggacaattgcctccatctcttggctaagcagttcctgtcccttgcggggactgggtctttggcataatacttgtagggttatcccggctgtgggtatgagaggaattctcagagggcagggaggtcatacaattagagctctgggttttaatttccctgcctgcttgtcacagaaccttgtcctgtgctcttattttgacctgatccctcaccacccccagccctgtcctaaggctgagatccctgggggctcagcactcccaacctgttattaatagctcttcataccagtagccacttgaccttttccactctggtgccaaggcttaaaactgctcctcttcagaggtctctggccccctccctcttcagcccacccctctcccaccagttccattccttcagcagctgggccagagagctgggaggtctaaaatgactgagtcagcatgcagggcccacaccagctccagggagaggaatgttttgtgtgaggagagcagggtggggcaaaggaaccaggcccagcttcctgacccggttggagagagggtctcagcccagggtgggccagtcctctgcatgctacagataggaacccaggctaaggccacagaaggaaaggcccgtctgggtaaggaaagagagagaggaatccgggctcctcttaccttaaccacaacctccttcccaccctgccctcacctgccgtaagagtgtttgtgagtgaagcctttcccaaactgccatgcacagggaggatattccctgactgtttatatcacttactccaagttacactggcagctgccatgatctgtctgttctccataaagatatcccactacctcctaggaaaaggctagtctgttttactttgctatggtggtcctcataatgccttataaaagggtggatggatggttggttgtacctccccccattcccaacttagctgcacaaatctagggtagcaggacagggctccctcaaagcagcacctcattcttgacggaaaaggtttatgactcaatctccccctcatcagccccaacacccactccactgccccatgggactgcgatctggggcatggacaccctagtcctcatcccagtccagcccacataaagtagatcgctaagctccagagcaaaaggactctcaatgtcatccccacctctatcccaatggctgagcctcacttacctttacactcttggggtcaaaggcaggttccttgggagcctcaggagctggggcaggggctggtgcaggggctggagctggagctggagctggcttggctgcctccttcttaggctcaggcttcttgggagccatgttgtcttgttgggatctttggcagaggagtgatctaagaagaaaccgagagacgtggcgtctgggagatgagataggagcctgggctgcctcccttcccttttatcctgggcaggagcccccacagaggggctgggtgaaagcaagagcaactgctgctgactataaaaggaagaaacgccagcagggtacagctgacaactgtgtattgtcaccaggtttggggccaccagccccctccccttcatgccacagctctctcttcacctctaggacaggctgatcccttcttgccaattggtggaaacccagaaggaccagggaaacagaccttctcaaatatgccggagcagccagagagatgagctgacttgagcagttgataagcctcacacaaagcccaggggagggtgaggctttttttagcccctcccgagcagaggcagcccactgcacattccttctaagccaagatcctttaagctgagagccactctgggccctcagctctgcctagaggcccaactctccaggcatggagctctgaagcaacagctggtccagccaacccacactgccccacaccctcccaactcacaggatgaaagcctccattttccagagcaggcatcccaggaactccacagacctcagatccctagatctacccccttacacacaacctcagtcattcattcaacaagtagtgagcactgaacccatgcctaggcacctaggagagaagcagagagatgtggtagaaagtcgaggagactgagggtcagaaaacttggggtttagttttcactttacctctaactcattctgtgctctgtgtgtgtgtgtgtgtgtgtgtgtgtgtgtgtgtgtgtagtgcttactactatcagtaccaggaactgttaagtgctattcatataaaatctcattaaatcttcaccatgatcctataaggtagatactattttgtttgtttgtttgttttaacagaaacaaggtatcgctctgttgctcaggttgcagtgcagtggtgcaatcacagctcactgcagcctcgtctttcctggctcaagcgattctcccacctcagccttccgagtagctgggactacaggtgcacaccagcacacttggctaattttgggggagtttttttgttttttgtttttcagtagagatgaggtcttgctaaattgcccaggttggtcttgaactcctgagctcaagggatccactagcctcggtcttccaaagggctgggattataggcataagccgccacgccaggccaggtagatactattattattttcactttacacatggggagattgagactaaaactggatgaacaacttggccaaggtcactcaaataattagctataagctgggattagatgtagatatgtctgagtctaaagcctatgcttgaataatgtatatgataatccagttgtcggggagagacatacaagtttctgcatttattggaggagtcaggatggatacacgctgaactgttaacagagacacctctggggacctagggggtaagggtgggaggataacagcaatttgcagttttttacttttttcacttcctgtattaatggaaatttttataacgagcatttactgtttatgtaaaaaaaactttgaaagtcaacaaaataattcagaaaaataacaacaaaaaagcttatgtatccactacacaaaactgctttgtgctgaatctttagactctacagttcagaggaaaagaggaataaagctgagagaggcaaaaaaatcacttcgcctttctaggcccagtttcctcacctgtaaagcaagattgctagactacagaatcctggttgctgttagctcctaagcctgcaattctgggtgccctggagcccacatctgcccatttcccagctctctaactacaggttccatgccccagatcattgccttcagagccagaaggacccttagagatcatctggccccatgctgttttacaggcaaggaatctaaggtccagggaaacgttgaagttgcctcaagacattcagctacttatag

SEQ ID NO: 1244393 - DNA, 4001 bp, Homo sapiens
tttccagatgtttactatgtgccaggcttggtactaaatgcttttctggaatatctcactagattctcacatagatgaagggcttgatcttagagaggttagatccctcagccgagagcccacagtgaggaagccatggggcctgtgtccctgactgcaagacctgtgctcagaacggccaggccacacagacctcaactctcactacaacctcctgaagtcggtgtggttactcttcccactttacagatgaggacatgggcccagagaggttatgtgagtgacacagcttgaaggtggagttaagcctgggcagtctggcttcagagtgtccacagtctcaaccactgcctcacatggcttcttagaaaatattataaaaagaagctcgggctgccatgtggaaaagaatggagaggggacaatgacacagctgggagcatgctgtgatggtgtacagcggacacattcaggatgaggtgaaacaggctggccctggtgagaggctagatggggctgggatgagggtggagacaagtagtcttggggttggcttggtgcagctggggggtgcggggagtgtctctgaggtgaggccgggggtatgggaacgccatgtttggtctgggacacggtgggcttgggatggctacaggacagtgcagtggagagtcaaaaaggctgctcggacccaggtctggcgagatggaagctggaggtcaggtgagctgtctaggagagggacagagtgggaaggagagggtctcgactcggctttcttgccaaaggagggttccgaaatgagaaactgtggaatctaagctggagaggaagaaagacggagaatgagtgaacgcacacgtgtgggacagatagatgaatattcatgtctttggctcctatgtacctgagtcttctaaagctgcaggccatactacccccgggaggctgcagggatgccagctgggagatgaatgcaactctgctgcctgggcatgggcctgagtgagggtgcagacccctgcctgtgatcatcagggagggtgatgagaacaaggtggctgacagggtgaggcccaagcctggagcttacccaggtgcggggatgggagggtcagagacctttggggggtcttagggagcttccccagccctaaaggcaccgcaagctgccacttcacactgacctgggcatacgcagctgcaggatcccttgctcgctctctcacaagcaaatgtagactgcgcaaccatcctgaccacagatccagaaagcccaggacataacagagccgcagtgcctgccctgatccacgcgcacacagatctagcccaggaacaagcccatccacggtgaggaacttgtggcccagtggctggagcctctcacctgagccctcactgcctgaggacccccagcctctggcctcatttcccaccctttgccagccagccttggggacaaaacaggtctggatctaatccaaggtctggactcaccctgacaccctgtgaactcaaggccttccctacctcaccctgggcccagagcccctacctgtaaagtggaagtgggaatggccaccagccaggcagaaaccctcacttagggcctcatggccaggcatcaggacagtcaggagaggggccgaggtaagccacagaggccctgcctgtcttggtatcccaccatcgccaggaggggactgcatgggcatcacacccctcacagatgaacaaagtgaggcagagaagggcctcaagatgagttaggggcgaggccccagctctgctgctgccccttcccttatcacccctgcagcctgggatgcgagggtggccagtgacagaccccaaggactctaggctaaggtctccttacctgcgttctgtggcctgctccccgcctgcatgccgcctcatgggggtcctctggctggcccaggagcacggttggcccagcagagcagctcagtgttatggggaagggaggcccagcccaccacgccgaccgcctggggccctatgtatatttaatgatgtctattattcctgttttgtctctggaaaggagtgagcagctgacaggggagccacgaacagcctggagagctgagcatgggcctgctccacactccagcggggcccgaggcccccgggaactctacccctcctggcagcctcacagaacctgctgcatccatctcaaaaggcatacctcctccaggaagccttccccgctgctcagaggtcttaaatccggggtctgcactcacaaactgtgcagcctacaccagcttctgggggacagcagaacactgtggggggcctggcacagtccctggcacacggtaggcactcatcgagcccctgccagcccctctactcctgacttctgaggcaacaggaaatgacccgccaccttgttctcacagagcctccctgccagcccagatggtcacaagggcctcctgggatgctgcccaccttggcagccaggcccctccggaggggccagtctgggcctgacacccccgaacaccaaccccctgggcagagcctgcctgtgcctgggtgaggaaccctgcagtctccttgccacacaaggcctgggtctgccttggggcccaggctgcaccctctccgacccccaggcccaatgtctgacctgtgcccacctgactcaacctggctactgttcagcaagtttacaaagtgttctcagtctgaacaggaaccgttttcaatcctttatttcagaaaggagagccaggagaactggggacttagaaaatacagatcctaaactcaaaagtccctgccccaggcgtgcagagccagggtcctggggttttgtgctgggcaggggctgccctgggagggggaatacagggggaggcactttaggacaccccttaggctgtggagggtgtcagctgggcctttgaagccactaaccactggttcccatcatggagagccctgtgtggggcacccaagggggtttcctcctggaagggcccccaacccaagtgtcagagaagctggcaagagctgagggagtgaggtgccatgacagcagccacagcctccagggacccaaacaggcccagctaccagcctggcactgagcatgccatctgctttaggccctggctggcgggcatgtgggcaacttgctccctcagtgcagggggctgggaggcacagatgcaggctcagcactacaaactcaaaacccccatgagagggctcagtcttatgggaaatgcctccaaccgagcccctttgccccaacacactcttcgtctgcctactgaagaaacttctgtaaatagcagagacttgagggaccccttcctggggtacgtgtatttgtatttttctgtttgggtgtttgtgtgtcccagtgggaccacctccccagggagacgaggcaggtgggcgggaggcccggcaggcgccgttacttcttcacgatctggatgacgtcctcatgctccatggtgtgggtcaggcccacccgctgcggactgtacttggtgctggtgccctgggtgaggaatgggggcagaggggtcacctcagcctggactggccaaggtcaaggaagatatccctgggcgtgtgtgtcctgaagggtaaatgccatggcataaggtgggggcctcaggcagcaggatgtccgcagttgtctgaccatccctgatctcaaaggttggggagggccaggcacagtggctaatgcctgtaatcccagcacttctggaggtcaaggtgggaggatcacttgagctcaggtgtttgagacagcctgggccagatagcgaaaccttgtctccatgaaaaattagccaggcatggtggtgtgtgcctgtagtcccagctacttgtgatgctgaggtgggaggatcgcttttgcacagatgtcgaggctgcactgggccatgatcgtgccactgcactccagcgtgggagacagagccagaccctgtctcaaa

SEQ ID NO: 1244394 - DNA, 4001 bp, Homo sapiens
tcccatgcccaccctccacccccacctacaacccttctcattcccctaatccctcaacacaatagctgcccccaaagccatggttttcctggaattgaggccacaacccccatgtcctcaacccaaaatggacaagcacacctccacccgaggctatatataacccgtcatgtcaaatccagaaaccaggaggatgtttcctggaaagacttcatcacaaaaaaacagagaggaagctgaggaggtgggaagccatggacaaagagccagtgaggcttgtcaggaagccagagacctcaggagagcaactttcaatatctccagatagaaagtagcccctgaactaaaaagggtggggaacattaggccaggcctgttgccacaacaacagggcaccaacctgctcaagaaaagggctccaaagcacaagggaaaggcggctgattcaatgggctctgtactcaccgtcctgctcaggtgatcttgctcttaatcacccaggtggcctcccctcccttccagcacaccccagtgcatacacacttcccagagctcacttgccacaggggcactgatgaggccttctcggccacagacacgccaggggctccaaaagacaagacgaacccacactaactagcccaagtcattggcagggtgaagcagggagggaatccaattctttaattcggggtggccatctgagggaatgaaagccctagccaggacagtccctctcaggaagcattcccccagccctccccacacaaatacaaactatgaggccagcgccaaacacatgccccattggcaaagtggtcaggcaaaatgaatacccgctcaaaaacaaactggctgtcttcctccccatctcccccaccccccacctctagctcattctggccgcaacctttccaactaatcagcaagacacatgtgccttgcagtagggcaactcccccatctccacccccaaaacaaagccccaatgcctggcctgtccctgcgggccttatcgcacccaggaacatgacccacactcctggccgggtttgggaccaaggagcgcacccccactaacaaggggcagggtgagggggcagccacccctaccacctccccttcccattggcgaaacaactggcatgacaggttagcagggcggggcgtcggggcggtctctccagaggcctggggcagcttgtccgaccttcccacacgcaccccacccctctgcagggaaaggtgaggtgagcattcagtctcagggcacagcctgcactccctaatccccaaagcctgccaccattcaccctctcatcttctgtcccaagaggagggggcccagggaagcggggtctccattgttttgccagctgtctagcagctgctcctttgagaggagcccgcagtctgcccggcagtgaaagagtgaaggccgctgggagggataaaagggtcggtagaggtgctccccttccccgctgccttcctcagcgccccgctctctcgctcgctccatcgtggggcctggacgggggcaggagaagtccccccaccctcgaggctgcagcccccaccccgcagctccgggccacctgggcgcctccaagccccaaatccccccacactgaaggccaccctgtcctgcctccctgcgccccccaggttggctggaagggccggtggttcccccttccccgccgctcccgatcggcccccacccccgggcgtcgagctccacggcgccgccagggacgggagccgggagtccgggccgctgcttccaggggacgggggaggaggaggaggagccggcgggccccgccgcccgcccgccctccctcccggccggagcccgccccgccgccccaccaagccgggcccgccaccgagcggccgccgccgccgaccggcactcaccggccaccggagcccgcccggcaggcagcagaagcggagacgcggcatccagcagcctcggcccggtcagggatggagcagagcgcagcgcggcgcagctcagcgccgcccccagcgaccgcgcaggccgagccgaaagggagctccctgctggcggctgtggggataaacgcccggcctgcctggcagcgccagtgcgcgccgccagacgtgggccaggcgggccgggcgctgccctggcagcctccgtccgctgtggactccgaagcccctctcgctgtgtctgagagaggccctgcctggagtttctgtctgcactgggcactggaggctgtccgaaaagggtccgaaaggggctgagtggcactgcctaggacaggcaccagggtcatgatgaacgtatagaagaggggctgtccaaggcaggcaccgaactctgcaggctgtgttcaaggtagtgctgtctaaaggaagcaattaagtcttactggccgcctcctcccaaggtggctctgcagaggcacacacagggccctgctggatggtgccccaggctcagtccagaccaggtactgcctgccatgtccgagatggcactgccagaatgcactccccaaggtaaaaacagactcccaatagcttggtctgatacagccctgcctcaaaatggagtggatcaagaggcgtaccagggcccgggagccatggctgtaagtgccactcactccctaaaggagttcaccaatgccaagattaacactttcagaagctctttggaatgcagtctgtccctgggtccactgtgtgctgtaaatatcaagtgagctgctgtacccaccaagaagacagtttatacttcctgggagaggccaagggacatccagataccaggcctccaagataggtgctatgtctagagtttggagaaagaaagaaatggggacacttccctgggcagtgtccatgctggagtggggtgtgccagaatgtggaagaaactgagtggggtggtgcaggaagaagggtgtagcagacaaatgctgctacctccctagacagcccaaacaggaacttctccaggcaagggcagcccaacctgacagaccagggaaggctggagcaaggaggctcagaaagcagagagttgagtaagagttagggagttcctgaggaatagacccaggcgggatacacattttggaataacatgcaactcaaattcaatttaacaaactgcctgctaagtgccaagtgcagccccaggcacttggggtgacacagaaggagatcagacatggcatatctccagggaaatcacatggggaacaggtagacctgagctgtgacagtagtagggttcaccatgctggcattacttggatgatgagataggtgctatgatgggaggcttatttggcttgaggagtgagaagagcagcttcaaaaacatgacatttgaggccaggcatggtggcttatgcctgtaatcccagcactttgggaggctgaggtgggcagatcacttgaggccagcgttcaagaccagcctggccaacatggcgaaaccccatcactactacaaatacaaaaaattaaccaggcgtggtagtgcatgtctataatcccagctacttgggaggctgaggcaggagaatctcttgaacctggggagcagaggttgcagtgagcggagattacaccactgtacttcagcctgggcgacagagcaagactctgtctccaaaaaagaaaaaaaaaaaaccccaaaaacatgacatttgagcggaaccttgcaggctaagtaggacaacgactatcattagtgtttcctgagtacctattatatactagacactatctctactcctcacaatgaacctatgagggagacattattattatagataggggttgagtgcatggactctggagctggattgcctggattcaaaatctcagttctgtaaagtactagctgtgttactctgggtgattttttataaatcacctctctgtgcttcactttgctcatccaaaaaattgggataataacagtgactccctccctcaaaatttgt

SEQ ID NO: 1244395 - DNA, 4001 bp, Homo sapiens
aattttctaggccttggcaccacccctagcaaggagagatgaggctgagggtgaagcgtgcctgcaatggattaaccctggtggagactttcttgaggctctgaatacatcaagtctttaaagaacccagggatagggacttccatagaagctggaaaaaggacaattgaggcggaaacaggtatcaggaccgtgctggaccacttaaggtgtggtgctacagccctaaaagatcctgaccctggacactgactgtaccccatccaagggacagccatgcagagggctccagagaacaaagctctttcaactgggaactcatctcaagcaataggtccagaggggcagcacaacaggtttggggtttgaatccaaaacccaaggcccctggcacagaacccaagaactaagcctcactctgtttcctcgtttacaaaacggagtgataatatccagatctcacggggctaaatgaagcgttaaaggggctaatacctgtgaaagcgctctgcaaatgttattacgatgcagcatcagctcctagctggagtcaagtgagattagagcagttttctccagttctcccagctcctgctccagtcggtttcgcggttaccagccaagaatttctggaaagggtgtgaacactgtgggcagaaaggagacggtaatgagtaaatggaacaccgaatcaaggcaagtggcaacctgatcaccagtccctccttctcagactgtttctttctaggcatggaggacagtgggagggcagacgctgagaagcgctgggtaaggatctcatcagtccagctggctccgcccccaggttcccggcgggaaccggggactcaaggtccgggcgtcgtgccgcaaacccagggctgggatgccgttccggaagcacctggcacggggagagtatgtccttcccaggaaggtggacgtgaccccagccaagggcgcagctgccctgacacctcccgggaccagccgccccctcccggggtcctcagctgggcgaagagtggagcaaggaccctctccccccaggccgccccctgccggccaggtggaaaggtggagggtgatcaagaaagacttgtttcaagcaagagccaagagctgggctaccccctcgtgagacacaagagggtcaaaaggaaaaggcaaaaaggagggaaacggcgctttggaaggggaggtggagacgcctacttcttcctcaccgctgcggggcaaactggcctcccaagccccttccgcgtctgaagggcttcagatataggttcgggttgacactcaccggtcccacggcccgagccgccgtgcttcaggcccccgcccggccagactggaaaggcgggcgggccaggtcaggcggcgggaagaacacgggcaggagagaaaagaggaggggcaagagcgtgcagtgaggaaaggaacctgggagcgccgaaccgcaccccgtcggctgcggcactgctaagtggccgggggtcggccggctcctccctaggggcggggcgagcactcgcggcgcggggcgcgcacgtggcttggccgggacgcctggtccggcttgctggcttcaactacggtgagatgttttgcgaccctggggtaaaatgagggtaaagcggcagcttcccacgttctgggggagaagcgcggaagcacggtttcctgggccttcgggcgacaccaggactgggggtctttcagtagaggtcgccgcggcggagtcttgtgcgagtgcggcggagtgttgtgcgaggccggcggacaccattaccctgatagggcctcgccgtgaggtctgaggggccgtgtgaggtgcatggcgcgccgtttcctctccaggcgctcctctcagggctacggccctagaagatctggcctgcaccagcccaaaggacatgacaggagtgggtagcccacgggacactggcacgagcgccatgatgggcggagacgcgcggaatcggccggcccggaagtgccagctgcctgcgtcggccggaagtgccgcgcgggaggcggaagcggctggttcccgcgtggtttggcgggtgcagcggcagtccggctgcccttcccacgtagaccgtctgctgggggcgccggcaccatttggagtacgtgaggtatacgggtagggcgcggccaggtcgggcgtctgttaggaaaaagactttttatttttatgtttattttttaagagacggagtctcgctctgtcgcccaggtaggagtgcagtggcgcgatctcggctcactgctgccttccacctctgggctcaagcgatcctcccgcctcagcctggcattacaggcgcgcaccaccacgctcagctaatttttaatttttctttttttttttttcactcctggccttaagcgatcctctctcctcccaaagcgctaggattgcaggcatgaaccacttctctcggctaggacttttatttttaatggtcaactgatttgagttggttactgtgagatattgtcacaggttccagacaggccataatgcacgcatgcattcacttacttattcagctcatggtacatttagaaactctaggttcatgtttaaccaacaaatgtgttcttccagtatgccgtttttcagacaatgatgtgtggcattcagaggtgttttacaacccttaataaaagagcaactaacactagtatgtgctatacatccattcttaatgcacccaccgtacctacttccatcctaacctgaaaacatagctgtctgtaaatgaggaaaggagcagcctggggatccagaaatcactgcaggggtcacgttttgtaccaaggcagtaggtttggagaggctctgaactggaaccaaggcccccaacttcaaaatgtacttggcccctagcgtttgaatttgctttaaggtcattagtaaatcctattcaatttgcatcaaagaatcttcatgatacgtactgtgctccataatagaaattcccatctgcctatgatgccattctcagagtttatatcccaaattcgctctcttttcctttgctttttcttttcctttttttttttttttttttgagatggagtctcactctgtggcccaggctggagtgcaatggctcactccaacctctgcttccccggttcaaccgattctcctgcctcagcctctaaagtagctgggattacaggcgggtgccatcacgcctggctaatttttgtatttttagtagagacgggctttcaccatgttgaccaggctggtctcgaactcctgacctcaggtgatcctcccacctcggcctcccgaagtgctaggattacaggtgtgagccaccacgcctggccccaaattcactttctttgtgagtctgtcttgtacagggaatagctgaagctttgtaaccaataatttaatattattagtatgacatttctatctgaacacattagtgttaagcttcttcccacaatccttggaaggggaatcacaaatcctaggtgaactcattagggcccaaagttctgctctgaaatctagtaataagagtaaaattaagccaggtatgctaattacacaagaatgctgcttttcacaaatccattcctttgctcttgttttcacaggaagaaaaatgtctgaaaagcagatgaaggaagcttttgtcagtaacctcaatggaaccaccgtgctggaaatcacccagggattgtgctttcctgcattctgtatcctgtgcagagggttcctgatcattttctcacagtacttgtgttctttttcacctacctggaaaactagattcctcactgactttgttgtcctaatagttcccatggtagccactttgaccatttgggcttcatttatcctccttgagcttctcggtgtaattatctttggggcagggctgttgtatcaaatataccgaaggaggacctgctatgccagactgcctttcctaaaaatccttgaaaaattcttgaacatc

SEQ ID NO: 1244396 - DNA, 4001 bp, Homo sapiens
ctgctgcttaccaggaccctgcctatgaactcccgagacccccctgctgtccccagtttaccccactgctcctgcattccgatgtgccagatggcccgctccagtcccctctccccccacccctccccccaggagggggccttcgcaccgtcgccagccagtccaagcttcagtgcctgcacctgcggcttccccagcccggggcactctccctgcccacctcactgagactcggctcaggtgtcacctcctccagaaccccttcctgattctcccaaacacgcagcgcctccttatcgcaccccgcaggaatcagctgtttccttgtcagtccctcccaggagacggctcccactccctacacgcagcgaggcacacggtggggctcagtcaccccttcccggacccctggatgaatgaatgaatctcagagccaggcgtgtgcgcgggaggccggagcgtgaggactgagggccgcgtggccatcctccttctccggccaccccggagccccccgcccgtcacactcggggcgcgctgggccccaggggcggagaacgggaaggggcgggtttaggcggcttctccggaacccagaggcggagcagggctgcgggcggggcccgaagggcgcgcagggtcctgggtcctgcagcccaggccgctcttccccgcctcccgctccccgcaggtaaatctaagtctccaccaggctgcgccggcgcctccgggtcgtgggaccccccccccccgcacgggtccacgcggccgttcttcggccccagcgatccccggccgtgacccctgcctcgtgcacggcggctcccggcccggccgcccgctccccacacccgccccccgcggccgccgtccccgcgccccgagtacccaccggcgtggctcttccggcgcgggcggggccgggctgggcggcgtggcgggcttggggatccgcggcccgggcgcactctccccgcccagggcccgccgggggccgggccgcagcctgtcgtcatcccgggcagggccgcgcaccctccggccccgccccgccccgcctcagccccggccgcgtccgcgaagcctcggtgcgtgcggcccccgcctcggcccgttcccggggccacagcgaacacgcgcgcgcccctccggccgaagacccggctccccgccgcgctgctgggggcgtgggggcgcccgactttctccctcctccgggccctttgcatctccagccccttcctgcgggccgggccagggccgcgctcccccgtttctacccacccgtgacccttcacccacctcccacaccgtccttctgttctgagtcttgggcggtcccagccctgcggactggagaggagcggggcgttgactgagcctggagcttccatgccctggtccttcgacctcacagcagccggcacttgccttttgtgcccagtattcacggttctgcccactgaggttcgggaagccggggaagagtcaagcccagacctccacttccaaaaatcctgctgctagtggcccttgcatccttactcttccactcaccccgtcttgttcagtctgttctggccccgccaaggatcggaacccctccccgctgctcagctcttgcccgagggctcgcctgagaggggctgcccggccttggggagacgctcccaccctcctcccagcccagagcatcccagcttacaagcttgcagggcctgtggggatgaaccacgcggatgatctccccggtgggtaccagctccacttgcagcgccattccgccctgcggagagccagcggcctgggcaccgcggcctgtgagcaagagctgcctgcccactggcgggctccgaccactccgggaccaggaacctacggtctaacgccgggatggccacttggttctgcttcaactgcagccccaggggatgtggctggtccagctcctcaggacacggctggagccgtccaggtctgactgggaggcctcttggcccggatggttggagcaggaagaggaggggctggggatggaggaaatgcctgttgtcccaggtaaccagaggagccgatgcagccacccatgggggaccctgggctccaggtcaaaggctaggacgcctttccccttccccccatccccacggcagctctatggctgggcccctcctcctgcccactctctggtaccacctagagagcacggggcccactccccaaaccagacggcatgccctcccctaggccaagaggacccgttagtaggcactggctttcctgcacatcccctcaacggggctgccccccacagcaggtgagcccccaccatgagtttgagagaccagggctgctggggcctggtcatgcagggcccggacagggggctgtcccgctgtgaggaagctcttggcttaccctcctctgagcctcagagcttgtgaggttagttcctgggttccctgggtgtgggcaacctctagccctgttcatcccttgcgtttcaacagtacccccaggtgacccccacccctgatgttcctgcttttctatttttattgttgctaaatcacagctgacactttcctggcctgagactgagccctccagtctccagccattccttataggaagtaagaacagggaagtggataggggaaacagacctttccagagggagaggctggcataggaagggctgagtcccgtgggtgtgtgctggcaccgacagccccataggcaggggccttccccccggcacccttctctctccccacagcttcccccgccccggaaaagctagcaagccttccttccttcctccgggaagcacatctatccagagcaggctcatccccggcggccacacaatggcccttatcagccgtggagccaggcgtagacccagtgcacaccaggtctcacttatttcctgtttccacccagtgggtcggggtggacccagaacggccatatcctgactggggcccagaggacggagagcaccccccattcccctttccgcctctcaatcactgctgggctcacccctcccacacaggaggctgggtgtgtggcgacctcagttcaccacgggggaggtgagcatgtggggggacccctggggtcaagccccggggccgcattaatcagaacggggaggcgggtctagtgcgatacactttctgcaattgttctcccacagtaatcttgagaatagggacatcatctgtattttacagactactgagaccgctctgcgggtgggttcagaccccattcctgtttctggtcctgtgggaaaccacaggtgcctggaactttgaagagactgtaccacttctctgagccttggctttcccatctgcccaatgaagggtgccatgcagtaaccctcgtgatggctgtgcatgtgagaaggaacaggtgggcaagtgagggctttggaggtccctaggtatatgtgttgggggcagggataggttaccatgggggaaaactcagcaagaaggggctgaggagaagtggggcagaaagagaagatggtggcattctggactggttaacgcaggcagaaggctcaacaccagggtatgcagagcagcgggtcaggagggatgaacaagagctcatttgacttaacagagtacattaagcggccaccggcatagatggcatgctccacctggttagggccccagaggctcaccattctagaacctcatcctagccccagtcctggccacttctgcaaatctcagacacagaagtctagttgggatctacagggtccctgttcctggaatctacagctagtcccaggcccatcaccgtacccccaccccccaatcatcagtcacacgcaagtgtaaaagccacgctaataattacccctgcacaatgtaacagtcacaaaacagccagccatggcctgctggaagccaggggacaattcttcatacacaggcttgcgggggagagtatgcaacacagagcaactg

SEQ ID NO: 1244397 - DNA, 4001 bp, Homo sapiens
cccgggccaggtgcgatggctcatgcctgtaatcccagcactttgggaggccaaggtgggcggatcacctgaggtcgggagttcaagaccaacctgaccaacatggagaaatccgtctctactaaaaatacaaaattagccgggcgtggtggcgggtgcctgtaatcccagctactcgggaggctgaggcaggagaatcgcttgaacccggggggaggaggttacagtgagctgagatcgcgccactgcactccagcctgggcaacaagagtgaaactgtctcaaaaaaaaaaaaaaagtttatcccggtgacccttggtgtctctttcccctccgcttgcctgtgtctgtgaccccagcacccctgccatctccccacaagggcctcacgtagatgagattctcccgaaatcgccgccgcaggttctcgatgaaggcggcctcgctggtgaagttctccagcagcacgaaatcctgcacccccacccggtcacgggcggtgagcgcactctccatggtcacccgaaccccgtcactgcccagggcctgcagagaatgggccacagaagagggtcagagtcatcgggggcggggcaaggccacttccctgcgcctgtgggactgagagggaacgtaggggcttgtggactccgggctagacacgggacatgagcatgacgggtgcggggggcctgggtgctgagggcctgggtgtggtgggccgggtgcggaaagccgggtgtggagggcccgggtcccagtgtggcagcagagggatcaccgaggctgcgggcacagaacagagacaacatgaaccacttgggactcggacacagggcatggacgcaggcaggaccagagggcagaacccgggaggtgctggttttgggtggagaaagggggggtcacaagaaggaactccttgaaatagcagaaagactgctctgttgagcttggaccaatcccctcctctctctggttccttcctcctaaaggaggaggagttgagttagaccaggtgacctcaggtccctcagctctgagccacgtgtgacaggtgctttggaggacaaatggctcagggtcaattctgcaggcagggtggggccgtctctcccacccagacccacccccacctccaccggtagagcgtcgagcaccaagcaagaggttactcccagactacaccagaggggttcccccagagggcctcccaccccagctgggctcagccacccactccagaacgcgggggaggccctccctcgcatggctggggccactccctttcctccagctgctgggctccccaggcacctcctccactgagagtcctgagaagcctcaggggatgggggctttaccatggaaagcccagctgcctctgggtcctactggagggtggagggtggtgcaggctgagcaagaccctcgccccacaaccagggctgagatggatccctcttcaaacagggtctcagggctccaaaaaatggacacccagagtatccagggtcagagaagaacaaggtggtggtgattgggggtggatcccaaaggggccgccggtgtcctctgaccacgaaaggcccagatttctggccgggggcctgcccctcccaggcttgtcctcaccgccccgctccaatcccgcgccgaagcggctgccaaatccggccgcggtccccgccccctcgccctcgggtcaggggtctccgcgttctcaggcgtccccggcggctcctcatccggccccgggtccgagcgtcccgcgccgccctccccgcctcggcctcctccccctgcaacttcccgggacgtttttccacccggaattcctgggccgcgcccgcttcctggcgaggccgaggcgacgccgcgaggtggggagggacgcccgggaccccccgccctgccccgccgcccccaggctcaccgacgcccggtagcgcatcctgcccggccggcctggcgcccgctccgctgcccgcgctccgggtcccgggctcggcggcggtggcggcggcgtcagcgagggagggcccgccccccgcaccgcccccacccgggcccctgaagcgcggggcttccccggcctcccccgcctcccgcgcggccgggctggggtcccctccaggtggggttggtggaggtgggggtgtcggggcggggggtccgcgggccgggggcgggggcgggctccgcctgagtcaggttttccaggagggacgccgttggcaccagggtggagcccggaacccgcgcggccgccgcgtctacaccgacccggaactcacttccgggcctgggactacactccgcggcgggcctgggcgctgggcgggcaccgaggcctgcgggtcccagaggaagcgggattttcctcccccaacccccgaactcgagtcccgggaaagttaaaaatagaaccaatgtccaaatacggccggcgcgcccggcgggcggagcgttctccgtgcgggacgccgtccacccacacgcgccggggcctggtccgagcctcgaacccaggaagatcttggttttcctcgtcagcacggagctcgcgccccagggacagggacggccaacgggtgccctggccgagcgcgcggagtacccggcccctctggagggctcagttccccctctgggaaattcgcgtcccccccgcccacggcatttggggcccacagcctctccccacccgggacaccccactcgcctctgggcccggacctcctccctccctcctttttttttctgttttttttttgagacggggtcttgcgctggctcccaggttggagttcagtggcgcgatctcggctcactgcaacctctgcctcccgggttctagcgattttcctgtctcagcctcccgagtagctgggattacaggcgtgcgccaccacactcggctaatttttgtatttttagtagagacggggttttaccatgttggccaagctggtctggaactcctgacctcaggtgatccacccgcctcggcctcccaaagtgctgggattccaggcgtgagccatcgcgcccggcccatctccctccctgctttgaagggggcctccctagtccctccggatctccgggacgccccccacctccgaagcggcctcggcagaacctccctcgcttggctctgcgggcaccaccctccctcgcctggggcgaaccttggctcagatcccaccgcgggcaggggcggggacgtctagagtctgcaaaaggctgggctggttcttcctcgcggtgggactctgagcaagtcacttaacgtttcggcttctgttcttcatccctaacatgaggctaacacaggcctagaagggccgttgggtggcctgagatagagcgtgaaggcacctccagaccccctatagacctcgctgcccccacccgccgccttccctcggccggacgctcatttctcacttgcttgcgggcagaggcctactgagagccaggccgtgggccacgcttccgatccggtggggagagcctcaggcgcgtctgcaggcacctgcctcctccaccaacacaacggcgtacacagactcgccctggtggggttaggcagagcgggaacccaaagccccagcgccccacccccagctcgcggaccccgctccctggggagagggcgaggctgcggcaggtgcgggccggatccttgcggggaaggctcgtcactgcaacaacccggccggagcggcggccctggggacccccgagcgggggcaccagctggtgggggagtgggagcgggggagggggaatggcggcgtctcggacagaggcgggggagggcgggaggagacgcccgctgcggtgcccccaggtttaaaatctagagggagggccgggcgcggtggctcacgcctgtaatcccagcgctttcggaggccgaggcgggcggatcatcagagttcaggagttcgagaccagcctgaccagcatggcgaaaccccctctctgctaga

SEQ ID NO: 1244398 - DNA, 4001 bp, Homo sapiens
aaacaaacaaagaaacaaagcaataaacccataacatgttaacataaatttgtatgggggaaaaaaaaaagtaaacggcccaggagcggtggctcatgcctgtaatcccagcactttgggaggccaaggcaggcaagatcacttgaggtcaggagttccagaccagcctggcccacatggtgaaaccctgtttcaactaaaaatacaaaaaattagcagggtgtggtggcacacgcttgtaatcccagctacttgggaggctgagacaggagaactgcttgaatcctggaggaagaggttgcagagagctgagatcatgccactgcactccagactgagtgacagagacactgtctcaaaaaaaaaaaaaaaaaaagagggcctttgacccctaacctgtactccctgtttaatgtccttgtagagagaagggtggcactgtttgagctggtcatcacagcctggcattaacaggcctgctctcctgcctccactcctcacaccaagtagtcacgacctgctaaaacctcacctccaggccgggcgcggtggctcaggcctgtaatcccagcactttggtaggcctaggcaggtggatcacaaggtcaggagattgagaccatcctggctaacacggtgaaaccccgtctctactaaaaaaaaaaaaaaattagctgggcgcggtggcacacacctgtaatcccagctactcaggaggctgaggcaggagaatagcttgaacccggcaggtggaggttgcagtgagcagaggtcgcaccactgcattccatcctgggcaacagagcgagactccatctcaaaacaaaacaaaacaacaacaaaaacaaacaaaaacctcacctccatcactgctccttacctgggccaagacagcagcctaactggcctccttgccttcctcctaccaatccatttcctctggggcaacacaaatcaaatcaacacctcatgttcatagagtgaaggtttaggacaccctccatatgccaggcccatgattcacactcactgctgcttaccaggaccctgcctatgaactcccgagacccccctgctgtccccagtttaccccactgctcctgcattccgatgtgccagatggcccgctccagtcccctctccccccacccctccccccaggagggggccttcgcaccgtcgccagccagtccaagcttcagtgcctgcacctgcggcttccccagcccggggcactctccctgcccacctcactgagactcggctcaggtgtcacctcctccagaaccccttcctgattctcccaaacacgcagcgcctccttatcgcaccccgcaggaatcagctgtttccttgtcagtccctcccaggagacggctcccactccctacacgcagcgaggcacacggtggggctcagtcaccccttcccggacccctggatgaatgaatgaatctcagagccaggcgtgtgcgcgggaggccggagcgtgaggactgagggccgcgtggccatcctccttctccggccaccccggagccccccgcccgtcacactcggggcgcgctgggccccaggggcggagaacgggaaggggcgggtttaggcggcttctccggaacccagaggcggagcagggctgcgggcggggcccgaagggcgcgcagggtcctgggtcctgcagcccaggccgctcttccccgcctcccgctccccgcaggtaaatctaagtctccaccaggctgcgccggcgcctccgggtcgtgggaccccccccccccgcacgggtccacgcggccgttcttcggccccagcgatccccggccgtgacccctgcctcgtgcacggcggctcccggcccggccgcccgctccccacacccgccccccgcggccgccgtccccgcgccccgagtacccaccggcgtggctcttccggcgcgggcggggccgggctgggcggcgtggcgggcttggggatccgcggcccgggcgcactctccccgcccagggcccgccgggggccgggccgcagcctgtcgtcatcccgggcagggccgcgcaccctccggccccgccccgccccgcctcagccccggccgcgtccgcgaagcctcggtgcgtgcggcccccgcctcggcccgttcccggggccacagcgaacacgcgcgcgcccctccggccgaagacccggctccccgccgcgctgctgggggcgtgggggcgcccgactttctccctcctccgggccctttgcatctccagccccttcctgcgggccgggccagggccgcgctcccccgtttctacccacccgtgacccttcacccacctcccacaccgtccttctgttctgagtcttgggcggtcccagccctgcggactggagaggagcggggcgttgactgagcctggagcttccatgccctggtccttcgacctcacagcagccggcacttgccttttgtgcccagtattcacggttctgcccactgaggttcgggaagccggggaagagtcaagcccagacctccacttccaaaaatcctgctgctagtggcccttgcatccttactcttccactcaccccgtcttgttcagtctgttctggccccgccaaggatcggaacccctccccgctgctcagctcttgcccgagggctcgcctgagaggggctgcccggccttggggagacgctcccaccctcctcccagcccagagcatcccagcttacaagcttgcagggcctgtggggatgaaccacgcggatgatctccccggtgggtaccagctccacttgcagcgccattccgccctgcggagagccagcggcctgggcaccgcggcctgtgagcaagagctgcctgcccactggcgggctccgaccactccgggaccaggaacctacggtctaacgccgggatggccacttggttctgcttcaactgcagccccaggggatgtggctggtccagctcctcaggacacggctggagccgtccaggtctgactgggaggcctcttggcccggatggttggagcaggaagaggaggggctggggatggaggaaatgcctgttgtcccaggtaaccagaggagccgatgcagccacccatgggggaccctgggctccaggtcaaaggctaggacgcctttccccttccccccatccccacggcagctctatggctgggcccctcctcctgcccactctctggtaccacctagagagcacggggcccactccccaaaccagacggcatgccctcccctaggccaagaggacccgttagtaggcactggctttcctgcacatcccctcaacggggctgccccccacagcaggtgagcccccaccatgagtttgagagaccagggctgctggggcctggtcatgcagggcccggacagggggctgtcccgctgtgaggaagctcttggcttaccctcctctgagcctcagagcttgtgaggttagttcctgggttccctgggtgtgggcaacctctagccctgttcatcccttgcgtttcaacagtacccccaggtgacccccacccctgatgttcctgcttttctatttttattgttgctaaatcacagctgacactttcctggcctgagactgagccctccagtctccagccattccttataggaagtaagaacagggaagtggataggggaaacagacctttccagagggagaggctggcataggaagggctgagtcccgtgggtgtgtgctggcaccgacagccccataggcaggggccttccccccggcacccttctctctccccacagcttcccccgccccggaaaagctagcaagccttccttccttcctccgggaagcacatctatccagagcaggctcatccccggcggccacacaatggcccttatcagccgtggagccaggcgtagacccagtgcacaccaggtctcacttatttcctgtttccacccagtgggtcggggtggacccagaacggcc

SEQ ID NO: 1244399 - DNA, 4001 bp, Homo sapiens
tttaaaaaaaaaagcagaaattctaagtgccttccctcaatttactttttaaaaaccacaagagttttaattctattacagaggagtagtcctacaaactaatgtagccctgttagactctatgccttcaatttcaaattctgaaaattctgcaaaagctctggctaagcccatgtatttgctggaggtgaaagatggaggttaaaatgaaaggcttcatattcaactgttactacatggtcttgtatacagtatgtacataataaatgtaccaatgtctgaaaaactgaaatgattataactgagagtgacaaaattataaaggcatttctcaaagcacacaacttatttcctgtgggggagaggagtagaatctcttaatttaaaacaaccttaatctatgaaattgctatgtaacttacccctttatctattttatgtgcacttgggaaaacttaaaacagttttactaatatggatttgccaggcactaatctttgaagtatgtatacacatattattaataattcatttaaccctcaggacaaccccaatcctacagacgggaagactgaggcacagagaggttaagtaacttgctcaaagatcacagcaagaatgcagtggaactagaatttgaatctcaacagtctgactcttaatcactatgataatgggtattggttatagctgatgtagaggtatatcattttgattaatatttggggtgatttctataaaagttgtacatccaaaccttgatcagaaatgtaacatcctatcattatgctggtatgtaatcaacctgattgacccctgtcaactggattgacaggggtagttaataatgaaattagggttaagcacccaagcctagattatgactttcactttataagcttaaggaatgatgtttagctataaaccttagaagaaatgcagccaaagcttgcagggaaacatacacacgcacaccaaaactcagctattttgaaattccacttactttaatgtttaagtcaaactactttaaaactgtttacatattactctatcaagggtgaaataatcgcatgtaaagggctttctaaaacaaatccacatcttggaagcccattttggggcgttgagttgtgactacgttctcaaggatgttaataacacaagagctccatccactaactccttgaaaaaaaccaaaaccatgaacgtcttgtcaaattcagacagtttatcttggcactggcaagtacagcagtctcttcgatgtctggaaacgtgtctaattacgtttagagagtaactaaaaaaatagccagtgtcccggaacagacagctcagggatcactccatagcatcctgaatgacaggatggaactacgccaggaggaaaaaaaaaagaagggcgaagaaagaaagaaaagaagcaagtgtaaagccgggatgagacgccagcctctctccaaaataatcctccagtcctcctagggccttcggggccaccgcaactctcgttcaagttatttcccttcagtttccatgaggtcaccggcccgcccacatccctcacctggcgcggggaagcgcgccctcccgcgcggcacaccctctgcacctaaaccccggacagcgcccagggctcccctctcagggaagcgcggcccttgagctcgacacgccccccgcaccccaaagcggccgcaccccaggggcgtccgctctcgggaaagcgcagccgcggagcttggcagacccccggacaccgcagcccggccgcgcctccatccctggagcttgggcgctcccgacaccccggatccggccgcgccccgaggcgccccctctcgggaaagcgcagcctcgcgcccctgcgcgcggccgctccgccctcacctgagcctgaggttggccatgaactcgggcatggagacggtgtccatcagcacgaagtctgccttgccgaattccaggctctcctgctccgccatggcgccagcgcgggggctcaggtgggcgcgctcgggcctccggggccgctccgtgggcccgcgatgagctcgggaggggccggggcgaggccgcgccgcgaggctacggggagggggcgcgcacgccgctcggcgggtccgggccggacagaggccgcctcgctgctcctcggcgccttctcggccggcgcggctccgaacgggacgcacccgacagtttccgctcctcccgccgcggctgccgggcgctgtaggggccgggacaccgagacggagacggcagcggctggtcccgcctccagcctggggctcgtcccggctccgccccgcccgggcctcccggctccgcccctcccggcccactgaggagcccgccccagccgcggccctggccgccgcctcttcacctgggcggcgcgcacgcgcgggtgggcggcggggacgcgcgctgggccgggcggcggcagctgggtggcagcgccccctggggacaggcgctgggatctcaggcggccaagaggatggccgcctgccgcccacacttggtagctgccaacaaagttagaaaagtagttcgtggagcttttcgcgaggacaattcattatgattctgtcaccctgctccaaaacccactcccgcctctctactcacaccctgcccattcttgaagtggtggttcaagcacagactgagaggtaataataatggctaacatttttggggcaccaaaaatgcccagagctgttctcagcgccttagagaacttttaagaaacttgccatacgactaggaagtggagcagctgcggtttcacgcaggtcatttgacttaggagccgcagcgttcaaccacgtctgactacctccattcttcagtggcccattttctcttccactcatccgagcatgtcatcagacattaccttatatgattattaagtttttaatatatctttgtatcatctctccaggattattgcggatgtcttgagcatgggaccattctttttgcatccaccaaataactattgtactactttgcatatataaatatgaaatccatactggttcagtggaatgaagtgagttgtaagtagtctccaatttattgatacattggttgagcttggaaaattctttttgaactcaatgtattttcccaaagaaaatatactacaaatgactttctttcttttttttttttttttctttttctggagacaaattctccctctgtcacccaggctggagtgcagtggtgcaatcacagctcactgcaacctcaaactcctgggctcaagcaatcctccagcctcagcctcctgagcagctgggactacaggtgtatgacaccatgcccagctattttttttaaataaatgactttctaaggtatctacatttattcagtcctgtgtttctgttaggacatcttctattacaaaatctacgaggaaatctagaggcctccaaggacctggctgggcttcaactctggctgagtttgagatgagtaaaccagactgaaggaccttgcccaaggcctgcttcagctgccagccacccacacttgctaagagaaaggaaaggagctttgtcacctcctgagggactgcctctgccatcagaaaaccaccccaatccctggcaccagcagagctgggttgcatctgactaccgttagcagctgtccttcagaaggaggagatccacctgtctcgatatcagtgtcctcatttgtggaataaaagctctggaataaggtaggactgtcctatggttgggtcatttgtggaggtgtcggtcagtggctaagtaggttattgcatagggtatggttgtattcctaatgtttgtattggcatgttttaacataagcagaactgaacttcaagaaggaaagaaagaaatctcaaactgtatgcactttggagcatccagggaccacaccccaaaaccttttggtaaattatatatgtgtgttccctgagctctgtaggtgttaaaaattag

SEQ ID NO: 1244400 - DNA, 4001 bp, Homo sapiens
acacaaaagcctgcacaactttaaaaaaagtgaggctggaattctctgaagctccaggatcagggtcttcagggtctacttaggagacaccaggactccacaaatccactgagatggaagttgggagtgtggcaaaaactgacttccctctccactgcactttagctgaaggagggattgataagcgttttgcaagtctactatcaagtacatcaccagatccttttagagacaaaccagcacccccagaccctccacatttaaactggcaaggaagcatttgaaatgaatgcagcctcatagaaaacaaatctacatcctctcttcttcagaaaggtggcagtgttgccttacagttttgaccgaatacaacgcagtggtgaggtctctagctggttaacagatcaaccgcctcacctcaccatggaaaggaaaggaaggacttaatccactgccgaccccagtggctggcggactcatcccagagcttcaggggcagtgagacttgtgaccgcctaagctcttgagttttcaacttgcatcaacaatgaagatcctaagaaaatctccagttgactccacaggcatctaaaaaccaagggcatctaagaaagtcacagatgaaccttacctcccagcatctacatttttcctttttgaaccatccatcccaagtgaaacaactgagttggccccatgtagaagggctaaggaaactttagcttagcaacctatgccagcatctttctgacacctgttatgtctaatgttcacatcagagttctcctaaaagtcatcaatctaagtagaagtcctacattgttgagtgtgttgttaaccagttttctaaaaccaacattatacacagagctactgaaaaataacttcagaagtcaagtgttgctttgtctaaacgtggagacccacacagacaccttccatgggcgcgtgtacaagcccttctggagaagcggttagagctcccgtctctcccttccactcacctccactcagcgtcctttgagaagtttctccatgtgccactaacacagaaattttgggggaaattctctatttataaatatcagatggtttgggaaaaaatatttgtggcactgggctttctttttttttctacagtgatgtcattttaaatacttggtgtgctccaaatttgctatttttacttcccccaagtgactttttttgggaaatacatttgtttggattagctacattttaagtgacccctgtacctaacacacaacatcaggttcatcttctcagcgattataaccgatactacgcagcttccaaacttgaaatcccttatttgttcatttccaaagttgctccctctgaatgtacccctccaaaatttctattcatagatgcagagaaaataaaataaaaggattggccttttcacagatgaacaaccacactcgaccacccaaagcacttacaacggaagacacgaaaggcccccaaagtcaaacaaaactcttcgcttccacaatgtgcttttggggaacaaagttgaggtagacctggcaggctttgaaacatttattggaaagcagttctagagttgagaattgcagaagaggaaagtttaagaaggaatgctaaatgccttagccctacctgatctgaacttgctcctaatcagcaaggaatgctcagaccccaggagtgtcatgttgagtctcagcaagccgctggtcccttggccaggcgccccctgttctccaccagcaacaggctcccgggagcccagctgaccgcagctaacaacccagaattcatccaactctccgtgagctcccctgggtaggagtacagtggcagccagtgtccccagaaaactggcgcctcccccctcgccgtgcggggctaattaactcttagccggcgggaccctcctcctcctcggaggttggccaggagcagcgcggcatcccaggcgttcctgtctgatgtcataggctgccggcgattgcggagaatcgccaccacgcctttatgaaggtcccaactttgccatctgataccctttactactgacaggcgctcagccaatcaggagcggcgagcggggtctggggacccggagccgccgaagccgtctcgggaaccggctcttaactctttgcggcgggccccgcagccgccgaggcacagagggcgggagcagggccaggggtcgggaatctgggagaggggcgcgagctaaagagcggatgcccggaggaaagaaggaagggctgcgacgccgcggggcttgcaggtggttcgcggggctgcggcagccgctgggagctccgaggtcctggggatgggcgtgcgcagccggggcttccccggccgggcttctgccggcgaaagggaagcggccgggatctcccgccagccggctgcaaaggctgcgcgaaagggcgtgcgcgcccgcgggacagttcacgcggggcaatttggaaataagctggacccctgagaagaaaagcttccgacggaccgaagcccacgcattcccctcggtttgaggggctcagggcactggcagagacgattctgtatctcgcagctccaatactggacttagatgcatttccacggggaaatggaaaggctttcattttctaggatatgctttttggggggacaaatgtgacacggcgcatctggagatccagctgcgacacaacgctcccacctcacaaccccgagggaatgggaaaagatacctgagttggagtgaaaaacctactgggctctaaatagggaggggctctggagcagggggcaagtcagagctcgggctgggcttagcttgggaaggctcaaaaactttgcctgcgaatgagtctctccttaggggaaaatccattccgtaaccgacccagagttatttgtgcatctggccgaggtgttataggcacatggatcaatgaaataaaacaaagacccatctctcaagaagcccgttaaatagttggtggctcagaacataaaaaccactctgtatacgtatataattagggcttatttgcaacttcatatgcacgtggaccccgggtgtcgtctattacacacaagcctgcctgcatactacgagtccttaaaagatcagtcggtgacagatggagacccgaggtgacaatagctcatggggacaacctctaatgtcctggtcccggcctctgccccatcccctgttgctgaaaacacattagaggggttagccctagagcttactctctggatctgagcggggcgattttgtaaataaggtcttcagggatagacaccttcttgctgatgtgtcagagacgaggaagaacaatccatccatgttccctttggggatctagtcctggcctgggcgcctgtctataggctgatttcgtgtgcaggagcatctcagcgattacgtaacatcattttcccattcctgctataacaaattaccacgaatgtagtggcttaaaacagcacacattaattatcttgctgttatggagggcagaagtccaaagtgggtctcagggggtcaaaatcaaggtgtcagcggggctgcgttagtttctggaggctctaggggaaaatcgatttcctcaccttttccagcttctagaggccgcccgagtacttggctcatggccgcttcctccatttttgaagccagcaatcgtgggtcaagttcctattgcatcttaccgctttaatgctcccttccccaccttctgcttccctcttctacattaaccttacggcaaaaataaactctatcataaagtcagtttattatcctccctaatctcatccactgcctggattccctttgctgtataatgtaacctattcacagattcctgggattaggacatgaacatgggaggagagggcatgattccgcctgagatctttctttctcttctacctctcctggtcttcagtcaacccccagccccctggtcttcaatgagaagaaggaaagt

SEQ ID NO: 1244401 - DNA, 4001 bp, Homo sapiens
tcagtggacccagtgctgagaaaagcccccacatcccggaaaacccactttcctttcacgacccacatctcaatcctgaacatctaggctggaacctgcacacctccccctcagctccgtcgtgaatgggacaacaatctcgtgccctcgttttatggtgcagcttctctagtatttctggggctggggggcggggctggaggggaaggagtgtccacgcatcaataaagatttaacgaactgaacgcgctctgcgaacagaggcgtggcacaagtactatcacccctgccctgtgccgaggaacaggaaacatgtgccagggctacaaatgagcagagaggagcatccttgagccccctggccttatcgcttttgtccgttcttcctggccagacctcagagatctgttcctgaccccaggcacctccccctcaatagagtggaggggcccagcctcggccgcctgccgctgctccccttggggacctgagcccgttctctgaccccagcttagaggaactcggtgttgccaggccggggtgggaaacaatgggccttccggagcaggatgacaccccctcccgccacaattctggagcagcagccgtgggagggaagatgcaggggcccaccctggggcctgttggtccgtcattcagccctgccccccatctctacccctgaacttgagagaacctttggcacccctggacatcttggttgggagaggagggttgagggtgctcccgacttcagatgagccctttcctctagggatggggtgtgctatcctgcaccggcatcccagctacacacagacacaggcccattcggtcataagtttaatgaagtctgaaaggtaagcgccatcgtggtcagagatacggaggcccggtcagactctccctctgcacctcaatggaaacgatgtggtgtccgggtaccatggccaggcccagcacacggggctccccggcagagaaggaatctggaaagaaggatcagagcatcaggaaagtaggccagaatcagtcccgcccctctgagccacgaaaacgagccccagaaaacaagggttgcagccaggcccttaaggggaaatgccttgcgtaaggttccgccacattaccaggcgggtgtgcattccccgggcactgacccgacggcttgaggaactcctgcgccgagcccaggatgacattgcagtcacggtcagtgcagaggaagcagccgaccagtgtccgtccatctgtcatgcgaatgcgcatagtcttgttgagcagcgcctctagctgctgtcgggcgcgctcagccgccgagtcctcgcgctctccgtccgaatcctgcgcggggtgtaacaagcgctcagaccgcgcagcccaggctgcccgcccgcggaaccacagctcccggcagcccgcggggcactcacacaaagcccagaggctgccgggagctgcagttccccaccccctccatcttgctgcttgactgcccctcagtcccagaaccagagcccgtgctaaccccagcactggagctgctctgacgccgactgcaacagccattctcttctcgtagcagcatggtcggtccagctccggccatttgcccggaggcctcctctgggcctttcaacttcctaagcacctttcaggttgggtggtccgagatctcgcgagcgctcccgacctctttcctttcgcgagatcccctctcctccccctcctagtctcctcggcaacggcacagatctcgcgagcttctcctacttctctagcgctgtggctcactgaagcgtactacgccggatgtcttaagatatcgcgagacctttacctctggtttcttacacatcctttagaaactggaatttagcgagaatacattctttcatactgcctcctcccttgtttttctgtctcagagagatagtctgtcctaaatatcccatgtagcccaggccactgaattaaaacggagcgtattcgttctctgccccaccccgcaactcctgaaagcggcgcaactcaattacttgatccttatatgccccacgcgggactcatactacgtttcccgtgaacacgtgcagtccaaaccccgcccctgatatttatctcagtggacggtggccggaaaaggacaatggtttccatgtcagcggataaacgctctcccctcggctcccggacgcgacggaggtcgtagtagtagtgagtacgtgctgaggagcaaaggagtaaccaagagatccagtgaccgacagagcaagagccatgccgcgccggggcctggtggctgggccagacttggagtattttcagcgtcgctatttcacgccggcggaggtggcccaacataacaggcccgaagacctctgggtatcttacctgggacgcgtgtacgacctaacgtcattggcacaggaatacaagggtaagggccacacgttgggccggggccggagtgtgtgtgtgtgcacgcgcgcgtttgcctggttctcgaagggctggcattgacagtggctgtgctgctcttttcaagggaacctgctgctgaaacccatcgtggaagttgcaggccaggatatcagccactggtttgatccaaagaccagagacgtgagttatgctggaacctgggattgtgggtagaggaaatggagagcggggatgggaaggaaaggcggaggctagccagagcctaatggctgctctgacaccctcgccccaaaccctcctttaaagatccgcaagcacatagatccgctgaccggctgcctgaggtactgcaccccgcggggccgctttgtgcacgttccgcctcagctgccctgttcggactgggccaacgattttgggaagccctggtggcaggggtcgtattatgaggtggggcggctgtctgccaagacccggagcatccgcatcattaacacgctcacgtcgcaggagcacacactggaggtgagaactggtgacaaggagcaggttagaaggaatggggaatcccagcaaatctccaggccgatcttcagggcaacattttttccataaccggtgggagtgtattttctgtcctttacattgaggcaactgaggaaagcacagcacctaggtccccagggttgggaattctaggagtgtctgggtcacagggggacaagagactcctttataagcctgggaacagcagttcatgtatcttagtgatggtggtccttcgaagctcttacacgccgttttggacagcaattggactttctttttaatctactctgttgcatggatatagtgaggggacagttgaccctttatggccatccggtagttagaagtggctgccattaagatctgtaggactttagggtctgctcattgcatgctggagtttcagcttttttttcccggggccgtagagtacctgaagctgctatctgccaagggaggcactttgatcccagcgtgtgtatatgtatactccatccagaattctgggggtggggtgcttctgtgttctccaggtgggggttctggagtccatatgggaaatcctacaccgctatctcccctataactcacatgctgccagctacacgtggaaatatgaagggaagaacctgaacatggattttaccctggaagagaatgggatccgggatgaggaggaagaatttgactatctcagtatggacggtacacttcacacacctgcaatacttctgtacttcaatgatgatctcacggagttgtaggcaaggagatgtacactcgtgtagactcaagacgtatttcgagtttggctttttctgtgccttgaggaaaagtggtggggccgaggggtgcctggacccagatctccactcctctccaggagctagcctgtgcccttctgaagtgtaaaggccctattccctgccttcattacagtttgctctgagaaaattagtgaattaatctttgggaatgatacaagaagatcaagtaccttggtttag

SEQ ID NO: 1244402 - DNA, 4001 bp, Homo sapiens
tgctgagggcaactctcctctgcacagcaagttgtatttaatagtatatttgattttaaaactattcatccaacaaacaattattgagggctagctattgtcaatttgttctttcattcatttgcttaacaattatttactgagtccctattactctataggaactgggctaggaacccagcagtgaataggaaagacatggccactattcttgcagagacttcatccaattaagaagacaaatactaaacagcaaagagaggcgtaatgagaacatatttcagagagacctaagctagtctagggattagggtaaactttcctgaggaaatgattttgaagccgagatttgaaagatgactaggaatgttccaggtagagggaacagcatgtgtaaacgcttgagggcaagggagtgtgatgttgcaggaactgaaagacgttcagtatgaccagagcatttaggggaatagcagaaaactgtcagaggccagaccatacaaggcctaataagccacatgaagagttcagactatttcagttgctcatacactaaagaagggatatgcaactctggttgcagaatggatcggacagaagagagactggaggtagagagacggtttagtaggttattaggaaaatctgggagaggatgatggcagtagagacacagagaggtgcatgaatctgagaaatgctcaggaggcagtagcaataggacttgaagatttactgggtgccagagattttaaaggatagggaagagctaaggatgagtatcgagtagctggtttgggaatgaagggtatgatggtgactttcactgagctggggacactggagaaggagctctagtcatccggtagaggagagatgatgagtatacttctggctatcctgtgattgaggtgccgggagagtatccaaggaaagacggtaagtaggtggctggatatccaaatctgtgtcttaggacaaagatgggactgaaactatttgaggatcatcagcaagagaaatgaatctgatcacctatgttgagtgtgcagagtgaaaagaacacaaggccttggaaagacccctgagatgcactaatatttaagaactgggtagaagaaaagatgaccacaaaggaaactgaagaataagccagggaagaaggtagatccggagagtacggcacttggagaccaaaaaaagagagcatttcttttcttttctttttccagcaagaagtcataactttatttatgatagaaacagtacaaatttcaaaccaagctgcagttactcctttgagacaccaaaaaaagttgctttcagatggttacactgttaattccataatcgcatttacaatatcattactgttgttcttcagagctcggactgcctttgctctcgacacatttgcttgtgacatgaccaatttcacgtctttaacttctacacctgtttcatcgacctcttcctcttcactctcctcttgtacagttggagtctgtgtgttttcttgaatgtttccgacagcttcaccttgaactctgaatttctccgcagctgctagttgtgcttgctgagataaatcttggatcttggcttccccaaaaactatgtaggcatccgaagcagggctcttgtagacgtccagttttgtgatgacaaagaggatattcttagatttccagatagtgactctagtaactcctgtaacctgtagaagacccagtttggacatagccttccgtgccctcttttcactccgactctgttttgctttaccgactggttcttcatcaatttcagctgctgccaccagccaggctttttgtgtggtggtctgggtggaatcctgttcttcaatccctggtactgattcaccactatcagatgctgttccagaccctgtctcagcctgggactgcggcaactcctgctctgtagcagggacggtttctgtggcttcgcccggcattttgtgcagggaacgcggaagcaagatggcggcagaaagagcgcgagcgagagcgtgacccacgcttgttgcagcgggaagcaaaaagagagcatttaaaaagacatttgtcagcagtgctacactgccatgaggtcaagttggaatggaaaaggatctattggatttagagactgtaagttacgcggtctgagtggtgcggtgtgagtggcacttgggaattggttaatggtcagttccttgaaaaaatgactaaattggggaatcattttttaaaatttacattatttaacatgctgttttaactgaaaacatatcactgtacttttatttgccaatcttttgataggagccgtaaacctttctttgagtattatctgtttattggaattcagcctcggttttctcacataaatcatatctataaaggtattgtctatcattccctgttttagtttatttaaaatagaccaagaactcaaaggtgctcatgaagcaatctgaacgcagaatcctagatatgtatggtttccctcgatcttttcttgctcccccaatgaatggaaaattgtaaatgtttccaaaccattcaatttaatttgcacagaaacaactattttattttttctatttatatttcatataacagttatataatgagtttacgtaataatcagttaaattacataattatagtaataagaatacccagcataaataggttaaataaacacaactgattcttggtaagcctataactgtatagagaaaacaaaaaatccatagaaaagaaaaccaaaaaacaaaaatccgcgtatgtactaggcagtagcacgttagctatagagtgtgccgttggcttccaccaatatgtttcacgaaggcaacagagagtatcagtcaatttgcattatgttggctaaatatacgttaagagagtttttgctttagttacaggggatgactcagaaggcagttagattgcagtgggctgagaagtaggaattgaagaaatggaaagattggattagatcagagtactcttataagaagtttaactgtgcgggaggagacagtgcagtagctgaagacataattatagttggcggataggtaaacacatattcttcctaagaagagacctgagcatgtttaaattctaaaaggagtagttaaatacaaatgaaagagggaagttgatcagtcaaggttctgaggagccaggaatgaaatccatggcacaagtagaacgactaatcttgaatagcaggaaaggcatccttttcattgtaataggaggaaagaagaaaaatatggatttgggtgcaagcagatttttaggtttggtagcacgatgtcaaaggagttcccatctggtaacatttatttttttttttttctaagaggctagaggagctgtctgctgagagtgaggggaaggcaagagagttaaaggtttatgtatgatggaaaagatttggaataggtgctgcatagaaggaagaaaatgatcactaaagaagcacaatagggtagtaattcagtattgaggtcctagctgagataggcaaatactgtgctatatgctgggttgagcaggttaaatgggaggaacatgcaaagataggtaagacacagtttctgttcatcaaatgagaaagagagacatataaacaaaccacttaaaaagaacagaagatataaattgtggcatattgtgaaaattagtaaactaggttgcacacaaccacattaataaatcttagaaaacttaatattggccgggcgtggtggctcacgcctgtaatcccagcactttgggaggccaaggcaagaggatcacaaggtcaggaatttgagaccagcctgaccaacgtggtgaaaccccacctctactaaaaaaatacaaaaattagccgagtgtggtggcatgcctgtaatcccagctactcaagaggctaaggcaggataattgcttgaacccgggaggtagaggttgaagtgagccgagatcacgccactg

SEQ ID NO: 1244403 - DNA, 4001 bp, Homo sapiens
ctgcataggggagatgggggaaggagccccactcctcaaactggaagcctcagttttttttttttttttttttagacagagtctcgctctgttgcccaggttgctatttctttgtattttagtagagacggggtttcacaatgttggccaggatggtctcgatctcctgaactcctgatccgcccgcctaggcctcccgaagtgctgggatgacaggcgtgagccaccgcgcccggccggaagcctcagtttttaggaggcccaagccactgtgcacgctgaaagcacttctagagagagacactgcgcccatgctggggggcgggtgaaaacacctacggtggctcccgccatagaggagggtggggaagggacagtgggcacgcacccgctgccagatggcctcctggccgctccaggccagtgccaggttgatgccattcagcgccatccagtctatctctcgctcccagcgggcccagtcccaccacacgaaagagtagctttgcgtgcacacattctggtaatagcggtacctgcgggcagtgtcatgagcaggggcgcatcccaccctggagggtccacggccctggaacaaatcccccatcccccacctagaggagaggggaggggctccaaactcggcccttctgctgcacactgggacccaccccaggtggagctgagaccaggtaccggggctgggcttctgaggcactcgtcccctgcactctcccagggccctctagcctggcgggtatttgggtggcatattccactttcatgccacactgccagagcccctcctctgcacggtgttttcctggaacggggaatccctgcccccacagtctaacagatgggcaggggaggacagctgtgtgaacacatcactccatagtgtggcaggcgctggaacacaggcctgtagggtgggggatggaggcgtccttcctcagtccgcaggttcaaagagaaggtgggggaggaaggcaagaaaattcactcatcaccaattgtgcaccacaaattctatgcccatcatcgtgcaaatcctcacaataacactgcacggtaggcgtcttctttccgtttttcaggtgggccagccgaggctctgaaaggcagagtggctggctcaaggccacacagctgctggaggcggcgcagctgggccttccggccagcgctccccgctcagcctcccgatttgggtggcagcggctccgggagggggtaagcgcctcgggcggacgcggggaagcttcggggcggtacctgttgggcgtggcctcggtcagctcccccggcacggctggcagtggccgcggcaggcgcagctgagagccggaccaggccacgtggcagccacagaagtcgcgcaggtagcggtgcagccccgcggcggccgccacgcccgtggagccgcgcacccgcacgcgcgccgcgccgccgccgcccaggctgtaggtgtccaagcccggcttggcagccagagcgcgctccaccgacacggagaagtcggccgcggggcctggccccagcagccgggccacgagcgcccgcacggccgccgcctcccgggcctcgtcgcctgccgcgcccccggccccggccaggagaaggacccccaccgccgcggccaccgccaccgcctccatggtctcagtcctgcgggtcccgcgacggccagggggtggggcggcccgcgtccaatcagctgccggcctccggccacgtggacccgaaggctaagcccgggctcagggccaggagtcgcggcttccgggtaccaggatactcccttgggggcgtctcgtgaccgcacgcggtggggagcgtgtgaccccggctccagggccgaaggggacccgctggccctcacagagcgccttcgggtaaaacgcgctttcacacgcaaataacttccatccaaccatctaataaatacacatttggagtttattttgtatcaggcactgccatagctacttccctactgatgaacgagaagacggtccctaccgtccccgtcagggaggtgacctagaaaccagatatttaacgtaagtaaggatttccatcatagttgtgatgctgcgaagtagtgcagtaagtagcgaagtagcgaagtaaggtttccaaaggaagtgacttttaatctgaaactcagggatgaataggaattggctagaagagggaaaggaagagccttccagacagaagaaatgcatttattgaaggccctgagaaggcagagagcttgcagatttgagtaactaacaggctaggaggttcgaggagggatggggccatgtgagcccaggccggcggtggagcagggctggcgggcacgttaaaggctgtccattggcggcagcagcagcaacataacaggagctgtcattttgtcagaagtttccaaccagagcgactccatcttgaacaggggctgggtaaaatgaggcagagacctgctgggctgaattcccaggaggttaggccttcgtcacaggatgagacaggaggtcagcacaagataaaaggtcacaagaccccgctgataaaacagaatgcagcaaagaaactggtcaaaacctgccaaaaccaagacaggaaggtgacctctgatcgtcctcactgctcattatacgctaattataatgcattagtatgctaaagacactcctagcagcgccaggcagtttacaaatgccatggcaacgtccagaagttaccctatatggtctaaacagtggaggaaccttcagttgggggggatccccaccccttttctgaaaaattcattactaacccaccccttgtttatcatataatcaagaaataaccataaaaatagccaaccttaggccaggagcggtggcttacgcctgtaatcccagcactctgggaggctgaggcttgcagatcacctcaagtcaggggtttgagaccagcctggccaacatacagtgaaaccccgtctgtactaaaaatacaaaagttagccaggtgctgggcgcggtggctcacgcctgtaatcccagcactttgggaggccaagacgggcggatacgaggtcaggagatcaagaccctcctggctaacacggtgaaactccatctctactaaaaatacaaaaaattagccgggcgtgttggcgagcgcctgtactcccagctactcgggaggctaaggcaggagaatggcgtgaaccggagaggcggaggttgcagtgagccaagatcacaccactgcactccagcctgggggacagagcaagactccctctcaaaaaaaaaaaaaagaaaaaaagttagccaggcttggtggcacacgcctgtagtcccagctacttgggaagctgaggcaggagaatcgcttgaacgctggaggtggaagttgcagtgagccaagatcgtgccatttgcattccagcctggatgacagagcgagactccatatcaaaaaaacaaacaaacaaacaaaaaaagttgaaagaggcctggaatcagatatcaactttagatactagggaagtatgatttttttttttaatctcagctcacgggaacctcagccacccaggttcaagccattctcctgtctcagtctcctgagtagctgggattacaggcacgtgccaccaagcccagttaacctttgtagggatgggatttcaccatgttgtccaggctggtctcgaactctttttttttcttaaacattttattcattttatagagagatttcttgtttgcttttgttctgatcattaggagagtggttgaggagtattgaatccatcactactttgatgacacaggtaagagtccagattcacatttccaggtaccaggagttccctctaaatgccacaatcaagtcagccttcatttacatttctttctgctgaacacagcaatgcccattggtatctctgaagcgtaatcgcatcttaagtaaagcagctgtttggaatttaacactccccttctttt

SEQ ID NO: 1244404 - DNA, 4001 bp, Homo sapiens
tgacggccgaggagtggtggggcaggcggctgagcacgtccacgatgagccgcatctgctgccgttcttttgtgctcacccactcggcgttgcacaccaggtccaggtcggcgggcaggttcacgttactcaggacctgtgtccggagtcagcgggtgagcctggcccacagccggcacggactgcccccctacccccacggacctctcttttctctgacccctttatccttacttccgcccggagtccttagccagggagggcgcagatctgggcacccagggctgaactcctcccctatactcccttaggcttttctacccacccggcttgctagtgagtctgcggcccgtcggggagaagtgcgaggggcgcaagagaaggcccggatcgccggcgtgggggaaggtgaaagaaagggccgcaccttatgactgctgtcgcgcaggccgcctgtgttattgaggaagatgattttggtgggccgcagcgccttggccagcgacgcggtcacctccagggagtcgagaagcacggagcggcgcgcggccgtctccccgatggggcacaggatggggatgctgcccgactccaggcaccactgcagcaggtctgtctccaccgagacgatgccgccgtagctgtgggccagacgtggtgctcgagagggccccctccaggcctgccggacggggcagggcgggcagagtagcacgctctgaggacgcctgggcgggcagggcgggcactcacctggcatggggagccggctcggcagcgcgtagcacagacccgccgccaaaaaatggcacagcagcggcggcgttgtgtcgaagcgcgtctaccagcaccttgcagctcttggccagctgcgccttggcctcccagaaggaaagacagcccgagggagccgtaggggccggcagccccaggaccaccagcggcttcatgtccatgcgctgcaagaaggccagggcaaaggccagactggatacgccctgctggcacttgagcacctcctcgtccacctgcggaggagtgggctttcaaggagcgtgacacggacctgagccgctggctcccacagcctggcctgcagggccgtctcggtgaccctacccttccagaagctgtcaggacccagttctggccaccagtgcccacctgctccgccctttgccccgttgggtcttgccactcccttgtctcacgctggggtacctcccgccctcctccctccgaccttggactccgggacatctttgggggaggggcagtgcaagcggctcctgtccaggtccttctgaacccctaactgcgcccatgttgggggccttcttcagagcatcacacctggcgggtggggtcccccaggatcctcactcgggctgggcgggaggcttccggaggagcttacggcctctcccattcccggcggcgctggtctgggccctgccgggctccttcccgcttccgctgcgcagagcccgcagcgtatcctgccatgcctgaggacaggtggccgcacaaccccatcccctcgctgcgtcacggcccacgccgggctccgctcacctcgatgacggcgaagggcttgtccgcggagtgatggcaggtctggaactgcgtgagccagtggcgcgcctccccagggctggccccgcactggttcaggaaggcctggatgtcccgctgcaccagcgagcggcccgaaggaggctctggggactcgtggggcaccgggggcctgggactcggcacccacgacggctcctcggcgacgggcgactgggagacgtcgtccgcgcccgcgtactcctcgggcgggggctggggctgcgaccaggcggtgctgagccggcgccccgggctggtgcccctcgccgcccgccgccgcgcgccacagctcagccttcgggcgcccccagtgcctccccggcctctcagcctcggggctacagcagctgcccgcagaaccacagccatcagcgccgtcgccatgacgacaaccaactcttgccccccaagagtggcagtctgtctggagcgtctggcactggggggctcttaacttgccgttgggcggggctggacctggtcggggcggggtccggacaggggaccaggagtctcctctgggtgcgtttgaggagggtcaggccatgagtcagggggcggggccactaggctcccccgcccctggaggaactgaacccactatcggtcatggggccgagactaaatgtggcgggttgtctttaatctgctgccaaggtaggttccaggggcggctttgggagtctgcagggccttggatgattggcattctgaccagagaagaagggactgtaggtggctttgagcacagggctgggcagggggctggaaggagggcgctggaaagagtagaagaaggggggcagtgggagggcgggggcgggtggtgctggccttgtctgtcctgttgcctgagctcaaaaaagatcctaatgaatgaccatgaggttaccagggtttgccaaactccagtcactgggtaccagcttgaggaattctgtgatatcctcaaaacacccctcaaaacttataatactttagtgttaatgcttttctttatcgaatatcacatctggtaaaaataaaataaaatagagttttttattttggtttttgagatagggtctcactctgttgttgcccaggctgcagtacagtggtgcaatcatagctcactgcagcctccacctcccaggttcaaatgatcctcctgcctcagtctccctagtagctgggaccacaaatgcacaccaccatgcccagctgatttaaaaaaaaattattttttttgaagacgggtgttcaccatgttgcccagactgttcgtgaactcctgagctcaagcagtcctcccacttctgcctcccaaggtgctgggattacaggtgtgagctacttcactcgacctctgtaacccttttttttttttttttttttgtttgtttgtttgtttgagatggagtcccaccctattgcccaggctggagtgcagtgttgcgatctcggctcactgtaatccccgccttctgggttcaagcgattctcctgcctcagcctcctgagtagcagggattacaggcagacaccatcacacccggctaatctttgtatttttagtagagacagggtttcaccatgttggccaggattgtctcaaactcctgacctcgtgatccacctgcctcagcctcccaaagtgctgggattacaggcgtgagccaccacgcccggccctctttaacctttttaaacttaaagtttatccatgttaggtctgtaactaggccagtatcacttgccataagccttaagaatcaagtgaggaggcgggtgggtcatttgaggtcagaagttcaagaccagcctggccaacatggtgaaaccccatctctactaaaaatacaaaaattagccaggcagtagtggcatgtttctgtaatcccagctactcaggaggccagagaatcacttgagcctgggaggaggagattgcggtgaactgagactgtgccactgcactcccgtctgggcgacagaatgagaccctgtctcaaaaaaattaaaattaaaattaaaatcaaaattaaaaaagaatcaagtgagaggaaaacaatgttattacattccattatattccatctgcatagcttgcctgctttcttggtaacatggaaggttagcaggtgccatgtgttaaagataccctagcaccaagcaaagccttctgtgtggtagaggaatagctaacacatgtcgaatgctaggcactatgcaaaggacttcacaaatagtcattcatttaatcctctcagtgactccaggatagctattatcattattcccattttacagatgagaaaatggaggtacagaaatatgtgaggatcagggtcactcagctcacaagccgtggagctggtctaggaagcagttctgctccagat

SEQ ID NO: 1244405 - DNA, 4001 bp, Homo sapiens
gtacttcagtcttctttaaagcagtgatgtgcacggtgctgtgagcccccaaagagaaaaacagcagcagtagtttactctgggctgatacaaaactgaaaaatctacttgcctctccattttcctgggctggactcggtgcatcggctgacacattctcttggtcatcagtttttgttttcttactacattccttaaaaaagcaaaggaacattatcaatgaacttttacttcgtctcccttaagaaaatgtgcacattctgaccaatgaagctcatgtatttctatcctttcttttagtttatttatttatttttttagacggagtctcgctctcacccaggctggagtgcaggggcgcaatctcggctcactgcagcctccacctcccgggttcaagcgattctcctgcctcggccttctgagtagctgggattacaggtgtgcgccaccacacccagctaattttatatttttagtagagactgggtttcgccatgttggccacgatggtcttgaactgctgacctcaggtgatccacccgcctcggcctcccctcccaaggtgctgggataacaggcttgagccaccgtgcctggccttctatccttctaacccttctagtgaaacaggtactgaaggacacacacacatctctattgtttacaataataaaaaagcagaagcaactgtagccttcaccccacaggcgaattcccctggacacaggtgtacttagaataggacgcagccaccaccggggatgaacgacccatggaatgttaggaagcctcctgccacggcgtcacgcgcagaagtgccagccacagagcagcatccacaggagcccattccggcaataacagctacaaaacccccctgcgtgcgctgcgcggttgttgccatggcctggagacaaccgcggaaggcgccggtcagcagccgtcacccgcttccgcccctgcaccggctgctcggtgaccctcagaggggcaggttcgaaaacgcctaaaaccctctcgaaacgcttctgatcattcccgccacgaccgctgtttactcggactgtggtgcgcggcacgagaggctcggtctccgtgcgtttccgcgcttcgcgggcgtgggaaagatggacaagttcagggagaaccgcgaagaccgaacccgccctgcagagcgcagcggaccccgcgccggccgcctccacgccgagcgggcccagggtgccgaggccgggggcgccttgaagagccctgaagcgagcgagcggcgggcccggaccgccaacctcggccgcccagagccccacaggacaagcaccaggcgcgcgcctccccggcccgcggcgctcaccttgcgcgtgcagtgctcacacttcatctggagcgcggcgggcgggaggccgggcgcctcagcctcagggaagcaccgggagactgggacaccactgcccgccgcccgcggccctttgttgtcctcccccgacgcggcctcacccccaacggccgcgctcggccaatgagagcaccgggagaggacaagccgcacccctgggccaataggattccccacccttacggctttgcctaggccaatgacagtgtcgggaaggggcgggccaggccccagagccaatcggagcgcgcggggcggaccgcaggctcactccacgtacggcgccggggggaccgggtccttgcgccggtttccgcttctcgtgggtcctgcggcggcggcggcggccaagcggcgttcaccagggagtcggtgagcgcgcggactgtcccgaggccaagctggggccgttccagggtgctcggtccggtggtcacggggcctggaggcccctgggcccgcggaggccgcggccgggctctgtcagccagctcggcgttggacactcgccttactcgcggctcctaacggggcgggccgggggcacagccctcgtccgccgccattgccacttgacgtcgtgtcacgtaggctcggcggagtagcagcgcgcatgcgcggcctgcctgtcagtaaccacgtgatggacccggaagcccgagggcagatgctaaatgatggccatttgacatttgcgtgtgttcactatggatagttttaccaagtacattgatttgggcccttacagcttacaaagtaaagataacacttactcctccaagaaattgatttcagctaagcaaaacattgatacagggctataatggaagtgttggactcataaacgttttatgaaatcagtgtgtgtgtattacagaaatcagaaatgagaagtaagaacatgtctgggagagtgtgacataagaaaaataacttgtaggcgtatttaacagacagcagcagttctcaggattccccatgttagagccttccttcctgtcctctgagaaatgaaaatgaaatccaaagacccccaactgactacacgaaccccctactggctaaggagatcccagggttgccttgaaggcagttctcagccatgacagatgggaggtgagacacctgttattaaggccaacccttggctaactaccattaggttttcttggctaagagcttaacggaaaccagcgctttcgaaagactccaccgctgataacaactctctcatttgcagtttcggcccaattgaccagtattccttactgataagagacactgaccatggagtggttctggtgagatgacatgaccctcgtgaaggggcctgaagcttcattgtgtttgtgtatgtttctctcttcaaaaatattcatgacttctcctgtagcttgataaatatgtatatttacacactgcacctcatagattcctgttccctttgcccctccctggaagtgtctgtttctggcttctggccagaggcagtgcttccctgtctgtcagaatggccaccctgcaggctgaaaccctttatgagaagtaaagctctcctttccagatttatgaatctcatcattcttcagcttgccattgcccatcgggttcttcctgcccactgcacagacaaaaagtcaattcatcaagattgcagcaggccgggaaaagagtttaattgacacctggcaggccacacaggagacagttactactcaaatcagtctctccaaaggctcagcagttaggagtttgttttttgtttttttgtttttgtttttgagacggagtctcactctgtcacccaggttggagtgcagtggcacaatctcggctcactacaacctccacctcccaggttcaagcgattctcctacctcagcctcctaagtagctgggacgacaggcacacgccaccacgcctggctaatttttgtattttttagtagagatggggtttcaccataatggccaggctggtcttgaactcctgaccttgtgatccgcctgcctcggcctcccaaagtgctgggattacaggcatgagccaccacgcctggccgcagttagggtttttatggacaatttggtgggcagggggctagggaatggatgctgctgattgactgggaatgaaatcaaaagggtgtgtggaaaacggtcctcaagcactgagtctgcctctgggtggggccacagaaaccaattgagtcctgagtagcaggttggggtgggttcactctgaaaaacatctcaaaaagccattcttaggtcctgcaatactgatattatctataggtgcaattcgggaagttgcaaattttgtgacctctggccacatgagtcctgagcagtgagggactgtagaaactaggcctgcattttagcagagttcaggccactcccacaatcctaaccttgtggcctttcattagctttacaaaggcaatttcagccccagaagtgggaggtgatagttttaggaagggactattatcatccttgtttcaaggttaaactgtaaattcctcccaaagctcctaaaattagcttggcttatgcccaggaacaactggacagcttggatgtccaaaggaagacggaa

SEQ ID NO: 1244406 - DNA, 4001 bp, Homo sapiens
agcctcccgagtagctgggactacaggcgccccccaccacgcccggctaattttttgcatttttagtagagatgaggtttcactgtgttagccaggatagtctcaatctcctgatctcatgatccgcctgcctcggcctcccaaagttctgggattacaggcatgagccaccacgcctggcctatttcagtcttttttttgggacagagtctcactctgttgcccaggctgaagtacagtggtacaatctcagctcactgcaacctctgtcttccagggtcaagcaattctcctgcctcagcctcctgagtagctgggattacaggcgtacaccaccatacctggataatttttgtatttttagcagagataaggtttcaccatgttggccaggctggtctcaaactcctgacctcaagtgatccgtccacctcggcctcccaaagtgctgggattccaggcgtgagccaccatgcccgcgtacttcagtcttctttaaagcagtgatgtgcacggtgctgtgagcccccaaagagaaaaacagcagcagtagtttactctgggctgatacaaaactgaaaaatctacttgcctctccattttcctgggctggactcggtgcatcggctgacacattctcttggtcatcagtttttgttttcttactacattccttaaaaaagcaaaggaacattatcaatgaacttttacttcgtctcccttaagaaaatgtgcacattctgaccaatgaagctcatgtatttctatcctttcttttagtttatttatttatttttttagacggagtctcgctctcacccaggctggagtgcaggggcgcaatctcggctcactgcagcctccacctcccgggttcaagcgattctcctgcctcggccttctgagtagctgggattacaggtgtgcgccaccacacccagctaattttatatttttagtagagactgggtttcgccatgttggccacgatggtcttgaactgctgacctcaggtgatccacccgcctcggcctcccctcccaaggtgctgggataacaggcttgagccaccgtgcctggccttctatccttctaacccttctagtgaaacaggtactgaaggacacacacacatctctattgtttacaataataaaaaagcagaagcaactgtagccttcaccccacaggcgaattcccctggacacaggtgtacttagaataggacgcagccaccaccggggatgaacgacccatggaatgttaggaagcctcctgccacggcgtcacgcgcagaagtgccagccacagagcagcatccacaggagcccattccggcaataacagctacaaaacccccctgcgtgcgctgcgcggttgttgccatggcctggagacaaccgcggaaggcgccggtcagcagccgtcacccgcttccgcccctgcaccggctgctcggtgaccctcagaggggcaggttcgaaaacgcctaaaaccctctcgaaacgcttctgatcattcccgccacgaccgctgtttactcggactgtggtgcgcggcacgagaggctcggtctccgtgcgtttccgcgcttcgcgggcgtgggaaagatggacaagttcagggagaaccgcgaagaccgaacccgccctgcagagcgcagcggaccccgcgccggccgcctccacgccgagcgggcccagggtgccgaggccgggggcgccttgaagagccctgaagcgagcgagcggcgggcccggaccgccaacctcggccgcccagagccccacaggacaagcaccaggcgcgcgcctccccggcccgcggcgctcaccttgcgcgtgcagtgctcacacttcatctggagcgcggcgggcgggaggccgggcgcctcagcctcagggaagcaccgggagactgggacaccactgcccgccgcccgcggccctttgttgtcctcccccgacgcggcctcacccccaacggccgcgctcggccaatgagagcaccgggagaggacaagccgcacccctgggccaataggattccccacccttacggctttgcctaggccaatgacagtgtcgggaaggggcgggccaggccccagagccaatcggagcgcgcggggcggaccgcaggctcactccacgtacggcgccggggggaccgggtccttgcgccggtttccgcttctcgtgggtcctgcggcggcggcggcggccaagcggcgttcaccagggagtcggtgagcgcgcggactgtcccgaggccaagctggggccgttccagggtgctcggtccggtggtcacggggcctggaggcccctgggcccgcggaggccgcggccgggctctgtcagccagctcggcgttggacactcgccttactcgcggctcctaacggggcgggccgggggcacagccctcgtccgccgccattgccacttgacgtcgtgtcacgtaggctcggcggagtagcagcgcgcatgcgcggcctgcctgtcagtaaccacgtgatggacccggaagcccgagggcagatgctaaatgatggccatttgacatttgcgtgtgttcactatggatagttttaccaagtacattgatttgggcccttacagcttacaaagtaaagataacacttactcctccaagaaattgatttcagctaagcaaaacattgatacagggctataatggaagtgttggactcataaacgttttatgaaatcagtgtgtgtgtattacagaaatcagaaatgagaagtaagaacatgtctgggagagtgtgacataagaaaaataacttgtaggcgtatttaacagacagcagcagttctcaggattccccatgttagagccttccttcctgtcctctgagaaatgaaaatgaaatccaaagacccccaactgactacacgaaccccctactggctaaggagatcccagggttgccttgaaggcagttctcagccatgacagatgggaggtgagacacctgttattaaggccaacccttggctaactaccattaggttttcttggctaagagcttaacggaaaccagcgctttcgaaagactccaccgctgataacaactctctcatttgcagtttcggcccaattgaccagtattccttactgataagagacactgaccatggagtggttctggtgagatgacatgaccctcgtgaaggggcctgaagcttcattgtgtttgtgtatgtttctctcttcaaaaatattcatgacttctcctgtagcttgataaatatgtatatttacacactgcacctcatagattcctgttccctttgcccctccctggaagtgtctgtttctggcttctggccagaggcagtgcttccctgtctgtcagaatggccaccctgcaggctgaaaccctttatgagaagtaaagctctcctttccagatttatgaatctcatcattcttcagcttgccattgcccatcgggttcttcctgcccactgcacagacaaaaagtcaattcatcaagattgcagcaggccgggaaaagagtttaattgacacctggcaggccacacaggagacagttactactcaaatcagtctctccaaaggctcagcagttaggagtttgttttttgtttttttgtttttgtttttgagacggagtctcactctgtcacccaggttggagtgcagtggcacaatctcggctcactacaacctccacctcccaggttcaagcgattctcctacctcagcctcctaagtagctgggacgacaggcacacgccaccacgcctggctaatttttgtattttttagtagagatggggtttcaccataatggccaggctggtcttgaactcctgaccttgtgatccgcctgcctcggcctcccaaagtgctgggattacaggcatgagccaccacgcctggccgcagttagggtttttatggacaatttggtgggcagggggctagggaatggatgctgctgattg

SEQ ID NO: 1244407 - DNA, 4001 bp, Homo sapiens
ctttgcagaacctgagagggtaccagatgctgtgatctggagccagcccacctggctaggcttggccccaccctgcccagctcagctccagcacccccttacctattaatgaggcaagtcttccccaccgacaggtcccccaccacaatgaccttggagatcttaaatctgctggacacaagagtgggcaaggggagtgggcacgagctctttcaccctagggagttccaatgctcccgactaggtccagaaaggtagctgcacccaggctgagggtattatagacaccaggcatcccaggcagctgcgtggacaggtgtgctggggaggaggagtgttttgtgctccagaagcagagagacatgaatttgaatcccagctctcacactgattagctgtgtgactttggacacgttatttagcctctctaagcctcagtttaaacatttaagtaaagttagtatatattttactgggtcgttgtgaaggttaaaatgagataaatgtcctatattctaagacaccctcccccccgcattttaatgtctgaaatcaggatatatcttaagtgatggacttttccattcaataaagatgatagtacccaacactgcctggcacacagcaaatgcttaattaatggtgccaactgttatcagtattacctttaaaacccacaataagactcatccctgtaagcacagccagacccctgccctggggctccatggatgctatgtggggatctgagcaggtgaccaccttcccatttcagacaccttagtctctactcagaaatccagctgccacccttctacccaaccccatctcatagaactcacaacaaccttgttgggagaaaaggaggggatacaggggcttaaagagggggaaataaccatatagctggtaggggctgaaatgaagccccaagggggtggttgtttaccctcgctatgactacagagtttcctgggacctcctctctttgttgtgggtgtccctaactcaccccacggtgcctgtccggtgctcctggcaggcgcaggtgacgcgggggtggaagtctttgtgcccgtgcaaagcggcctccttcctcaggcacttagtgggaaggatggaagagaatggagcttcctactcctggcccttgtcccgcagccaagcggcccgggtaggggtggagtgcagggaccacccagaagcaccaggcctagctgggtggcagggctgggcccagtcctctaactggtctggtgccgcctcctcctcgcccacaccccgggctgtagactgaagcccgacgtggccccggcgcctacctggggcagctccgccaggacgcgatccctccgcacgggtgccagaatgttcatcctgcctgcggccttgcagggcgccctgagaaggcgccgaggccggatccgcgtcagcgacccgggcgcgtggagacccgacgatcacccgcggccggggtgtcccgactacaactcggggccacggggaccctacgggagtccgcggtctcggagacgctacgaccaccgcgggccacggagatgaaacaatcacccggggccgcggcgagcccaaaatcacccgggccctgggcgtcccgaagatgactctggggcgaggagactcttcggccgccaattgggggcggggagtcccgtctggtgggggccgggcccgcgcagaccctacgattacgcggggccggatagttcctacgattacgcggggccggatggttcctacaataacccggggccgcggagacccgacgtcatctcggggctgaggctgccctaccattacagagcggcccgggggcgcggagcggccccgccacacggggtcagtgtgggcaggggcggcgctgccaaggcccgcaggccgctggaggagggggcgaggggcccagtccggctacagggcctcgagtcccactccgctcgggctccgccaacgctgtaacacgatccccggaaattcctggagaagggccgccccccgcccctctcctggcggctccaggcctcgctgcccgccctcgccaccccctcctctccacccttctgcgttgccccgctcaggctccctcttttgacgcttcaccgggcaccaggaccgccccgacccaggctggagcctatccagatagggactccccaggctgctctcccctgcacctctatacccggctgcgccttcatggggacccttacccagccgaattggtgatggggaatcggagactgctgcgcagcatctggcgatgccaggaaccagcagggaggggaaagggggagagaaggggcccaaggagaggcggcgcttccctcctcaactccaggcctgggaggtgactcatagagtctgccccctctcgcccttctgccctgggaggtcgggggtgaggatggtggaggggaagcgtgcgaagggggtgccagggttagaatgaggtgcccaccgaggagagagacgtctgaagtctggcgtcttttccttcaaggctgctgtgtagattgtgaggtgggagggctgaagatcaagttccctcgagggaggttaaagaagggctaagtggacccggaaactctgctcttcggggtggtctccgctctgggaggcggggactcccctctggtatgggtgttcattgttctggccccattggaatctatcccccagggacaactcctttgtgcaaagtcctgcaggatagaagagggggcagtgcacaatcaatttcaccgtcaaaggggacatgtctggttttatgaagggagagggaagaagaaaggatcaagtggggatgggttaggcacacaccttaggagaagcgaacctgagtgttaagaaacctttctctgtgtctggagctgaatttgaggatgtaaagatgaccaggacacggaagggaagactagtttagggcaggggattgtgagtgaagttactaaccggaaaaactagcgaatcttggagaaatgtgtggaattttcatagaacttcaaatgcattatcaggaaacgcagtaaaacttgacagtatcagtgtcgcaggtaaagaggggcaggtgtggccgccttgtacttcctctgacacttccccctcgtgactcgattatttatttatttatttatttatttattttgagacagggtctcactctgccacccaggctggaatggctcattgcagcctcgacctccagggctgaagcgatcctcccacctcagcctcccaaggaactgggactacaggcacgcaccaccacgcccggctaatttttgtattcttttgtagagacagggtttcgccgtgttgcccagggtggtctcgaactcctgggctcgaagcaattcgtccacctcggcctcacaaagtgctgggattacaggcgtgagtcaccgcgcccggccctgacttgatttttttctgccaccaaatcactgtgttattgataaaccacattcctctctggacctcagttcgaccgagcaaatcctgctccagcactctagaacttagctgtatctaactcccgagtcaatccaaatgtgttctttcctcttggcagcgttcctgcctcctggcatggcaatcctcttccctgagactggcagttgctcaagataggaagctcccgggaccagacccgagcgccagccggctacgccgtccgctggcctgagcaaataaacgcgtgtcttcaaaaaactacaatccccatggtggcacgcgcctgtagtcccagctactctggtggctgaggcaggagaatggcgtaaacccgggaggcggagcttacagtgagccgagatcgcgccactgcactccagcctgggcgacagagcgctcaaaaaaaaaacaaaaaacaaaaaacaaaaaactacaacccccatgaagctttagtgcctttgaggggaggagtggcgcatgtttgttcacgcacgaaaaagaaattaaacctaactaccgttcccaga

SEQ ID NO: 1244408 - DNA, 4001 bp, Homo sapiens
aaggccaaaaagctgagagaatgaaagggaagaggatgggcagctcctcccaaggaagtcacagtccccaggttctgctattttttttttttttttttttgagacagagttttactcttgttgcccaggctggaattacaggcatgtgccaccatgcccagctattttttttgtatttttattagagacggggtttctccacgttgatcaggctggtctctttttttttttttttttgagacggagtctcgatctgtcacccaggctggagtgcagtggcgcgatctcggctcactgtaagctccgcctcccgggttcacacattctcctgcctcagcctcccgagtagctgggactacaggcgcccgccaccacatccggctaatttttttgtatttttagtagagacggggtttcaccatgttagccaggatggtctcgctctcctgagcttgtgatccgcctgcctcggtctcccaaagtgctgggattacaggcgtgagccactgcgcccagcctttattttattttattttatttttgagacaaagtctcactctgttgcccaggctggagtacagtggtgtgatctcggctcaccacaacctccacctccctggttcaagtgattctcctgcctcagcctcccaagtagctggaattacaggtgccgggcaacaagcccagctaattttttgtgtttttagtagagatggcgttttatcatgttggccaggctggtcttgaactactgacctcatgatccacccgcctcagcctcccaaagtgctgggattacaggcgtgagccaccgcacccggccgtttttttgtttttgtttgtttttgtttttttgttttttttgtttttttttgagacaggttcttgctctgtcacccaggctggagtacagtggtacaatcacagctcacagcagtcttcatctcctgggctcaggcaatcctcccacctcagcctccctagtagctgggactgcagctgtgcaccaccatgcctggctaatttttgtatttttttgtagagacaaggtctcgctacgttacccaagctggtctcgaactgctgggctcaagcaatcctcctgccacagcctcccaaagtcctggaattacaggcgtgagccacggcacccagccttttttcccccctcatatataattatttctcacaaccaatgtttcttcttaggggaaatagccctgagactggggctgtaccttacacagctctgggtgctgatacgcaccccatgtcaagcgggaaagatacctgggcacatgctccgaggtgtagggtacaaggaccaccttcttccccagcagcaaggtgttctgattcaacctcatggtagcagcctgcatgcagatggggagagcaaagacttcaggaccctgaatttcctccaactttgggtaggcgctccagctttcctgctggggctaagttgacttccgtcattagttccgtctagacacttcaaagaatacagactccaaaattcttgcaagaaagagaaccaggctggttaaggataattaaacaatccttgactcccactccaagaggccaagcctgggctccgtttctgccggttccttccgtccactccccagaacttcgattcctcaaacccaagcaccaagtaccaagtaccaaagtatccccagagctcccattacttgccccagtccagggattccaacccagaatcaactttcagccctgccttaaacctacttccaacctcttaccccggcgaccaccccacggggctctagccactccctccccgcccccgaccacttcagggcaaggcgggcttagtcttaggccctcccctttgagtggcgttctagaccactctcttcgaccctccaaccacgcggacccgggtactgccaagctcacacccacctaccaccgacgaaatcgtcccccgcagaaagggtgatctacctcctccaaccagccacgttcccaggcccggccggctaccgccccttccgcatgcgcgtgagaacgcgccccgcccacttccgccatgctgacggcagccgccaggccccaatcccggtcccgcccccgcgaggcgcccaatcagcgcgcgcgaaaaaggtgggctgtggggccggcgcatgcgcgctgcggaagctggtgctggacagctggcgccggcagcagcggaccggcgggagacggcggcttgggagctggctgtgctgcaggtgttgggtcgggtcgggtcgggacgggcgggagaggacgagacgggtcgggataggttggggcggggcggggcggcactagactcgggactcctccaggagggagagagagggagaggctgggagtggggttcttgagaaaagagggagctttgagggtggggaaccctaagagagtaggtggggccagggagtggaggccccattaaaaaaaggaggccttagtgccaagagtggagttggaagggcaatgtaggaaagcccccagctccctgccctaggcagaggcggcagacagttccttgggctcccatgtgtggtagtgagctcctggttcctggaactaaacgaggataaccaccccagagcgtggaaagggggctcttgtggtgggtgagacttagtggttttagaggccccttaaatcacttgcaccccgagcagcattgaaaacatccgtgctgggcacagagcagtgccctgcacagcaagggaaatgttagaagaaaccgtccagatttctgtcatccagggtgacccctccctcgggggtgagtcttgtgacagatactgaggccctaagtgtctgtgataaaagaaccagaggtggcaggggaagtctgcaagcctcctcccacccctgtctcagtccatcagataggtgaagcctgctcttttgttttaaggagctgcggcagccgccgtccttgcacctaaggaacctctgctgccagcccttcctcacttttggaaatggcgggtgaaattacagagaccggggaactctactcttcctacgtgagtgtgacttatagaaccttttgctcacttaagtgttcctggcttctagaaaagcacattgcttgctggagatgggactagtgagtgctgctgcttgagcagaccatagtggaagcaggatgggggagttccatggggcagcgactacagtgctgctgtggtggctcagaatgtaagtcagatttattctctttttaaggtgtttgtcagagtggtcaagccaaacaaaatcgccatgctgtttataatgttaatcccgggctgggcacggtggctcacgcctgtaatcccagcactttgggaggctgaagcgggcagatcacctgaggtcaggagttcaagaccagcctggccaacatggtaaaaccctgtctctactaaaaatacaaaattagccgggcatggtggcactgtaatcccagctactcgggaggctgaggcaggagaatcgcttgaacccgggaggcggacgttgcagtgagctgagatcgagccgttgcactccagcctgggcaaaaagagcgaaactctgtctcaaaaataaagaaataatgttcatctccaggctaccacacttgcctgcagtgctgcccttcagatgaacagtgattgacagctgttgactctgggttttgctcatctcagcagttggaaaccgctttggtctttactgaattttaaattgcacaacttttatagtcttggatggcgtaagaagcagcgaaagcatacagagacttctaattacagtttggtggactctgcaattagaacaattagaatgattgattctcactgtcttaggtctgtgttacctctggctgcccccaacacacacgcagtttatcttctctatgtaacgtatgattggtcatagttgttacatcacagggccctcttgcctggataagtagccagagggttggaataatcagatggttgactcaggttgct

SEQ ID NO: 1244409 - DNA, 4001 bp, Homo sapiens
gtacccacttggaagagaaagaaaaagaaaaaaaaaaaaaaaaaacaaacgtatcccctcttctttctgtctctgagtataatggccctcccgagcccacaagggaaccagaggccgctctggaacctcagaagagaggatttgaaagccatgaggcctctctcccagagtcgccagggccccgagtgtcctggccagctgagccctgccagcaccacagcagtagcaggacttgcctctgcctggtggtgtagggttggttgggccaatggtgaagttctgggtgatgctgggcaatcacttcctaaggtccctagcctcagtttcctcatctgtaacacggggtggtatgtcacaacattgtcagggtattgtgacagtcccatccacgaagctgtagtggggcctggctcgacactcggcacattccaaatggcatcggagatctggcagaggcccctcctggctgaagccaaatgtgggtcgcaggagccccaccgttcagggagtcagaccagtcaggacgccatcccagctctgcccaactctcagcctgacctctcgcaagcctttccctttcctggccctccaccttcccttcttgaaaatgggcacagtggcccctaaggaccggtccagcttggacattcccactggggcgaggtgggccacagggagttcatagcccttgtttttgtagttctatttcctacctgtgggacctcctgaggggggatgggctaatcaaaacttctctacactggcagggcgtggtggctcactcctgtaatcccagcactttgggaggccatggcaggtggatcacctgaggtcaggagttcaagaccagcctggccaacatggtgaaagcctgtctctaatacaaaaattagctgggcatggtggtgggtgcctgtaatcccacctactcctgaggctgaggcaggagaatcacttgaacccaggaggcagaggttgcagtgagccgagattgtgtcacaggaacattgtgtcgcctgggcgacagagtgagactccatctcaaaaaacaaaaacttctctacactaagggagaacttgcccttgctttctggcttcacgaatcacgatcgggccacgtttaccagcacttactaatcccccatgagctggtctgatcctttacatttgttacagtctttcatccttacaactagccaatggggtgtgcactggtattattcccattgcagagagggagaaactaaggcacacagaagtgaggcaaatggccagtcccagagccactgaagtcttgatagtgatagccatccccccgcccctcactccccccaggggaccacaagcccctttcgcggtcagccccaggtccgcaggcctcccccgtgtagaaagactaagattcccaggggcagcaggaagccatataccacccgcagaaggggacaggtcacggctgaccaactttccaggatctcaaacaggagccttcagtgggtgcccaacagtcgtgaacaagtgggcctgagcaggtgcgggtcccctgcggctgagacaggggacccgcgctgccccagctcctgcctctgcctttccaggggcccctgtccgccctggcccctgctctcccgggaagtctgcccccgcccagcccgttccacttcccggagcgccggccgcgcccccacctggccccgagcacaacccggcccgcgcccggagctccggccgcccgggaccaccccgcggcgcgcgcttgcaacagccttcccgggcggcgggccggagccgggccgcgggcgcgcgggggacaggcacccagcaagggggcggccccggcgggccccgctcgctcgcagacaaaaggtcggggcgggccggggccgccttaccgttgagccggacagtgaactggcggcgccggcggtcgtgctccacgcggatggggcagccctgctccagcgcgcccagcggcacggcggcagccgagtgcgccatctgcgcgcggggctgcggcgcggcgccggcgggggccggggcgcgcggggaaaggtcaggcgcgcggcggggctggagcgcgggcgcaggcggcaggcggtggggtagttacggcctgggagaccgcaggcggcggcgctgaaagtgacactcggcggcggcggcagcaacaaaaagggtggggggggggccaggaaatcagctgtgaggtcacgtgcggcgcgcagccagtggacgcgcggcctttttgttttgatacattccagtcacctcttaaaggggccgcgccggccgcgttcctctcgcagccccaaacaaaacaacacgggccgccgccgcgccgcgccggctacttttccgtcttgcgtttgtcccacgtgcaactttgggacccccgcaaggagccttctaaaaaagacgtaacaatcttttgtatggacattctaatcgtccccaaggcagccaccatttattaagcacttgctgtgtgcacggcctgtgtatagcaaagccctggcgcacagggcgctcagtaatcactgcgctgagatttatcaccagaagcctgagaaataggtatgcttgactccattttacagatgagcaaatagaggctaagacaagtgaaagacatgcataagttctcacgcagctgaagccctggggctactggtgctaggagtgcgcacccacccgtgttggcagcctgggtggctactggctactgggaaggaattgtcctgtgaagccttgtttgggataggagtgaaatgccacctctcccaaagagaggcgtaaatgcgggaagaggccttggggatccctggatccactccatagatggggaggctgaatcccagaaaggggcagggacttgcttgaagacacacaggactgttggggctcagacttctttgaaaggcgccttaattaggctcctcaaggctcaaccttagagccacaccctcccctcttgctcacctgaaggggcactcctgttgcccatagctgtgcagtgaatcatacaggttacttttaatattttgctaattacggtgcaaacttgatgttcacacccgtgtgaccaccatccaaatcaaaatacagaacactggtggttccctagggccctcttccaagcaatgccctaccctttgaggtaaccactgtccctgacttctagtgttgttgactaattaggtttctctagaccatcatgtaaacataatcatacaatatatactattttattttattttaagacggagtctctctctgtcgcccaggctggagtgcagtggcttgatctcggctcactgcagcctctgcctcctgggttcaagcgattctcctgcctcagcctcctgaggagctaggactacagggctacaacaacaagccggggtaattttggtatttttagtagagacagggtttcgccatgttggccaggctggtttcaaacttccaacctcaggtgatccatccgccttggcctcccatcgtactgggattacaggcatgagccaccgcacccagtccaatatgtacttttaatgtccaatttcttttgctcaatattttatctgtgagattcatccctgtttttgcatctttttcgccactgagtaattattccattgtgttgacaaaaaaagccaaactgtaaaatatttgaagagcttattctgagccaaatatgagtgactatggccctggacacagcctcaggaggtcctgagaacatgtgctggaggtggtcgggttatagcttggttttatacattttagggagacagaagttacaggcaaagacctaatacctgtaaggtgtacattggttcggccatccagaaagtggtgggggcttacagctcataggtgtattcaaatattttctttttctttttttgaaacagggtctcgctgtgtcacccaggttggagtgcagtgtcgccatcttggctcactgcaacctctgcctacctggctcaagccgttcc

SEQ ID NO: 1244410 - DNA, 4001 bp, Homo sapiens
gcccgtagttccagctactcgggaggctgaggcaggagaatggcgtgaacctgggaggtggagcttgcagtgagccaagatcgcgccaatgcactccagcctgggcgacagagcaagactccatctcaaataaataaataaataataataaaccagtctttagaaccataaacctgtactgttttccacaatgtaatgcactgccctgtaaaatactacaattaagactgtcatttaaaggcacttttttgaaaccctaagacaattatcccccaattttctccattctttgtttctaccaagaaccaagttcaccaccaaaataatattagtctcttaacaacaatcctgctgacatctagtattcattcatatgaaatgtaattattggggtccttaaaatttgagaatctttgtcaattccccaggaccttaggcaaaaaatcaaggaaatgaagtgactcagtccgccaaaagtgggtattctgaaatatcactttccaacttcaagaaacacacttccctacttgtgaaggaaatgaatcttcctctctttttctcaaattacacaattggaaatttagatactctggagctcctccagctggtgggccaactaagagaaaacaggaagtgggagattctagcttggctggaccatatccaggtcttcataaggaactctctttggctgacatgtaaaaaaattctttcagcaggagcattaatcttaaacgtgtgtaaacaccaaagctatggttaaccctatctgccccttaggtctacagccagtagagtcagatagctgggtcttaggccttcagctttcataactggcattattgtaagtccatgccactgactcacctttgcttggcacaagttagcttttcctccacgtcgatttttttttcagcctcaacaaaatccctttaatgaaacagacctggcaacctgagctttgattactgtctccaccagaggcctttacaagccaagttatccaggctttaaaatgtgtgacctgaggccgggagcggtggcttatacctgtaatcccagcactttgggaggccaaggcacgaggatcgcttgagctcagcagttcaagcccagcctgggttggtctttgagaaagcaagactctgtctcaaaaaagtgtggcctgaaagctgagtgtttgacaaaaaggaaaaacagtgcctttccaaaaccgaaggtccctaaccaaggagatctctttaaggtctcgaaaaaacgaggatgggatgagaaggatgtgtaagtagtgtcatttttttacttgcagagttcatcctagtcttccagttttcgtttcctagcactccatgttcccaagacagtgtcactaccccgagggctctctcattttctttgcctaggccctcattccactggggagtcgtggccttccatcagtagaagccggatgttctgacccacagactctccaactctccggcgcttctcgccaactcggtccctctgaacatgaagggctctctcatcctgtcactaaaaagattagctgtcccgaaacacggaaaaagtcgcccctcttctttgcaggattcctcccttgaacttccccaaaccctcttagcgtgacgtgaccccacccctaggtaaccgcagctgcttccttaccagcttcccgcccccggggggcgcctgccggaggccaatgcaaggaccgtccgctaccggctctgccgctatccctgtggggtgaatctaacatggcggataaagacagtaactagtcccctgtttctccgagtgttcgccaagatgattggctctcaccacttgtccctcaaaacgaccacgccattgattggtggagattgcgtcgatggggcggggcagaagcaacctgaacccgaacaacaataacaaacattgaggctgaggggcggaactaggagtgcgcagatgtgggccagagcggatttccccttccccaggcaaattcggcgcccactgcgtccccgcaggccactgaccttagaggactacttgcccgagactcgtggggctggatgggaatcgtagtcttcctaggagttgtaggtatctttttttggcctagtctctgctctcaagataggagaacataacaacactccaatccattactgttgacatgtataagcccgcggaggtctccaatctatccactggatttccgtgagaattgtgcccgctttggtattggatgttcctctccataagactacagtttccaaggaacagtgtggccaaggcctttcgttccgcaatgcatgttggaaatagtagttctttccctccacctcccaacaatccttttatttacctaaactggagacctccattagggcggaaagagtggggtaatgggacctcttcttaagactgctttggacactatcttacgctgatattcaggcctcaggtggcgattctgaccttggtacagcaattactgtgacgtaataagccgcaactggaagcgtagaggcgagagggcgggcgctttacggcgaactcaggtagaattcttccttttccgtctctttctttttatgtcaccaggggaggactgggtggccaacccagagccccgagagatgctaggctctttctgtcccgcccttcctctgactgtgtcttgatttcctattctgagaggctattgctcagcggtttccgtggcaacagtaaagcgtgggaattacagataaattaaaactgtggaacccctttcctcggctgccgccaaggtgttcggtccttccgaggaagctaaggccgcgttggggtgagaccctcacttcatccggtgagtagcaccgcgtccggcagccccagccccacactcgcccgcgctatggcctccgtctcccagcttgcctgcatctactctgccctcattctgcaggactatgaggtgacctttacggaggataagatcaatgcccttattaaagcagccagtgtaaatattgaaactttttggcctggcttgtttgcaaaggtcctggccaacgtcaacattgggagccacatctgcagtgtagagggggggaaaaaaacgtgactgcgcgtcgtgagctcgctgagacgttctggacgggggacaggccgtggggtttctcagataactgggcccctgggctcaggaggcctgcaccctctgctctgggttaaggtagaagagccccgggaaagggacaggggcccaagggatgctccgggggacgggcgggggaaagtgaatttccgaagctaggcagatgggtattcttatgcgaggggcgggggcggaacctgagaggcataaggcgttgtgaaccccccggggaagggggcagtttgtaggtctcgagggaagcactaaggatcaggttgggggcacagtgtgtccgaggaggaatcctcctgataggaactggaatgtgccttgaaggggacaccatgtgtataagaacatcagctggtcgccggggatggtggcttacgcctgtattcctagcactttgggaggccaaggcggatggatcacgaggtcaggagttcgagaccagcctgaccatcgtggtgaaaccccgtctctactaaaaatacaaaaattagccgggcgtggtggcgcgcgccagctactcaggagctgaggcaggagaatcgcttgaacccaggaggcggaggttgcagtgagccgagatcgcgccattgcactccagcctgggtggcagaacgacactccgtctcaaaaacaaacaaagaaataaacaccggctggtatatatgagaagatgggcccttgcggaagaagaagtgccaggaatatgtctgggaaggggaggagacaggattttgtgggagggagaacttaagaactggatccatttgtgctattgagaaagcgcaagagggaagtagaggagcgtcagtagtaacagatgctgccggcagggatgtgcttgagggggatcctg

SEQ ID NO: 1244411 - DNA, 4001 bp, Homo sapiens
tccaacttcaagaaacacacttccctacttgtgaaggaaatgaatcttcctctctttttctcaaattacacaattggaaatttagatactctggagctcctccagctggtgggccaactaagagaaaacaggaagtgggagattctagcttggctggaccatatccaggtcttcataaggaactctctttggctgacatgtaaaaaaattctttcagcaggagcattaatcttaaacgtgtgtaaacaccaaagctatggttaaccctatctgccccttaggtctacagccagtagagtcagatagctgggtcttaggccttcagctttcataactggcattattgtaagtccatgccactgactcacctttgcttggcacaagttagcttttcctccacgtcgatttttttttcagcctcaacaaaatccctttaatgaaacagacctggcaacctgagctttgattactgtctccaccagaggcctttacaagccaagttatccaggctttaaaatgtgtgacctgaggccgggagcggtggcttatacctgtaatcccagcactttgggaggccaaggcacgaggatcgcttgagctcagcagttcaagcccagcctgggttggtctttgagaaagcaagactctgtctcaaaaaagtgtggcctgaaagctgagtgtttgacaaaaaggaaaaacagtgcctttccaaaaccgaaggtccctaaccaaggagatctctttaaggtctcgaaaaaacgaggatgggatgagaaggatgtgtaagtagtgtcatttttttacttgcagagttcatcctagtcttccagttttcgtttcctagcactccatgttcccaagacagtgtcactaccccgagggctctctcattttctttgcctaggccctcattccactggggagtcgtggccttccatcagtagaagccggatgttctgacccacagactctccaactctccggcgcttctcgccaactcggtccctctgaacatgaagggctctctcatcctgtcactaaaaagattagctgtcccgaaacacggaaaaagtcgcccctcttctttgcaggattcctcccttgaacttccccaaaccctcttagcgtgacgtgaccccacccctaggtaaccgcagctgcttccttaccagcttcccgcccccggggggcgcctgccggaggccaatgcaaggaccgtccgctaccggctctgccgctatccctgtggggtgaatctaacatggcggataaagacagtaactagtcccctgtttctccgagtgttcgccaagatgattggctctcaccacttgtccctcaaaacgaccacgccattgattggtggagattgcgtcgatggggcggggcagaagcaacctgaacccgaacaacaataacaaacattgaggctgaggggcggaactaggagtgcgcagatgtgggccagagcggatttccccttccccaggcaaattcggcgcccactgcgtccccgcaggccactgaccttagaggactacttgcccgagactcgtggggctggatgggaatcgtagtcttcctaggagttgtaggtatctttttttggcctagtctctgctctcaagataggagaacataacaacactccaatccattactgttgacatgtataagcccgcggaggtctccaatctatccactggatttccgtgagaattgtgcccgctttggtattggatgttcctctccataagactacagtttccaaggaacagtgtggccaaggcctttcgttccgcaatgcatgttggaaatagtagttctttccctccacctcccaacaatccttttatttacctaaactggagacctccattagggcggaaagagtggggtaatgggacctcttcttaagactgctttggacactatcttacgctgatattcaggcctcaggtggcgattctgaccttggtacagcaattactgtgacgtaataagccgcaactggaagcgtagaggcgagagggcgggcgctttacggcgaactcaggtagaattcttccttttccgtctctttctttttatgtcaccaggggaggactgggtggccaacccagagccccgagagatgctaggctctttctgtcccgcccttcctctgactgtgtcttgatttcctattctgagaggctattgctcagcggtttccgtggcaacagtaaagcgtgggaattacagataaattaaaactgtggaacccctttcctcggctgccgccaaggtgttcggtccttccgaggaagctaaggccgcgttggggtgagaccctcacttcatccggtgagtagcaccgcgtccggcagccccagccccacactcgcccgcgctatggcctccgtctcccagcttgcctgcatctactctgccctcattctgcaggactatgaggtgacctttacggaggataagatcaatgcccttattaaagcagccagtgtaaatattgaaactttttggcctggcttgtttgcaaaggtcctggccaacgtcaacattgggagccacatctgcagtgtagagggggggaaaaaaacgtgactgcgcgtcgtgagctcgctgagacgttctggacgggggacaggccgtggggtttctcagataactgggcccctgggctcaggaggcctgcaccctctgctctgggttaaggtagaagagccccgggaaagggacaggggcccaagggatgctccgggggacgggcgggggaaagtgaatttccgaagctaggcagatgggtattcttatgcgaggggcgggggcggaacctgagaggcataaggcgttgtgaaccccccggggaagggggcagtttgtaggtctcgagggaagcactaaggatcaggttgggggcacagtgtgtccgaggaggaatcctcctgataggaactggaatgtgccttgaaggggacaccatgtgtataagaacatcagctggtcgccggggatggtggcttacgcctgtattcctagcactttgggaggccaaggcggatggatcacgaggtcaggagttcgagaccagcctgaccatcgtggtgaaaccccgtctctactaaaaatacaaaaattagccgggcgtggtggcgcgcgccagctactcaggagctgaggcaggagaatcgcttgaacccaggaggcggaggttgcagtgagccgagatcgcgccattgcactccagcctgggtggcagaacgacactccgtctcaaaaacaaacaaagaaataaacaccggctggtatatatgagaagatgggcccttgcggaagaagaagtgccaggaatatgtctgggaaggggaggagacaggattttgtgggagggagaacttaagaactggatccatttgtgctattgagaaagcgcaagagggaagtagaggagcgtcagtagtaacagatgctgccggcagggatgtgcttgagggggatcctgagatgagagtgggtcgctgggaaaggctaggggcagggaggccttgattggtgttggtttggtcgttgttgattttggttttatgcaagaaaaagaaaacagccagaagcattggagaaagctcaccacttacccggtcagtcactcccctgtagctttctctttcttggagaaaggaaaagacccaaagggttggaagcaatatgtgaaaaaatacagaatttatattgtctaattacaaaaagcaacttctagaacctttaaaggattttgtattattctaaaaccttccaaatcttaaatttaccttattttattttatttatttttgagacggagcttcgctcttgttgcccaggctggagtgtaatggcgtgatttgggctcaccgcaacctctgactcgtgggttcaagcgattctcctgcctcagctcccgagtagctgggattacacgcatgcaccaccatgcctggctcatttttttgtatttttagtag

SEQ ID NO: 1244412 - DNA, 4001 bp, Homo sapiens
agcaaaactccatctcaaaaaaaaagtatatcggacttgataaaaataaaaaatgtacgctctccaaaggatgctgttaagaaaatgaggcaatacttcctttaataatttacatacaacaaacatatagatatatgttttctaagtaattttacttataataatcaaaaactggaataggtgattggataaacaaattgtggtatacccatactcaacaataaaaaggaatgaactaagacatgtcagacatggatagatcacagaagtattatgggaagcaaaagaggccatagacagaatagttcccatgaagctcagaacgtatacaatgtattatgatagaaagcagatcagtggtttcctaggagctgaggttagtaggaagtcggggaggaggactgacacgggtgggtgccaaggaggatggggtgccaaagaacgtcctagagtgttagaaatgttgttcatcttcattttcatgatggttgtatgagtttatgactttgtcaaaatttgttacaatgtacacatataatgagtgcattctaatatagatatatgtgtatatatataaactaaactgcaaagttaattttgttttttttaagatggggtttcactcttgttgcccaggctggagtgcaacggcgcaattttggctcactgcaacctctgcctcccaggttcaagcgattctccagcctcagcctcccgagtggctaggattacagatgcctgccacgatgcctggctacttttttcgtatttttagtagagatggggtttcaccatgttggccaggctggtctcaaactcctgacctcaagtgatccacccacctcagcctcccaaaatgctgggattacaggcatgagccaccgcgcccggcctgatttttttaaaaaaccagcagcaacaataatccagaaaattggtaatcggatgaataacactggggtagggggacaacacaagcaaaattcaacacccaatcatgacagaaattctcaaactaggaacagaaagcaacctcttcaaccaaaaaaggcatcaacaaaaacgtgcaactaacattacatgtaataatggtgaaagactaaatgcctccctacacaggaacaacgtaagaatgtccattctaactctgtaatcatgactgcacttcaaaggagtcctcaggaggaccctgtagtacattctgatgacaaatctgctttcttagtctctgagaggaccgttttatcccatcctttcctatttttctttaaacctcttacacccataaccttggtctactctgatatgattatttcacctcatactttatttttcacaaggtaaatcaatctcttacaaactcttcctatgataaagtcttccttcctaactaccatcccttccttcctacctactatacaaatcttcctaccatcaatttcttaaaaagagagaggtctttatcttggccctcacccaagacatgccaagttatctggccagcttaaaactcagccacaacttgggagtataaatataggtcttaccccagaaattctagagaattggtaagttttctatttatcatcaactcctatcatgaaaagcaaagacaagttcaactcctgaaatcagcataaagccacagtaagacagaaataattaattcccaatctttggttccttgtctttgtaaatagctcttgcaacttaaaaaaaaaaaagataaatttggtggtttctgtcccacatgtgtattaaataggaaaagtaaagaaaaacacaaaaaacatgtgcaatttgcatactatctgttccttacctgctggtggcgggtgttgggaaatgtatactggacagagtgaggaggataacgactttgttctgtgctgaatgctccttggttgggaggataacctgaacttgacattatcagtaaagaagtcctcaccagactgtgagatcaatgccaataaacaatcatgtttctaggaaaccacctaaacaggatgagaaaaaaacagaattagtaagaactaaaacaccaagtgtacttctaataaattataactatagctacataaataaaaccacaattaccagtaaaagcttcctctcatgtatttacttaataaaagttaccaaggtttgaaaacattaatgcatcatttctttttatacttaaaataggttaatatgtgacaaataatataattagttatataaagtaaaaacagtatataaaaacagcataagatctggcacataataactgctcagtaaatatctttctataaatgtctgagaaatataaagacaaaaatacatggttttaaatttgggagttgataagtcaattgcgaaaagaattcaagagtagttttaaggtaagcatttgtgcagagggaagtattgtctttattaaataattctgaagcaaggatgataaaatactaagttttgtaatcacagatggtaggtagatggacatttgttatattactctttgcatgcttctatggacctgaaatagcaaataaagaaaaagaaggccaggagcggtggctactcctgtaatcccagcactctgggaggctgaggtaggtggatcacttgaggtcagaagttcgagaccagcctggccaacatggtgaaacttcttttctactaaaaatacaaaaattagccgggcacggtgacatgcgtctgtaatcccagctacttgggaggctgaggcaggagaatcgcttgagcctggaaggcggaggttgcagtgagccgagatcacgccattgcacgccagccggggcaacagagcaagactccgtctcaaaaaaaaaaagaaagaaagaaagaaaaacaaagccatcttcattataaagtatattcctacttatccacaattctagactaatttgatttatctgtcttttcttgtgccaatgccacacttttcaaattactctagtattatgaggtttcatatccagcaggacaagtttcacctcattgtgctttgctgttgctgctactttcaccgccttcccagctattctagcacatttcctcttacacacaagcatcagagtcagcttgtcaggtcccagagaattctggatgagaacacataaatactgaatttacagactgactaatgggagaacaggtactgttatactcctgagtattcccatcctaaaacatgattatctatgtttatgtttcaggatagcacaaatgtttatgttatacataattaatatgtattttacatacatatgatagagaatattacatatgtataaaaatgtgtgccataatatataatttctatcttaattatatataaaactcccatgacaaaaattttatatacacatatacacacgtgcatgtgtgtgcatactctcttactttaagacaggagttctattattacctaattgggtggttttaaaaaatagaatttatatatgatgaaaattatataattgtatatataaaaatataacatatataattttatatatataaaatctccacacatttagtattttattagtaaagttttaattttgtttccatcatttcaagggatttgggaagagggcaaattcgaaaaataattcactgtgacaacttgatcaatttcccagtttttatcaatatattctttatccagttaggtttaaaaaataaaattttttagggaattgtcattcaatctaactttaaaataaaacttataggctggccacagtggctcacacctgtaatcccagcactttgggaagtcaagatcagaggatctcctaaggccaggcgttcaagaccagtctgggcaatgaagccagacctatgtctacaagaaaattaaaataataataataacaattagtcaggcggctgggcgtggtggctcatgcctgtagtcccagcactttgggaggccaaggcgggtggatcatgaggtcaggagatcgagaccatcctggctaacg

SEQ ID NO: 1244413 - DNA, 4001 bp, Homo sapiens
taaatacctacaagatagaaagtgtaaatgccgcgagagatgtgcagaaaaagcattacaggagcccagagggagctgttaccacctcacagaaatataaccccttcaatctgtttaaaacaattttataactattaactccctttaggctcacaacagccaaccctaggagagtagatgtttacctaatattcaagatgaggaaactgaagcacagaaaggttgatcaagttccaaaatcacatagttagagcaagaatcaagatactttgtattatattttctccgggggagtagttcaacatatggcaagccttttgtaaaaggaaagagtattttagtattgtaagtaatcagttcctactgtgagcattttatacatagctatatccatatatacaattaatcttgatttccattaacaggtgtgcttaaagcaaggccaagcaactgggtactataaatattaaaacaaataaataaacttccaccggatgttaacagaaaaagaaaaaaagatacaagatttctctctccagtaacttgcggttacttcttctgtaattgttacccttgtctaaataacattctaaaattggtctgctcctgagcccgggcaagtacaagttggttcatccaataaatatcttcatgaaaaggtacatcaaaacattttaaaaagctattaaaaattaaacgatgccatcaactcttcagttatccacaggacaatcacatgtgacccagcatcagcagctattgatcaagatatattgaacgaatgaatgaatctttgtaggcatttttaaatcccgggcctgttgctccttgcacagtgccatgttcagccttccatcactgcctcaccagggtgcacacaaggaatgtaaatttcaatataattaggatataattagagaagcaaatctgatgcaggtttacatactaatcccaaagattagaattacctatactactactctccaaggttaactctgtggaagaggcaccgcagcatgcaacatcacataaagaaaactgacacttcctgagcaaatagttttcgtccatatcacttattcccatccattcctttaatacatgactattcctgatccagttaatttgaagaattcagtctcctctccataaaggctgatttcacaactacagtttctcaaattcctctctccccaaaaaggggtgcacttacggacttcgcttaagaaaacaccaacaataaacggcagaaggtatagtgttcggatctttgccatctccaccagtacccagccttcgccattacaccctgaagcggtctgttagaaaggtgaactaatttactctgcacgcacttgtccatggctgtcaacctccgcagccccttctacacttccaagtcggccaccaactccgcctcagtgagcccaggcccgccacctgcgccggccccacccggggcaccggctgcccgctctccctcgcaggccctgtaggctccgcacgcccctccgcacaggacacctcggggccagccccggcccggccacagcccattcttcctccaaactccataagcctccgctagcccagcccgagctccccgccgcgcccggctctctcctgggctgccgagtggaagaggccaggcggccaggacgggtcccgacctgcccaggcctgcgacaccccccgcccggcggagaaaccgtcccagcggctgctgccccgggagccctcggaagcccccggactagcaggagcccggaggccggggttgcaggcgccagggcctactcaccgggagctggctaagcgtgggagccgacgtgcgccccggcctgaggagtgggacgcggccacggcgcgcggccctacaccgggacctcgttcggcgcggcgagtcggacgctcactccagccgccgccgccgccgcggctgctgcttcgccaccttggccgccatcttgactcaacccctctccctccccccagcccgcggagccgcggctaaggcggctccagcgccggctcctcctccttccggagagttgggagaccaactccctccgctggccgggcgcctctcctacctcggcggagcttcccgggtcgcgctgcgcccggtctcttcatgtctcctctaggcctggcagcggcggtcctctcggacggatacggggccgagcagcgcccagccggatccagcgctgctgccatcgtgccctgggcttgtgcgccccccgcctgcccgtctgttccgcgcgcccgaggccttcctcaggcgtgggaaaaggaaaaactccaggccgtggaagggaccctgcaaacccctccgcggcgtggtggggcggcggcggcctcctctggccggagctgcgtacagggaagccggtcccctcgtggctgggagctggaggggtgcatttcgacctgcccaagatactttctagggctctggctggaattcgcaccaagccctcactgaaatgctgggcgaggccgatttgtccacgatgttgctccttaaccttaagttacttgcaagaggagcctgtggccctcgcgactgttaagtgcacgctcagcctcaccctgctggggaaacgacggttcctcgtaaccgcacgcatacgttcctttagaaaagccaggcccgaccggacgcagtgggtcacgcttgtaatcccagcacttagggaggccgaggcgggccatcacttaaggtcaggagttcgagaccagcctgacgaacatggagaaaccccgtcactactaaaaatacaaaaattaagcgggcgtggtggcgcgcgccagtaatcccagctactggggagaccgaagtgggagaattgcttgaacgcgggaggctgaggtagcagcgaacctaggtcgcgccactgcactccagcctgggcgacggagccagaccgtttcaaaaaaaaaaaagaaagggccgggcgcggtggctcaggcctgtaatcccagcactttgggaggccgaggcgagcggatcacgaagtcaggagttcgagaccagcctagttaacatggtgaaaccccctctctactaaaaatacaaaaattagctgggcgtggtggcgcgcgcctatagtcccagctactcgggaggctgaggcagaagagtcgcttgaacccgggagacagaggttgcagtgagccgagatcgctccactgcactccagcctgggcgacagagcctctcaaaaaaaaaaaaaaaggtaaagaaagccatccaaaagtgagaaggaataacaaagttggtgtaactggctattttggaaaactgtcatacggataacgggctgtctaaccctataattacgagaaaggcccgagttttaagaaatgaattcgaaaatgaagaggaaggaactcttcctataagtgggagcttatatataagacgcttccttttaaaccgattgtacagtgtggtaggactagggtaggaaactggacggcatggagacttctgtgttaaaacacaagagaacccttaacgttaaaacctcaagcttccggagcatgtcggcgggagggacttaacagcggaacccaacattccccggtgaagttttccagccggagtcagggtcagaggcagcctttcctactgcgcaggctcagtgctgcttacccatcatggaagcaatgtggctcctgtgtgtggcgttggcggtcttggcatggggcttcctctgggtttgggactcctcagaacgaatgaagagtcgggagcagggaggacggctgggagccgaaagccggaccctgctggtcatagcgcaccctgacgatgaagccatgttttttgctcccacagtgctaggcttggcccgcctaaggcactgggtgtacctgctttgcttctctgcaggtaggaggccataggaggggcgatgggagccggggctttgaaagggatttaagtgctaaccgatctcagtcgccttcttctcgaagttttccgtagggag

SEQ ID NO: 1244414 - DNA, 4001 bp, Homo sapiens
accttcagaaatctagcaacaatcaactcatttgagtttaaaacagcctgtccaaaatgccttttatttacaaggaaattattctttgtacaatggtaagaaaatctattttcaatgatattgtttctggttaacagttctaaaatggactgacgttagaagagttctttcagaactcactgttggcaatatatgcctttttactgaaattctactactctcaaaggtgacatttacagaatttttaactcttcaaagttgatcataaacacggtctctctttgattctatcagacttcttttttactttatggagtgctcagaaacttacgtcagaagtaattttaagctttagtaaccaaatttatcccagcatggtttaaaatgaaaacaaaaataagttgttttgcagatgtcatgaaagcaagatctaagttttactaaggttcctacttattttaagctctttatccaacttcaatttatttaatttaaaaaaatcaaaagaactacagcttcagaagatttagcaacttctatctggatcaagtcaacctctaaccagggctggccaaaggttttgtttctcacgcactctaattttaaataacaataattttaataataattcagaagaaatacttcacttggtttccctttacttctcttcagcccatgacttaacgctgcactgtgcccatcaacttcacgatttagcaaagcaattaaccagcaactcctgaacaagcttcacaggaagatttttctcatgactgagcagccgtttttatcctaggtgagttttctcaaaaataattgagtaagtaatctaccagcttctggcatatctttggcaagtcacattttctgccttgttttgtagctgagaagggtataaaaatcccacgaaaagaaaccagaactccgagcctagaaatgtaaattatgatccaagctaaaccactcaccagttggttgaacctaagtataaataattacccccatcccagctccatttacccatcgaaatggcgataacataatcagttgcaaccacaaggtgatgcggttagaaaaagataggaagaagagtgctctgaaacgtgtaaaggtgctacgtaaatagaaggtaataatcagtggtgacagaactctcacctcctttgcaaaacttaaagggtcatctcatggcttacagcaagaaaagagtcgagcacaagtaacccgagcccgttggtgacactttgccgaactccagggggaggatgattagcagttccgggcgggagtcaggagaatgccaatccgagcccaacgtgggctgctcgcgctctcgccccccatgggagagaggcactgagagatcaaaatgcaaccccgctccaagccaccctcgcaaatgaaggaatttcgaagagggggtaggaggaggcgggctgggcgcgccgctgccacctccgactgggccactccttgcgccgccagcgccccagcccacggtgccacgtcccggcctccgtcaccgccagccctcaccctacccggaacggggcacatcttccggaggccaccggaatcgttcccttgcaggcgcccctggggggccacacatcggaccagggaagggaggggacagttagagcggttggaacagttgcccccaggctggccgccccggaacccggcccggcccgccccggcggagcctcagacacggccccgggccgggaaggctccccaagggcaggcctcggcgccgccggcccagcgcagccccttagggagcggccccgcgctgcaggctcacctccaatgtgtcaaaagcgcatgttcgccgccgctcaaccgacgtctcccctccgccggcccggccaggcccgcccagccgctcggctcagctcccctacgcagccccgagctccactcagcgtacctccgcgcccggctcctccccgacacgtcagggactgcctgggtgtccgaggccattctgtgacgcacgggggcggggctcggagcatgcgcggcagcgcacgggtatgcggggcggggtggggcggggctggtgtcacagggggcgggccagagcccggcgcgctgacgccaagctgacggcgtcctcttgcgcaggcgtcctcttgcgcaggcgctcctggactctgcgaccggctggttttggcttgtgcagttccctgaaactgctattcgggagagtggtgccaagacggatgggaacctgccttcagttttctggccaccaaggcccttcaagtgtccatgtgtctgtgttcccgtttataaaatgaatctcggctcatagttcacctccgagtccattccccctgctcgaacacccaatggaacatcaggagcattctaagcatcactctcacaaagctctgtgttgtttttacagaacttccactgtttacattttgtatttgttctcatcttcctccagtagaattctaagttctatgagagctagaacctcttatgccttgctcatcccaacagataacttggttctaggcaaagtggacgctcaaatatttgatgaatgaatgaatggattcgttggcacaaaggggattttatatttgcccatttatatattgtatatatctgagcatatattcatttttgtatacatgcgtgtacgtgtgtgtatgggtgtgactttctcccctccaggtcccccaagaaatggagtcctatgtgtatatatatacctcttacaatccatcttggtttttgtttgtttgtttgtttgtttgtttttgagacggagtttcgctcttgttgcccaggctggagtgcagtggcgcgatctcggctcactgcaacctccgcctcccaggtttaagcaattctcctgcctcagcctccctagtagctgggattacaggcgcctgccaccacgcccgactaatttttgtatttttagtagagacggggtttcaccatgttggccaggctggtctcgaactcctgacctcgtgatccgcccgcctcggcctcccaaagtgctgggattacaggcgtgagacacagcgcccggccccatcttgcattattaatgtttatatatttttagtacgtaaacacacacgtgtatgtgtgtgtgcgcgcgtgtgtattccctagcggacttggaagcaagctggagacgatactagcccaaaaaggagggaaagagggataggcaacttacatagggagtggaaacttaaaggaagagatacattttaaaaacaattttaagaacttttgctgtataatgtacaaggtaatcctttcctttaggagatggggtctactgtgttgcccaggctggtcaagaactcctgacttcggccaggcgctgcagcactttgggaagccgaggcgggcaaatcacctgaggccaggacttcgagaccagcctggccaacatggtgaaaccctgtctctactaaaagtacaaaaattagccaggcatgatggtgggcacctgtaatcctagctactccggaggctgaggcaggagaatcgctcgaacccgggaggcggaggttgcagtgagcaccactgcactctaacctgggcgacagagtgagactccgtctaaaaacaaacaaaacaaaacaaaaaagaactcctgacttcaggcaatcttcccacctcagccccccacaaagtcctgggattacaggcaccagcctccatgcggcacgcaatgtaatcctttccaatttcagtgcttttaggattggatttgtgggtgtgaacacaaaaataatgtgtaagacatgcctcaaggtgaaaacaaagtgagcctaggaggcccagtttatatttttgagggcgatggacataaacaggaacaatgcaagatggattgtaagaggtacccaaatcaataaagatcagagaagggattaatggggtttgtgggaaaggtaacatattacatatgcctattatgaataatattatgaataatatgcatattatgaaaa

SEQ ID NO: 1244415 - DNA, 4001 bp, Homo sapiens
agtagttgggactacaggcacatgccaatgccaccatacctggctaatttttttatttttttgtagacagggggactcattgtgttgcccaggctggtctctaactcctaagctcaagcaattgcccatctcggcctcccaaagtgctaggattataggcgtgagccactgcaccctgccccttttcagaaaactctgccaagtctcaggatcactcttcctctttaaaacccttcctggtggctgggagtggtggctcacgcctgtaatcccaacactttgggaggcagaagcaggtggatcgcctgaggtcaggagttcgagaccaggctggccaacatggtgaaaccctgtctctactaaaaatacaaaaaattagccaggcatggtggcacacgcctgtaaggctgaggcaggagaattgcttgaacccgggaggcggggcttgcagtaagccaagatggtgccattgcactccagcctgggcaacagaggagactctgtctcacaaaaaaaaaaaaaaaaaaaaaaaaaaaattagccggttgttgtggcgtgtgcctgtagtcccagctactcaggatgctgaggcaggagaattgcgtgaacccgggaggcggagattgcagtgaactgagattgccactacactccagcctgagcgacagtgcaagactccgtctcaaaaacaaaaacaaaaacaaaacaaaaccgtttgtggcaaatgaaccttttatctcaggttatcaggccataatctagtccccgccctcgacaattacattttataccattctctaccttgcccactacattccaactattactagtctttctcggtttcttgaatgctctgttttcccatgtgagacatttcacatacgctatttcctttgcctgaaaagttctcccttcacctgcagactactggtcctcattcctcaagtcttggccttaaatctcacttctggcctgtcgcggtggctcacgcctgtaattccagcacttagggaggccggcgcgggcggatcacctgaggtcaggaatttgagaccagcctggccaacatggcgaaaccccatctgtactaaaaacacaaaaaatattagctgggcatggtggcgcgtgcctgtagtcccagctactcgggaggctgaggcaggagaagcgcttgaaccagggaggcagaggttgcagtgagctgagatagtgccactgcactcgagatcgcgccactgcgacagagtgagactgcctcaaaaaaaaaaaaaaaaaaaaaaaatccaaaaaatttagccgggcatggtggcgcacgcctgtaatcctagctactcgggaggctgaggcacaacgattgcttgaacccaggaggtggtggttgcagtgtgccaagatcgtgccactgaactccagccggggtgacagagggagactctgtcttaaaaatcaatcaagcaagcaagcaatctcccttctcagagaattcttccttgaccatctcatataagtattctcactggtaatgtactctatcctcacaacctgctaataacacttcataactgctataacttcttacttcataatgttttgtttattgtataactttcccacagtcagtaagttccaagagggaaaagaccacgcccgttccggttctaactatatacccagcggccaaagcctgacatacatagctggcactcagtatttgttgaacgaatgaataaagaagctaacataactcagtgggcggagcaatgggcctgtcaggggcgtggcctccgtagaggcggagtctccccgggggactgggaccggaagcttgggcggggcttcccagagtggcgctcacgccttggggcgggattaggcgggcggcgacttcgcgggcggaattggggcttattttccctatcccctagcagtttcctcccccagagccctggctcacccgaaggcacctctccccaccactcggatccgctcgtacttctccatctcatttcttagagtttcacttccgtcccccacgcggcgcgtgcgcggacccacccactctgggccccgccccttcacggcgagcggcttgcggggcggagccagcgccctaggtgtgggttccgccacgcgtccgtatttgtgggcctgcaccacacacctcccgctgcgacacgccgtcacttttcccctcacgaccctgccccacgcagtgtccaagaatagggcaagaaaatagggcgcgcccgcaatggcgggcacggtacccgcccctcccacacatatacccagcccttgtaaagcttgctagactaaaaggatgtcgcgttcccgagagttaaaccccacaggccgggaaggggtgggaagagaagattgacccccttcttgcccacgagtgacgctatttcaggagaaagcgggttctccttggcacgcaaacgataaacacacccaaaacgaccgagaccagcgctcctgggagaaggcagcagggttggtttcgtgtttgcctggggagggacgggggaaatcccaagtcgtgcaagttgattcacctgaagaggacatgacacggtctcgggccgtcccgactagtgagcgccgcgctcgtcagcactctcaactcccctttcacacacgcgctgcaggagggtaatctgccctcagtgctcatcttcccatgggggaagatgggggcggtagtgggtcagtacctgaaagcatcaaggggagaaggaaagaccgcggtttcgccgaaatgagctcaaggcaaaagcctagaggcagggggctggttagtgtgaccagctaggctctttaccggaagtgaggttaattccaggttctcccgggctcctgctctgcgggagctctagaaaaactcagtattcggccaggcgcggtggctcacgcctgtaattccagcactttggggaggccgaggcgggcggatcacctgaggtcaggagtttgagaccaacctggccaacatggtaaaacctcgtctctactaaaaatacaaaaattagttgggcacggtggcgcgcgcttgtaatcccagctactcgggaggctgaggcaggagaatcgcttgaatctgggaggcggaggttgcagtgagccgagatcgtgccattgcactccagcctgggcgatagagtgagcctccatctcaaaaaaaaaaaaagaaagaaagaaaacatcagtattcaggaggaggatggtcactagctgaaggttagcgtccctgtatcagagtgggcaaggggtgtgaggaaaggggcgttttatcttctgcccctgtcctggctctcgcaagggtatccaaacccacccacgtggaatgactgctggaagggcgctggctcaggccggtgtcggccggcggacagagcagctctgtgagccaaggggaggggcgggaaagccgctcacccaggacacccgtgttctcacctagaaaccgactgggctttggttgacttaagagtcccacaggggttaatgtgtaaccttggagccataggggaggaaaacactcaaacggcttggtccctgggtccttgcgcctcaggttttctcggcttcttcctcccgcccgcagcacctttcccctcccccgcttcttcccgcccctcctctattactaccctcttctccctccccgctctcatctccgcttaacttccctcgctggctctcagctgctcctcctttcgcccagagtttatacctaaactctccccgaaagcagctgcctcgctcggaggcgggagggggagcccgcgccacagtgagggcaggctgacacctagtggctaggagccgcaactgctgcaagctaccggcttggagagcgcgggtcactccagctgtcccggcaaatcggaggtcttgcttgcccagcctccggggagccgggccgagggccgggactgtctgagggaggactgtgacagccgcccggccccaggagtttaagagccggcgggaagagg

SEQ ID NO: 1244416 - DNA, 4001 bp, Homo sapiens
gctctcccattcaacagacttggggatcagggtggccctgcccacacccagcctgtcttgtcactctatttcccccattccgtccccaccccaccaccactgccctagctgtgttctcaccttcatctgcagaggtcccctgttcagccaaggcagagtcttcagtgggggccaagggctcgaggggaggtgtggggatgggagtaggggggctgaagcctggctcagggggtagcacggtgatctgggtgcacttgccataaaggtccacgacggcccagacacgagggggcaggcctgtggcagccacaccgcaatcccgcccattcacccagagccgaagctccccagcaactgtgcgctccacgcccacgcggtccccttcaccaagctggtccaggtcctgaccatactcctccaacacagagcgtccatctctcagcacagagcagcccgacactacccacgagccccccttcaggcccgtggcactgcttggaaagtccagcacactggggtccagcgctgtcaccccaatctcaatggagccgctccaggagttgacctgggataggggtattggacagaggcttagaatgggccaccccccattccacaggccaccatatcttcccacctctcagacagctagctggctttctgtctcttggaacactaatccagagatgcagacagtgattttctggactccgtcttggtaattatttgggctttcctttagcaactctgctctctactcagtgtttactaaaccactcctttccaagccaagcacaaattccttggttccaacctcctgcctcctctaactttccttgtctctatggctctccaaccatccaaattctcctacttcctatacccacacctcttgctcttgtgtatcattcattcctttcccctggcctaattctctccaaagatcaggctctacccagattcaatctccttccaagttctttttctgtgagcctggcctcttcactgaatcacacacacctccctcaccctggatctttctcctcacctatctttctggcacagcctctgtccttcaatggtttgttctgtttttttgagacggagtctcactcactctattgcccaggctggagtgcaatggcatgatctcagctcactgcaacctctgcctcccgggttcaagccattctcctgcctcagcctccagagtagctgggattacaggcgcacgccaccatgcctggccaatttttgtatttttagtaaagacggggtttcaccacgttcaccaggctggtctcaaacccctgactctagtgatccgcccgcctcggactcccaaagtgctgggattacgtttgttcgttccttggcatctttcttcacttgccatcacatctctgacatctctccatcctccatgcccaagaaattgtaccaggaggtctgttcccagccattctagtgggttagccctcgtgtcccttccctggttctggatcttgagaaaactcaagctcttaatgtcatcttcaaactcaatgtttctgcttcatgctgtcttcctgaccgccccctggtgctctatggtctttctgttccctctcggtgcccggcaatgtgggctaccctggctgtcctaccccgtctccctctagacgcctcccaccaccctccacatctctgttccgcggtaccagcgctgcaccttgcggtcgatgcggacggtgaagacgcgtccatcgcgcaagggttctcggctcaacaccagcccgtggttaaactcctggcccggctgctgccgccgcgccgtacgcccacaggccgacaggctcaccaagcgcccagtgcgcgggtgcagttccccgccgctgcccagacccccgttggaccccggtcctgagccgctcccgctggggcccccacccccgcccggccccggtccagggcctcccccagagcccccactcccacccgaccctgccgccatctccgctgacaccggggcagcgcgacagccgcgcttggcggcaccgtggcaaccgcgtcgggcagacagtccgagggatacgaccggggggctgaggccaggtatgctttacggcactgccgggcaatgaagcagcccgcgctaggagctggggacgaccacgatgagaacagaaggacacggggtcgggagcctcgctttacggcatagcgaggtgacggagcggctccgagggggacgaagacctgggcagggagcttttgcgacagtgggagaaagacacgcccaccgcaggcatctttacgacggtggggtgctggagcccaaacactttctgctttgcgacagcggcaccgacgaccccgccctcgctagggggcggtgacaccttgaagcactcgctttacggcaagagggggtgtctcccctcgggatgcaggctccaaagcagcgtgagccgagtctggaggacccagagaagcggtagtgaaagtctcttcccgccacccgactgaggacgaagtgtcttgcaacagtgcggcagtccttccactttgcctcacacctcttctgattggctgagctagccgactggcgggggtgggggaagctcgctgatagttcaagtcaagcccagcttcaactccaactcaaccaaactattccatgttaagaccacaaagagtctaaagaagtcccgacaggccgtttcaagcgacagcgttgatgaccccaaaagatctcccttagagctattaacaagccccctgcccaactccccgaagctcaagctcaggctggaggaccgtgaggtcacagtcgaagctcctggcctggccccctgactgggattggctggtttggatgagggtggtgatggagaagggcgggaacaaattgcccagacaaagaaaatctttgggtgggacacaaaggaaaggggcgagcggagggacccccagcccgagtctctatatagtcttgattccgcccgccgcagctctggagcaggggagaagtggacccgggactgagcccgagcatccccggccggcagcggtgggggcggggccaggggcggggctacgtggagccgggaggcgggtcaggatcgctgagagcagccccccagtggggccatggagaaggtggagtccctaggggctgctggcggcctcaaccgggattcccctggaggggcagccagaggagtgcccgcagcggtcacaggagtcgaggcaggcgctgggcagccctccagagtagtcttgtttcacggttctgggccccacgtgcactcagggggctccgtaactcatagtactggttcaagctgtccctccggggggatagtggtccttggttccgggcccagtcagcacccaagggaggctgcgaaccacagccttgggtctggcaggaaccctggtggattcaacatccccgggcctcgaaccagtgtatccagggcttccagccccgggcctgggggacctgcagggcaagaggtaaacagccccgggtgcagtccgcactctgggccaacttgcttgaacccccaaaactcccaacaggaccggccccggagcatcctacgaaagaacagctccaacttgatgcagaaatcccccaatgtggagaagtaaggagcccagctctgcgggcagccagcccagagtcgggagggttcaggacacctgagggtgggagccagaaggaaaggggcagagccttaagaatgaagagttagagtaggtgagggcaattgagtgggaagtccgaggttccaggctttcgggagaagagcaggtgccccataaaccgtggctgcacaggactgtgattatcattaagtctgaccccatccccagcctcaacaaggtataagaaacctgttttgagtcggagtggtgactcatgcctgtaatcctagcactttgggaggccgaggtgggcagatcacctgaggtcaggagttcgagaccagcccggccaacatggtgaaacc

SEQ ID NO: 1244417 - DNA, 4001 bp, Homo sapiens
cggccggcaccgtcggcgccttgctccgtgaggaagttgcgagagttgagctgcagacagccggccaccagattggtggtgggctgcgacagacccttgcacagagtctgcacgtaggacactaggtctggccgcttgccggagcgcaggatctccgagagcgcccagatatagttcttggctaggcgcagcgtctcgatcttggacagcttctgcgtcttggagtagcagggcaccaccttgcgcaggttgtccagggctgcgttcaggtcgtgcatgcggttgcgctcccgcgcgttcgccttctgccgccgaagcttggagcgctccaagcgcgccttggtcatcttgcgcttcttgggcccgcgcttcttgggccgctcgccctccgcctcgtccagtccttcttcctcctcctcttcctcctcctcctctccccccagctcgccttcctccttgacctcggccaacgtggcctccgtcccctcttctccacggagagggactggcttggccgcccgggctggccccggagcccctggcccgggcgcaggcggtggcggtggcggcgcgtcgcccttgtcgctcctcggctcgtcgtcttcgccgtcgccccagctggcgaacttgggcacgtccgagagaaggccgggctcgctgaacaggcgggtcagcatggtgcctgagggcgccccgcgggcgggaaggggagacagacagcacaaagtgaggggcgcgctggggtaccgacgcccccccacaaccctcctccacccccgagtctcgtgcgggctcctgcctaggctaccctggatgcccacctccgccgcctgccccgcccagagccggcccagccctacccggctgccggcctgggatctcggcccaggccctctccccggcgctgggccccggctccgcccctcgcttgaatggggggctgctccccgcgcctgcttcttctcagggtcagggcagggaccgggtgggggttttagggaccagatatctttgccaggggaggcggcgcgctcgccctgaaagcccgttctctcctggcggtggagagaggctggtcggccgccggtggggacagctgccccgctccgcgctctcgcggcccgggccccccggcccagctccctcacccctcccgtggctctcacccccacgctccctaatccaatttgcaacttggctgcgcgccgccccttgctcggcccccacccccgcacccccaattccagaggcgggaggatcgtctcctctagccgatgcgtccccagctcccggagccggctctgggcggcgaggactgaagcagcggggcgtggggaggagactgagagaagcgagcccagtccgtcccctctgcggtcagggacccccttcccccttcaagctgactccctcccacaaggctcttcagatctcgttgtattttgggattgatgggggaaaaatccaaatttgtttgtttgcttcccttttttcggtggtggggaaaggtggcaggctttttgggacaaccatggaggggtcctccgtctcggcctcttcgcatatccccctccgtgatcctgccttccccccccaccgagcccatcgcaggcagagacacctcctctgcagccccctgggctgcagcccctaagggagagagaacctggggcccctccgatgcccacccaatgaggggggcatcatcccaggaaggaggtatttgaggaccctcctgtcggccgaagctgccgcccctcctcccaaccggcgggtcagatctcgctccctttcggacaacttacctcggagaggagtcaaggggagaggggaggggagggggggagggggcaagagagagaggggggagaagagggatcttctcgcttatttcattgttcccccatcttcagggagcgggggcagcggctcctcaaggcggcgggcgccggcgtcttcagagcgccatgcgaaccgcggagcgagtgtggcatctctaccaggcggggtaccagcctctatgccaggccatatgggcttggcacgtcacgggcagcagctatcacatgagagacggtgattggcatgcgtctgcactgggggagagccggctcccccgggacccgccgccatctgtcactctctactccaaaaaaaaaaaaaaaaattaaataaataaaggaaataaataaatatttctgccgccctcccctccccgcccaacgcagggaaagcagggattgagaggaaggtgggaggagttgccccctgtatatagagaccccctcacgggaacaatggggtggcaaggctggacactgggggctcgtggtggccaattctatgctccctcagggtcccgctctgtccatttcctcccctgcaggcccccaaggtgggtcagggaccagaccccgggttggggagaaaggacctctgtgcttgcccccactccccaggagggtccccttggccacaaagggacagctgagaccccctcccaggatggctgtaaggggcgtccctggcccgagccccataggtagatgttggcaccatgccatccctcatccctgtctgcccctcccccacccaccctcacgcacacacaacatatgtggctaaacgaaattcaaaccaagggaaagacagagaaagggaaagatgtgcctggatgtctgtgcctctgcatgggcgtgtgtgtgtctgtggggacatgtgtgtatctgtggagtcagccgatgggagatctttccttggttgttgggggcgtatccatgttagggtggagtggggaggggccgcgagatgagcctgtgcaccacccatctgggggtggaggggagggtctaagtctggattcctaacctagaaacctctcactctcctcctcccactgccagacaggtgaccagtccaccagcggctttctctcctggtcttcagacttggttatttgagggaggaggagcaggcagtgctgagaactgcctaagttcctggatgagactcaagcattctcctccccttctgaaaaatctgaaaatactgaagccaaccccagtaatcccaagagtggccaaggggaggtaggtcagacagctgtcttgataagggaggtaggaagttgctgttttatcttgtggctcacctttcaacactctcattgggccagacacagatacaaatggcacaggttgaagaggtggctttggacacacacacacacactcatgcacacacacatacacacacacacggatgcatacacatgcacacatatacctgttcctcaccctgtggtgtagaaaaatagataacatacccctactcagatagacacatgtatgtgagcaggtaatcacagcctggtgtagacagacccttgcccacaccccatttggagcatttgtatgttttagacccacatttctgcccctccagacactctagctgacatatatacacaacttcaattatactttcagcacacacattttgatgtctaccatgtgccaagcactgtggtggtacaaaaatgagcacggggaggcctttaccctcaatctgggtgggcagggctctctccctctaggaggctccccagggaccttgggctggtaagacactgatctgatgttgggtaggttggattaagttctaaatagagacacacatcaggaggccttggagataggggtgctggtgctgcctgggactcttgagtcacttggctgggagttgaaagtagcctgagaatgtacctctccaactcctcatcttacagaggcccatggagggaaactgacctgcctaggaacacacaggggaaacacagaactgggcctagaattcaggcacttgacccacagaccagtactccacttataagcccacaatctgcctcagtggtctctaaaaataagcctaccatgcttcccttcattcacgaatcctgggtctgcaaggcgaatcccatctctggcagatagtcgtggtgg

SEQ ID NO: 1244418 - DNA, 4001 bp, Homo sapiens
caagttttaaatctaacgctctatcaataatgtaatcttttatatgcagtaacattatacttcagatggattagtagtttagtttagatgcctttgggtctggaagcatacgaatggataaaacaattccttcaagtctctgacagcttcataactctattttatctacatagcttcttctcaacttcctctgtctattccaagatattttccaggtaggtctgaaacgctgagtcccgtaaagaaatgtttatgcatcaaataacagaagagctcttcccccaccccttcagctcccataatgttttaccattatatccagtaaacaaaataggttgactcaatcttaaacaattcccccatcacaggaagcccactgcacccacagctgcagaaagcatcccttaaaccatccccaactacctacagcaacacaaagttaaaccaatttccactgacaaaaggctatgtgtgcatttattctaatcagccccaggatttattgtgtgaaactcaggcgataaaaagtcacctcctcaagctacaaaacttttttttcatcccaaatattctcaatgaaagttctcttgtcaaccaggagagagtcaaaaacaaccacaaacactagcagaatgatccgctccaggaccacatcccagctggctttgctctgttgtcggtggctctgaagcagtttctcactttcctttcacccttctcccctttactccccaacattctcactcgagaatgcatcacatcctcagaccgctggcaaaaaaaaaaggggggggggaagagactgcaattatcaaggaaggggaagatatttcagaaccacggtttccactgcaaacggcaataaaaaaaaaaggcagtctgtgtcatcaggatatgggggacgacgttgtagggcatcacaaagatgtgcagtgagtgtgcacttgaagctctcggggcaggatgagacgatggagcagaaagtaagaaaacctgtgccttccttgctttcttctgctcttccccctccaggagaggaagctgaagaaactgggggaggggcggaatgttatcgttctcctattgagggtatataagacaggccttagggttcgctcgtccccagttaggagggtcacggagggaagaggaagagagaacccctaaacgttacccacctctgctcaaaaacaaaagtaagggggtaattattaaatccagatggcgcgcccctaaaggcgcccccaggtcactcatccccatttccaagcggaagggctgggataaaggggatggagggtcggaggctggtcagggacaaggccccaccccccgacttaggagggaaagggtgcccaagctcccagctgtcccctcctacccctcacctcccgccttggccacccccacttatccccccttcccttctcttcccttcccttcctttcctccagagcctgaggcagccgcgggggaggcggccgctcctacctcccctcacctactctgtccccacccccactccgctcccacctcccgcccgccacgggccggttacctgctcgtcgaagcggctgaccacggcctggacccattccaccggcctgtgcgcggccatgtcctccccgcggccggggggcggcggagggaagggtgggccggcgccctgggccgggaagagggcggggagcggaggctgaggtgagggaagaggcaaggagagggtctgtggagtgcaggctcccagtgttcccacgggggtggggatggggggtcagcgccgagcgggagggggagagggaaagggggcgttggcaaggaggctggggggagggggataggggaaggggacccggggaggggagggggcctcttggtcgctctccccactagcgccgtctccccacagccatcacagtccgagacgccgccatgacaccccaccggaagtgggatcctttccacggcccggggagagggagcgcgagcgagctagagattgagagcgcggctgggaaaggggagggggaagcgagagggaaggcggcctgccgcgcatgcgcccgcgccggccggtttcattaatgaaaaagcgagtcctcctggaggtgacgtcatctaactcctctgggccgtctggcgagcgtccctcaccgccgtggggctcacctagactggcgctgggctcagctggcgagtgccagagctgacccgggagcatccactcccatccccaccgccccctacagctgtcccctcccccgccggcctccgggtttggattgctcccggagttggaagttagggcgccctggggctagcctttctcccagcgcgcggatctctgccgctaatctcctggggaggctgtgctctcagcttaagctctcagaaaaaataaggtacacgacctccgattttcaggttcttcgtagcttggtagactgctgagaaacaaaaaaggaaggccaaagagagattccgtgattttttttttttagaggtcgcttaaatcccaatgctagacccggtggcaatcaaggtctagccaccaggtctagcattgggatttaagcccagctttcctctgcaaaactcatagccatccaagttaatataactattgcacagttgatgagagattcaagtttcaccaccctcaaaacacctttaaggccttgcattcattattaattcaatatattcatcgtcttatttaaatccttgaacaaaccttttcaatacatatcattaacttcatgaactgatgaatacgtcacgtccccacccccgtgggaacgctgggagcctgcactcctccctcagacctttgatttgcccaaggtctgagttgacaggtggcaaagtcaggatgtaaaccaacgtggtttaactcctagaacaatagaggtagactatgggtctcctaaaacaaagtccttccctatacctccaataccagagttgaaaggatttcatgtgtaattgggttgtgccagttttccaggaagaggattacatccaaaacaacggataatctatgtctgacattggactttggaatgactaattttttttttttttttttaagacagagtctcaccctgtcacccaggctggagtgcagaggcgcgatctcggctcactgcaacctccgcctcccggttgaagtgattcttctgcctcagcctcccgagtagctgggactacaggcatgcgccaccacagccggctaatttttgtatttttagtagagacggtgtttcaccatattggccaggctggtcttgaactcctgacctcatgatccgcccacctcagcctcccaaagtactgggattacaggtgtgagccaccgcacctggcctggaatgagtaattttaaaatttgtcttcctcgatacattttacctaggcaaatgtttttgtttttcagagacaaggtctgactctgtgcagtggagtgcagtggctcaatcatagctcactccagcctcagactcctgggccgaagtgatcctcccacctcaagctcctgaatagctgggactacaggtgagtgtcaccctgctttggctaattttttttttttttttttttttggtagagacacagtcttgctatgttgcccaggctggtctggaactcctggcctcaagtgatccccctgccttggcctcccaaagtgctgggatgacaggggtgagctaccacacaggcccctaggccaatgttaaaatgaatttacacattccaagcacgcgctaatcagccagttaagccacacagacactgggtgataagggagaacaaaactagaattttaattttcctacagaaaagccacaaagccagtagcccacatacagagagatatatccttgagaaaagtttccaatctctaggttggtggttgtccaaaatacatattaaattaatgttttattccactagaacagacagacagtttggacatgtcttttgtcccttcttctttaagg

SEQ ID NO: 1244419 - DNA, 4001 bp, Homo sapiens
gtatttttagtagagatggggtttcactatgttggccaggctggtctcaagctcctgacctcaggtgatctgcccgcctcggccccccaaagtgctgggatcacaggcgtgagccactgtgcctggcctaaaggccacttttacaggaagaaaggactacttacactctcagaaaaaaaacccaaaatatagcaaccgatcatagaagaactatcaaagaaagctactgatcacgaatgatctcagttactgaatattaaatgtgcaatatcctaaaatgtagcttggtttgaataagcagacaataaccaggtcatccaaaatatcttacacctttgttttatttaccagccctcctcccccactacaggcgcattacccagcttctattttcacatgagaagcccatttcctgtcttaaaagtaaagctggattttcacccctcgggagaaaaccacccataacagttgtcttttctcagttcaaaaaggcaagattattaaacagtgagagtgtggaaggacaaaaggacaatgttcaggccaccacttcacccagaagaagaatgccttttgttttctgaactttgaaatctgatttccctttcctatcctcacaacttacaaaagaaaaaaaaggaaaagggccgacgcctgtaatcccagcacttcgggaggccgaggagggcggatcacccgaggtcgggagtttgagaccagcctgaacaacatggagaaaccccatctcaactaaaaatacaaaaattagccgggcgtggtggcgcatgcctgtaatcccagctactcgggaggctgagacaggagaatcgcttgaacccaggaaacggaggttgtggtgggccgatatcgcgccactgcactccagcctgggcaacaagagcaaaactccgtctcaaaaaaagaaaaaaaagaaagaaaagaaaaggaaagaaaaaaaggagagggatggtgggggccctactacgcaggactattccgtccagaatttgcataggcaggttttattttcattcatatgaccttctgagccaaagcagaaggatatggccacgttctctagccagactgcccagtgcagaggaagtaaatctgtttctggtctccacttttgagcttccattaatgtcacaaaccaagacataccgcctctcctctcctgcgttgtgacccatctaccaacttcattctacagggggagagcgagctatacgtacacacacgaacgtgcgcacacacacacactcacactccctctctctggtcagagtaaacacaattgcgacccagaattcctgcttacgctaccctcccgttctcacgcaatttattactaaaacctcccaggagccaattaagttcgaggaaccggacaaagtcccttaaaaatcaagtaggtgcagggcccatagcctgaggctggtcccaccctgcccggatacccgagtccggctgagaccaagtcgccatgcccactctcggcgccggagcttctagcctccaggggcggccagcgaacaagtgctacttccctggccttgacccacccttacagcaaaccccaccccgccctccgtcccgatggccccaccccactcccaagtccaggcctcacaccacgccttctcgtgccctcaaccctgcccagtccatcccaccccggagccagctttcctctcggccccgcgcggggcccctccctgtcaggcccagggccgggctctggcgggaaccccgctcggcccccgcctcctgcacctcagcaccatcccgtcgccccataagcctcggccccgcggcgctgcaaccctcccttctgggaaaggaatgtgcccgatacccactgcttagctcggcgtccgccgctgcctccacagcaggccctaagcccgagtcccggcctcgccgccgccaccgccggccggcctagagctcggagcctccgcttacctccccgccccctcctgctaccgcactcggaaacccgcccgccgcaaacaccctaggaacagtttctccaatcaacgagccgaggccggggccgtcgacggatgtccctctgattggcagcagagagggcccaatggctgagtgtacctcctcatccccggacctgatttcccaagactgacataattcccggcccaatgagtacctaggcccgccccgcggtatggacccaccaatgaggagggcgaaggccctagtgtctggcattctgggcccctcggccgcgccttcgcggcgggcgatgttagtgggcttgggcgttgggtgaagtatccaggttgggcgcttccagcgctttctgtggcgggggaatgaaggcctaggtcagggaataggaaggtgtatcgccgccagagtgcggaacaccctcgccttgagggttcccacagtgacttgcaaaagtctagtgagacccgagaatgctgaggcgggacacgaagcatgtggttcttgtggttgcgacgctcgtgccgccatcttgggtgctggcggcggaaaccggtaccccaacttcccctcggtgcgaacctggagaagccaccccagctgtgagggacggttgcgcctcatggcccaggcaagggtaccttcgctggagcagtaccgcggacggatatcatgagggtggtgggacgttggcggaacgttggcggaacgttggcggtgtgagaggtgtggggtaatggcgatttttgtcatggtagaaacagcccaaaggacccccctcgtttggcctcccacgcagcttagtcttgcttttttagggatgtttctcattttttaatttctccagtcccatctggttatattgccaaaacatgtttgtgactctcaaacgttagtttactcccagcatcacttggggagcttgctaagctacgaattccgaggtcccactggagagtctgatttaatgaccctggagtggcggccggataacctgcctgctggggtgattttaacgcagctgatgcgaagaccccatttagggaatcattgggttggcgtttgcaatgcgttcctcccagctataggacaaagaggtgtcaactcaactgtgtcttcttagaagagcccattatttataggtgagtcattagtccctgtacaactaaggacaaggccaactgataactcagtaaataatcgagtccattttgtgcttgcgagttaggggcttaatttggggtggtttgcagattaagtactttcactgcatataataaacgtacaccagcaaaccactcatggaattcttaaaaaaacttctgagctagtttaccagtttcaaagactaattcagagagcatgttttacctattctaggctggactggaactcctggactcaagcgatctttccatttatcagggactactgacgcgtgtctcccaataaatacctgagtataaacaacatgaggactagaattttgtgcgttaactgttataacttagtagacactcaaatactgagtacttgaagggggactcaagcaggcaggcctctgattttcctgttaaaagcagaaattaaccacaccttggaggatgtacagttttgaaggatatggcatgttaacaataaaataggagaccattcagtccccgaagtagtgagacaatgaagataaagactggtattgtataagaaaggaggaatatttaggtgtggccatcaactctaaaaataaataaggttgagaaggaagtattttaaacatagaactgggcccggcgcagtggctcacagtagcaccttgggaggccgaggcgggaggattgcttgaccagcctgggcagcatagtgagacccccgtcgctacaaaaaaacaagctgggcttggtgccacacatctatagtcccaactactcaggaggctgaggtgggaggatttcttgagctgggagattgaggctgcagtgagctatgatggtgccagtctgggcaacagtgagatgcttcctcaacaa

SEQ ID NO: 1244420 - DNA, 4001 bp, Homo sapiens
cctgacagctccagggaactggggctgagctttcgggctggggcccgcacccggacagaatctctgcccacctcacccgcaggctctaccgccgacggactctggggacagtgtcaaccccccccgccctgctgggaaacgcagccgtgaccccgagctgggacagcggctgccccctgaaaaggtgggggagtaccgagctgggaatcaggtcggggagtctagccacgactctggcccaacttgctgtgagatcttggccaagtcgtttaaactctcagagcctcagtctccgtatctgtaaagccggaatttggggcgcagtgctctgatgaaagatgctggcggggagagtgaagacgcctcctccgttgccagaccttccagggcattcggttcatggccataaagcaggccacatctgacaatctcgtcggaccacccggaggacccgccgacctttgccgagtcggtggcccgggataccgcgctacagaatccgaggcgtccgggcgcccccgtctcgttaggtgcccagcggcttgcaccgagagccaggagaggctcagaccggatcccgacccttcgaggcgcgggagcccacggagcgcggtgggcgcggcgctcgggtcgcgcagctaggtggggagcggcgcgcagccccagactcgcaggcaggcagcggcggactgcacttgcctcgccccgcagcgccccctgcctgccgcctcccgcctgcgtagccagagctgcgcgcggccaggaagggtccccgcctagtgcgccccggcgctctgcaccccgagacgtagccaccgccagcccgggtaggggcacacccgctccgtccctcgcgatccgctgcgctgcttcaagccgtgagaacacgcgcgtcggaggagcccgccggccgtgggggaaccccgggagcgggttcgccccggcgaagtgggcactcccctcccagccttagatccgcagccccaattccgggactgggagaggccgcgagcaggagcgcggggacaggcgctggaaatgtccaagcctctgctctctcttctcgtctcactgtccctcagcgggcaggcgggaccccgaccacttcagggtccgcgccccgctctgtctcctttccttctgcttccatctctctgccgccctcgccgtcgcccctcttctgccctccctaacccacttctcaacctctctcccgctccccaacctctccctccgacgcccctcccccccattgtctggccggtccccattgtccttgccgggtcccctctgcctccagtccctccgacctcctccattgttccatcccgtcgtcccgggctccccgccccagcccagctcgcccctctcatctctagtccccgtccagttccccctccttctctcgccttggttctgtcccacgactctccagagaccgagatgctgaggggaaagtcccttcgggatcccggcattcgagtgtcctcttccgaagaacctgggcatcggagagccccatgccccctcttgaaagacccctcccagctcccccaccgccccctgcggtacctgaggaccggcatccgtgctccggtcttgccctcatctccaccctggagagtcgcctctgcgctccgggaaccctagaccctccttcgtggtcccggcatcagaggtcctttcccaccacccaccctcagtatctgggaccccaatgctctgttctgtttccttggtggcggcgcccggctcttctcggagttctgatcccgggaaagggagcgggccccctccggctaacactcacccccagaagcagcaacagcagcaggcgcggcccgtccatggcgcggccggtggcacctgcccccatcgcccgcctcccgcggcagcgctcgacttccagctcggtccgctttgcggactgatggggctgcgctgcgctgcgctccagcgccccccctgcccgccggagctggccgcggctcggctcgctctggctgcgggcgggagaggctgggtgaagccagtgctgcggccccgcctccgccccgcccagcccgcccacccccggaaccgcgcccgcccgccctgccgcctcggggtgggaagcagaggcaaagggagggcgtgcggttccccgcaccccgctgcgcttctccctgccttgtcccttagagcctctcacccatcccgccctggtacccagttcccggcccgcgctactgcgcgtccgtcccggatgctgtgggcccggggaccagggcgtccccactgcggttcctgttcctctccggctgcggcccgccacagggttcactctcttacccatcttcctccgcctctggcttcaccttctccctggagccttgctccctaactgccccctatcagtaagaatgcccgcttgccctccctgcccttcatctcagtccatcaccccacctccaccccatccccacccctccccttcccagtgcaggagatccctgggcagaggcctagggggaggggaggggcgcaggcgcccttacctcggccatcgacattcaaggtggagtccattccgacatcatttgattctcaaatgaggggtttgaaggggtcacaggtgtgcacacagtgcacaggaatacacactctcaagctcacttgtatgtgtgatcgtgcacttacgtgtgcccacaccgttctcatgcactcctgccgacctgactgtcccacacatgcacctctccaggcatgcacacgggcacatatgtgatccggacattcaaacgcgcatatgtacacattcacacatgcatgtatacagtcgtgtctgcataagccctcacatgtatacagtcacacaaacacacacattcatgagtgcacacacacactgacacccatcaacaaacaaacagatgcatcttcaacaatatagacttcaccagactgtgagtgtctccatgggcttatgagctctgcaggcagggattatggtttcttctctgaattcctggtatacagtagggttcaagaaagttttgtagaagggaataaatagaaaagtggtgaaatggactcatatctgtgtacccatccatgtgctaggaccaaattcatcttgccctagaaaccttgccaagtccaaataatatgcctcccaaccccaaaagcatgccacccacccccatgcttacccctttcctgttccctccatttcttcgttcccagacatcaagaccctggagcacagagttgatgggggtgtctgcaaagtctatcccaacacccaaatcttaaccatgtttggatttcagtttcctcctggaaaaaaaaaaaatctcactaccctccccagttatggaaacaaaagggagatcaagagcgcttgtgggccaggcacatgcctgtaatcccagcactttgggaggccgaagcgggtggatcacctgaggtcgagagttcgagaccagcctggccaacatagtgaaacctcatctctactaaaaatacaaaaattagcttcgcgtggtggctcacgcctgtagtcccagctacttaggaggctgagacagaagaatcacttgaacccaggaggcggaggttgcagtgagcggaaatagcgccattgcactccagcctgggccacagagcaaaaactccatctcaaaaaacaaacaaacaaacaaacaaaaaacagtgctcatgaagagagcacgctagcagtctgtaggtgacttccaagatcggctgaagctaattcattcattcatgggggaaaaaaatatctgtcctgtgaatttctttcctgtgtaacccacaaagtccaggggacagccctggcctggaaaggacaggtagacatcattgtggttttcagcatgaatgctggtgagccaccaccttcatggctggacataagaggccaggcaaagagcacctcttcagaaatcactgaagagtcattccttccagacagggactgcttctaagatgtctcctcctcc

SEQ ID NO: 1244421 - DNA, 4001 bp, Homo sapiens
ctgaaactatgagaacttgggttcaatattggtggtagaaaggacctaaatattggtactcaaattaaattatttaaaaaaagaaacagataatcaaaggctttgtgtggtaggccaaagagatcaaattgacggcaatggaaagccattgccaatgaagagacatgatcagtccctgaggaaggtcactctggcagaagagggaagactgaacagagatgaaattagagaccgattaggagactattgatgtattccaagtttttttttctgttgttttgttgttgttgttgttgccgtttttgagacagggtcttgctcttttctccatgctggagtacattggtgtgatcatagctcactgcagcctctaactcctgggctcaagtgatcctcctgcctcagcctcccaaatagctgggactacagatgcatgccaccacacccagcctattccaagattttaaaaaatgatgagcgcctgaatcgggatggaaaggtggagatagatttgggaaatatttggtaggagaatcaacaaaacttggcaacaaattggaagccaagagtgagaatggtttaatccatttaacaagatacggaatttaggaaagataataattacatccaacatttgttttttctgttgttgaggtgtgggtagacaatgaaaaagttaaatttaaatatggtaagccttggggatttgtgaaacatacaagagatatccagtagatagttggatatacagctgtggaagctgaagaaaggtctaggttggagatatgaaaagttgagagtcatcaacagatggaagtaaagctgtgggaataaatgagttgccttagatagaacataaagtgggaagatggtgagacaggttggctagcattagactggactatgagccactggcaggcagggcaggtggtctgtaagtcttgtgccctcacaacctagcacagagtaggcgttttggaaagggctgagtgattggctcaacgaatgacccctcctttccaacctagtgagcttgtcctatccctccctactcagtggtcgctgtggtttcagctccctccacactgggataggcagagtatgagcattggcacatgctgttttcctggaacaaacaggtaaatccttttaaaattcctttgccctcttcttattttactcttagctttacattgtaaagctactcctcatactcctccaatttaaccccagaaagctccaatttaattcagctccacaaatagtcgtttgggtgagggaataacaacaaagacagttaaactgtgcccttgtcccctatgaattctcaatccagaccgcattcggcaaggcaagcgtgatgagtagagagtttatataagaggtgggagtactggggacacaagagcaaggacctcaccccgcgagcttccttataaactccagggcagggtctggggcgccatgtgtcagctttcctaggcttaatgctgagatggcactcccaggcggctgacatgaaaggagccttgtaaaagggtcagcgtcattagggtgatgaaccagttggtgtttggagatccggagtggatgaaaggcgcagggtgaagacgccctgcgttcccctggcttgactgggcagggcttccagagaacgatgaaagctgggggaactgagctcaaagtgtctcttgactttcccgggaagaagctgtggacacactccaaggtcggaaaggtagcagtggggactccttccctacagagtcttgggtcacctggtccccacgcaacccagactccacggagcctttcaggaagactctctaggattggaagttgctatggcaatgaggctcttggaatactgaaagcagccaagccctagagaggctaccaccggtacaccccgccttcccacccacgggtaaagtggcgccgcctacgcaccggcacagcccctgggctcccgccccggcgcggagaccaccgtggacatccgggggcgggaggccgctctggccccaagcggagcctctctctggtagacgagcccgagggagcccttctgggcgcggcgccgcggagctgctctatgctccaaccggaagtgctcttcaccgccggcctcccacccagctctctggtcccggcggtaagatggcggctgccgcggagtgcgatgtggtaatggcggcgaccgagccggagctgctcgacgaccaagaggcgaagaggtaaccgggtagcagggtagtagaggaggcgacctgcagctccgtggctcagggaaactcgttcctgccatgatgcagcccccagctgttgaggcgatgccccgccctccgcaaacacccccccatctgagatcaaggccggatggaccccctgaaggggcgctcttgggggtcggccttcctctcccgcttccgcctggcgtaggagctgaggcatggccttgttctccagctgagaggacgatcgtccttataggagaggccgagtctccgagggcaatttcagaggtctggtgcgaggtgggggaagcggcgcggcgtcgatgacgacttccttacatcgcccccgacccccgcgttctcttgttaacttctgtgcattgttgcctgtctgcactttccgtctccaaaacctttgctctcctcaccccgttttcccttgtaattataccccagcgatcactagtctgggttcgaagtgattgtgtgtctccataattgacctggttgcccccggttatcccagaagtcaaagatgacagagaaaaaaaggaagagcgaggggcttatctcgtgttctctacgtcagactcctcttcccctgtccttcctgggtgatctttatccttcccagcactgttctttcttaagttaagcaccaaggaagagggcaactgcttgggcgctgttggcactccgaagcagccgcagtggttcgagattgccagtcggactagccaagggagctgctgagtgagtggttttcgagaacgctctagattctggcaacagttaggccagattattggaagtggggttggaacagagttgtgggtagtcatacttgttctaatcctaaagcagaattgacaagaaggttctagaagtttggagccctttccttatcagctgcgggttagtctgacccttttgttcaagatatctacagtgccctcagtctctttgcaacatactttatatcttcataccaagcccgttgtgtcttcaggctgggtaatttgaggcggtgatgtagaattagttcatgagatctgaaatcaggattctgagatttttactatctaatgagttcgaaatataagaagtactcggacgcaatgaatagttatcaagcttgagggtggttaccacagccagatctcaagttcctgatctgctgggagctgaggggcctgacaaagtgtaataggcccctgggatatcagagaagccaggacaccagagtccagtctctgttcttaattttgagctttcatgttgttcctacttcttcctagatatttaaagctaagcatcatcaacccttatacatcattaaagagctgcacaatgggaaacaaaattcctcccagtgcagacggagcttaaattaattgtagagatttacttgtatttggaaagagttcagtggttctttatactgtaaatagggatttggccacaggttatttattttttattttttgagacggaatctcgctctgtcgcccaggctggagtgtagtggcgcgacctcagctcactgcaagctccgcctcctgagttcacaccattctcctgcctcagcctcaccagttgctgggactacacgtgcccaccaccacatccggctaattgttgttttttttttgtatttttagtagagatggggtttcaccctgttagccacgatggtctcgatctcctgacctcgtgatccgcccacctcggcctcccaaagtgctgggattacaggcgtgagct

SEQ ID NO: 1244422 - DNA, 4001 bp, Homo sapiens
acccggctaattttgtatttttagtagagacagggtttctccaagttcgttaggctggtctcgaactcccgacctgaggtgatccacccgcctcagcctcccaaagtgctcggattacaggcgtgatccaccgcacccggccaatggacattaattttatgctaattccatgctaagcacaagtgtgacatgacagcttctctttcctatcttggacatagggctttctccctccgtatttgttcagtgttgtagagttgatctgttacaatgtaagttttattcttccaggggggaaaaccaccaggagcagcttttagcctgtgtgtgttgtgatcaagtcctattccttatttttcaacttcttccactgttcctccccctccaacaacactcacccactacatggttcccatacagaagctgctccaggattgaagttttgcccacagacgcctggccacacacgaccaccttgcagctcttccccatgcttagttttcaaccttgaagaacagaagcacgctgggtaaggtgaggaaagaaagcatcaacacagaaggcagttactagcagatgttttctggtggacaaaaacaaaaaccaaaaaaacagaaggcagaacgtccataactgagagttctaaactgaatgtatagttctaaactgaatgtatagttccagggtttcagcaccatcccaatgctagtcagaggaaacggatgtctccatgtctactactggatggtaagctgttattttattcgtctttgttatccccagtacctagccagtatctgtcacagggcaggtgcttggaaatgctgccataaagggagaggagagtcactggccactgggccaggttcccttctgtgcgcaagatgtagaggaccaattagtaaagggagctcagcccagcttcctctctttaaccatgaccccatggagaattaagcaggaacagtgttttgtgtggctgtctgaagccatctgctccctggggggactgagcaaataaaaaggataatctggggcagggcacggtggctcacgcctgtaatctcagcacttcgggaggccgaggtgggcagatcacaaagtcaggagttcgagaccagactggccaacatagtgaaacctcatctctactaaacatacaaaaaattagtcaggcgtggtggcgggtgcctgtaatcccagctacttgagaggctgaggcaggagaatcgcttgaatccaggaggcggagattgcagtgagccaagaatatgccactgcactccagcctgggcggcagagcaagactccgtctcaaaaaaagacaatctgctttcctgtacgactcatctggacaacaatcaattccctctaaactccagtcaagtctatggctaaaatgaacataagacaagagagaaaagaatgaagaaacctacggaaaaaaaggcttcagaaaggacatactttttgctgcccttggactgacagacacaaaagagaaagctcagatacagaaaccctaagaggtcccagacagatatctccccgaaggcaaacttccaaacacaagccccccaaaagctccagacaaagatcccccccagagagcagagatagatcactcccaaagacggtccctaacagaaacctctccaggggaagctcctgacacagaccccctctccatatagcgagccccacaataaaggacaccataagagtgggccagaggtgcctccgccacagattttctcacgggggagcccccagagggaatgagaggcagagaccagccacctaaagcggcccggaggcggaggccgatcctagcgccggacgagcctcgcctcccaggtccgtacctcccggggcccccgcagcaccagccgggccctccgagctcgcggggaccaggggaggggcagcgccgccgcaaaggctccagtcttcctccagagtcggtgtaggctcctccaggccccgcccccgccgcctgcccgctccccagcttccgtcaggcaagacgaattccggcagcggagagagagcgcggaccgcgcagctcccccagaggccggcgggagaatgacggccaggacctggcctgggtgtgcgcgggagcccaaggttctagactccctggacgcgggccgctgggtgttctggtgtctctgaggcccagatgttctctctgtaaaggcgatcagagtacagtaactcttcgtttactcaatcatttattcgtcaaatgttttctgagcatcatctgtctgtgcctggtgcagggccatatactgagagaaagtggacgagttagacatggtggctgcccatcagaactcacggtctagagaagctagatgtctaacaactactgaggtgctgtggagcacagcaaaagggcatttaacgttgagtcagcagacactgaagggcctgggggaaagggtgttctagggtggaggaaacggctacaagtcatggcattttctgaaactatgagaacttgggttcaatattggtggtagaaaggacctaaatattggtactcaaattaaattatttaaaaaaagaaacagataatcaaaggctttgtgtggtaggccaaagagatcaaattgacggcaatggaaagccattgccaatgaagagacatgatcagtccctgaggaaggtcactctggcagaagagggaagactgaacagagatgaaattagagaccgattaggagactattgatgtattccaagtttttttttctgttgttttgttgttgttgttgttgccgtttttgagacagggtcttgctcttttctccatgctggagtacattggtgtgatcatagctcactgcagcctctaactcctgggctcaagtgatcctcctgcctcagcctcccaaatagctgggactacagatgcatgccaccacacccagcctattccaagattttaaaaaatgatgagcgcctgaatcgggatggaaaggtggagatagatttgggaaatatttggtaggagaatcaacaaaacttggcaacaaattggaagccaagagtgagaatggtttaatccatttaacaagatacggaatttaggaaagataataattacatccaacatttgttttttctgttgttgaggtgtgggtagacaatgaaaaagttaaatttaaatatggtaagccttggggatttgtgaaacatacaagagatatccagtagatagttggatatacagctgtggaagctgaagaaaggtctaggttggagatatgaaaagttgagagtcatcaacagatggaagtaaagctgtgggaataaatgagttgccttagatagaacataaagtgggaagatggtgagacaggttggctagcattagactggactatgagccactggcaggcagggcaggtggtctgtaagtcttgtgccctcacaacctagcacagagtaggcgttttggaaagggctgagtgattggctcaacgaatgacccctcctttccaacctagtgagcttgtcctatccctccctactcagtggtcgctgtggtttcagctccctccacactgggataggcagagtatgagcattggcacatgctgttttcctggaacaaacaggtaaatccttttaaaattcctttgccctcttcttattttactcttagctttacattgtaaagctactcctcatactcctccaatttaaccccagaaagctccaatttaattcagctccacaaatagtcgtttgggtgagggaataacaacaaagacagttaaactgtgcccttgtcccctatgaattctcaatccagaccgcattcggcaaggcaagcgtgatgagtagagagtttatataagaggtgggagtactggggacacaagagcaaggacctcaccccgcgagcttccttataaactccagggcagggtctggggcgccatgtgtcagctttcctaggcttaatgctgagatggcactcccag

SEQ ID NO: 1244423 - DNA, 4001 bp, Homo sapiens
agagtctcgctctgtcacccaggctggagtgcagtggagcaatctctgctcactgcaacctccgcgtcctgggttcaagagattctcctgcctcagcctcccgagtagctgggattacaggcacccatcaccacgcctggctaagttttatatttttagtagatacggggtttcgccacattggccaggctggtctcaagctcctgacctcaggtgatccacctgcctcggcctcccaaagtgctgggattacaggcgtgagccactgtgcccagcctagcaagaccttttaagtcactgaacagcagttgcaggacacttacacagcacttggaaattcttttttcttttttttttgagatggagtctcgttctgttactcaggctggagtgcagtggtgagatctcagctcactgcaacctctgcctcctgggttcaagcaattctcctgcttcagcctcccgaggagctgggactacaggcgcctgccaccacgcctggctaatttttgtattttcagtagagactgttttcgccatattggctaagctggtctcgaactcctgacctctagtgatctgcccacctcagcctcccaaagtactgggattacaggcataagccactgcacccggcctgaaattctttatctgcatctcataacaaccgtgggaagtagatactaatattcccactgacagttttcaaaagcagaggctcagaacaactaagtaattagttcaatgtcctattgccaatgattaattcaggttctttacgtccaagataggattagcatatagcattatgcagtgtttcccaaactaccacactacactatatttgtgtaaaaagctcccaaaacgcctgttaaaaaatgtagactttctgcttcatcccagagtttggtttagtaaggctgggatggggtccaggaactgcaattttaaggacctcccctgtccccagggcagctcttcagtaaacacactggcttaaaggttaaaagcaaaggccgggtgcggtggctcacgccagtaatccccagcactttggaggccaaggcgggaggatcacgaggtcaagagatcgagaccatcctggccaacgtggtgaaacccagtccccactaaaaatacaaaaattagctgggtgtggtggcgcgcgcctgtagtcccagctactcgggaggctgaggcaggagaatcgcttgaacctgggaggcagagattgcagtgagcagagatcacgccactacactccagcttgccagcctggcgacaaagtgagactccgtctcaaaaaaaaaaaaaaaaaaggtaaataaataaataaataaaagcatgggtattcggatagttttgggttccaattccaaatctgctacctactacatagcatcgtgcaaaatactgagtccctccgggccacgctgtaaaatggggatattaacgtgtcccagactgggggactgtgacaaagaatcaatgaaatacagcatccggtgcgttcaaagctaggcccctctccgcaggtggacccctttggttggcgtgtaaagcgctatgccactgattccatctctgacataggtgggagctcacgccaggtgggtcaccacagtccgttagcgggggaccatgaaccgcagaccctcggtaatatgattcccccaccgcatccgcccgggggtggagatgcgaggccgccctggccagccacttacctgggccagtagcgcgttgcacacgagctgcagcctgtccggggtgatgtccacgggcacgtcgaacggggaacccagcagctgcccgccctcatcctggaactgcactagcaaccgctgcacatcgcgcgccaccgcctcgtcctgcgcgagcaagtggggcgggagtcagtctggtcgcccgcccagaagggccccacttcgcctctctcaggcctcagggacccgggccctagcgccccgcggcgacgccccccgcccccatccacgcacacccaccggcactgctgccgccatcctgcgtccccacgtggaggagaaagagcccggcagacagagcgccgtctccgtggtcgggcggggtcgccgccggccacatcgccctctgctgttggggaggagaagcgtcccgctgcgcacggcctcagggattagaaatgggcttacctggtgctcctcccgcccctcaacagccttcacatttatttttcgccagggtcttagaggacacagtaaacttttgactcttcacaacagggattcttgccccattttaatttaatttcattttgagacagagtttcactccgtcgcccagactggagggcagtggtgccaccacggctcactgcagtctcgaactttctggcacagcgatcctcccacctcagcctcagagtagcctggactacaggcacatgacaccctgcccggttatttttttctcattttttgtagagacgaggtctcactatgttgcccaggctggtctcaaactcctgaactcaagcagcaagtcccccactccccagcctcagtgtcccaaagtgctgggattacaggtgtgagccaccacgcctagcctagaaattagtatccttttaaaaatggatcaagtcaaggctgggcgtggtggctgacacctgtaatcccagcgctttggaaggcccaggcgagcagatcacttgagtccaggagttcgagaccagcctggccaacatggtgaaaccaggtctctactaaaaatacaaaaaaattaaccagccgtggtggcatgcgcctgtggtcatagctactggagaggctgaggtggtagattctcttgaacctgggaggcagaggttgcagtgagccgagctctcaccactgcactccagcctggatgacagagcaagactctgtctcaataaataaataaataaataaataaataaataaataaataaataaataaaatggatcaactcaataatactcgagtacaaaagcaaatcatttctacaatcatcaatgctgtaaagcaataatagtgataatgacatcaacaagtcaggaattgttctaagtgctttcccacataactcatttaattcttacaacccttttctccccatattactgaggaactgaagcagacagcaatgaacttgagctcttttgcctgaaacgaaggatctcccttgccaactctcctctctctccctccactgctcaggcagtctcaagctctgccaagtcatcctcatgaacacagcttgaatctgctctccccatctccactgcctcactctggtcagagtcaccatcatcacctgcctggaccgctacaacagcctcccgatgagcccccccatttccattcctgcctctttctacccattctccacgatgcagccagggttatcttttcagaccaaaaatctggcctgctgctcttcaccctcaaaccctgcgacggctcccttacatgcaggaaaaaaagaacactccttataatggtcaattcagccttgctatgtccagccacccctctctttaggttaaatcttgctggctttttctgagttcttacaaggcatggctcttcctgcatcagtgattttgcccatgcagttttttctgtctggaactgttatggagtgaattgtgcccttcccctaattcaagcttgtccaacccctgggccacaggctgcatgcagcccaggatggctttgaatgcagcccaacacaaattcgtaagctttcttaaaacattatgagattttctttcgattttttttttcagctcatcagctatcattagtgtattttatgtgtagcccaaggcaattctttttccactgtggcccagagaagccaaaagattggacgcctctgccctaatttatatattgaagccctagctctgaatgtggctgtatttggagatagcatatattattattattgttttttttttttttttttagagacagggtctcactctgttgcc

SEQ ID NO: 1244424 - DNA, 4001 bp, Homo sapiens
cgtcctgggttcaagagattctcctgcctcagcctcccgagtagctgggattacaggcacccatcaccacgcctggctaagttttatatttttagtagatacggggtttcgccacattggccaggctggtctcaagctcctgacctcaggtgatccacctgcctcggcctcccaaagtgctgggattacaggcgtgagccactgtgcccagcctagcaagaccttttaagtcactgaacagcagttgcaggacacttacacagcacttggaaattcttttttcttttttttttgagatggagtctcgttctgttactcaggctggagtgcagtggtgagatctcagctcactgcaacctctgcctcctgggttcaagcaattctcctgcttcagcctcccgaggagctgggactacaggcgcctgccaccacgcctggctaatttttgtattttcagtagagactgttttcgccatattggctaagctggtctcgaactcctgacctctagtgatctgcccacctcagcctcccaaagtactgggattacaggcataagccactgcacccggcctgaaattctttatctgcatctcataacaaccgtgggaagtagatactaatattcccactgacagttttcaaaagcagaggctcagaacaactaagtaattagttcaatgtcctattgccaatgattaattcaggttctttacgtccaagataggattagcatatagcattatgcagtgtttcccaaactaccacactacactatatttgtgtaaaaagctcccaaaacgcctgttaaaaaatgtagactttctgcttcatcccagagtttggtttagtaaggctgggatggggtccaggaactgcaattttaaggacctcccctgtccccagggcagctcttcagtaaacacactggcttaaaggttaaaagcaaaggccgggtgcggtggctcacgccagtaatccccagcactttggaggccaaggcgggaggatcacgaggtcaagagatcgagaccatcctggccaacgtggtgaaacccagtccccactaaaaatacaaaaattagctgggtgtggtggcgcgcgcctgtagtcccagctactcgggaggctgaggcaggagaatcgcttgaacctgggaggcagagattgcagtgagcagagatcacgccactacactccagcttgccagcctggcgacaaagtgagactccgtctcaaaaaaaaaaaaaaaaaaggtaaataaataaataaataaaagcatgggtattcggatagttttgggttccaattccaaatctgctacctactacatagcatcgtgcaaaatactgagtccctccgggccacgctgtaaaatggggatattaacgtgtcccagactgggggactgtgacaaagaatcaatgaaatacagcatccggtgcgttcaaagctaggcccctctccgcaggtggacccctttggttggcgtgtaaagcgctatgccactgattccatctctgacataggtgggagctcacgccaggtgggtcaccacagtccgttagcgggggaccatgaaccgcagaccctcggtaatatgattcccccaccgcatccgcccgggggtggagatgcgaggccgccctggccagccacttacctgggccagtagcgcgttgcacacgagctgcagcctgtccggggtgatgtccacgggcacgtcgaacggggaacccagcagctgcccgccctcatcctggaactgcactagcaaccgctgcacatcgcgcgccaccgcctcgtcctgcgcgagcaagtggggcgggagtcagtctggtcgcccgcccagaagggccccacttcgcctctctcaggcctcagggacccgggccctagcgccccgcggcgacgccccccgcccccatccacgcacacccaccggcactgctgccgccatcctgcgtccccacgtggaggagaaagagcccggcagacagagcgccgtctccgtggtcgggcggggtcgccgccggccacatcgccctctgctgttggggaggagaagcgtcccgctgcgcacggcctcagggattagaaatgggcttacctggtgctcctcccgcccctcaacagccttcacatttatttttcgccagggtcttagaggacacagtaaacttttgactcttcacaacagggattcttgccccattttaatttaatttcattttgagacagagtttcactccgtcgcccagactggagggcagtggtgccaccacggctcactgcagtctcgaactttctggcacagcgatcctcccacctcagcctcagagtagcctggactacaggcacatgacaccctgcccggttatttttttctcattttttgtagagacgaggtctcactatgttgcccaggctggtctcaaactcctgaactcaagcagcaagtcccccactccccagcctcagtgtcccaaagtgctgggattacaggtgtgagccaccacgcctagcctagaaattagtatccttttaaaaatggatcaagtcaaggctgggcgtggtggctgacacctgtaatcccagcgctttggaaggcccaggcgagcagatcacttgagtccaggagttcgagaccagcctggccaacatggtgaaaccaggtctctactaaaaatacaaaaaaattaaccagccgtggtggcatgcgcctgtggtcatagctactggagaggctgaggtggtagattctcttgaacctgggaggcagaggttgcagtgagccgagctctcaccactgcactccagcctggatgacagagcaagactctgtctcaataaataaataaataaataaataaataaataaataaataaataaataaaatggatcaactcaataatactcgagtacaaaagcaaatcatttctacaatcatcaatgctgtaaagcaataatagtgataatgacatcaacaagtcaggaattgttctaagtgctttcccacataactcatttaattcttacaacccttttctccccatattactgaggaactgaagcagacagcaatgaacttgagctcttttgcctgaaacgaaggatctcccttgccaactctcctctctctccctccactgctcaggcagtctcaagctctgccaagtcatcctcatgaacacagcttgaatctgctctccccatctccactgcctcactctggtcagagtcaccatcatcacctgcctggaccgctacaacagcctcccgatgagcccccccatttccattcctgcctctttctacccattctccacgatgcagccagggttatcttttcagaccaaaaatctggcctgctgctcttcaccctcaaaccctgcgacggctcccttacatgcaggaaaaaaagaacactccttataatggtcaattcagccttgctatgtccagccacccctctctttaggttaaatcttgctggctttttctgagttcttacaaggcatggctcttcctgcatcagtgattttgcccatgcagttttttctgtctggaactgttatggagtgaattgtgcccttcccctaattcaagcttgtccaacccctgggccacaggctgcatgcagcccaggatggctttgaatgcagcccaacacaaattcgtaagctttcttaaaacattatgagattttctttcgattttttttttcagctcatcagctatcattagtgtattttatgtgtagcccaaggcaattctttttccactgtggcccagagaagccaaaagattggacgcctctgccctaatttatatattgaagccctagctctgaatgtggctgtatttggagatagcatatattattattattgttttttttttttttttttagagacagggtctcactctgttgcccagactagagtgtagtagtgtgatcatagctcacacagcttcaaactcccaggctcaagtgctc

SEQ ID NO: 1244425 - DNA, 4001 bp, Homo sapiens
ggggattctgagtgcagggggcatggtgttggagtacttgtttggtgagtagggtgcaagcttgccggatgtgttttcaccacctgaggtccggtgcagatgatctctaggtaggagtggggtaaacaatgattgaggagtgttggggatgttggggactgtgatgtgaggggcctgctgagcacacggcccaggcgcgcaggttactggatgtgtggatgttcttaaggcacgtgatctatatccagggatgctggggagcacaggtgtgtgtgggtgacatggtacatagtttcagagatgtactgggggtgtgtgtgatatgaaagtactgggaattgtgattgtggggtgctggagcacaaggtcagtgtacaggttggttgggtgatgatttaattgtggagtagttgggatttgccatctgttttgggacttgagcacatgccgtggaggtgctgggtatgtacagggtacattaggagctcctgggtaccaggcctatgtgtaaggttgctggaaacatggactgtgggaagcgtggtggcagcggatggtctatacgcagacgctgccatgttttggagtggtaagatgggtgtcagaagagccatgcggggtgcaggggggtgtttgtgaggctggtctgctgagatggctggaatccacctattgcaccctgttcacactctggaaggtgttctgattagtcttggagtgctgaggatggagggtggagaactgtccagaaggaatgtgccaggggctatgagcagtcctgtagtgaacaagagttcattaagaacagaaattcaagagccccagggaagacgggtgggctgtgctggccctcagcaaggagcttccctgatccttcaggggcgtacaggggtcaagggagaagagaaggacatcggtaccactgccaaggtgctcagctcaggcaaggggctctggacatgatgtgatagatggaaggcagccctcaccagccagggggagagggagagcctgcgttgtccttggggtgcagatgtagctaacctgggtattctgccaggaacaagcccaggtctggcggcgggaggcggggcaaggttggagtgggtgtctgagcagaggatggatcacctgattccccctccgtggccaggttgagattagctggcagactgtgcctctttggggagacagtgggtgagcctagtccagtgcctgccatccctaccatggccccccatgggcgtaaagaacttatggagaggctgtctgcagagtgtgtgcctgggactgcctggaggcacccttacaatcctcagggggcacgtagaggttgcagggacactccgtccctcactgcccccacaaaggcccagctctgagccctagagcggtgccagtgcctgagggtctgcatgtgcgtttgtgggctgtgtccacggggtgcccggctttgtgcccgcgcccttaccgtcctcggtgggcacgtagaggttgaggtacaggcagtcctcgctctggttctgcacgtaggtggcggccgcctccaagttgtcggtgaaccacacaggcagcatgatggcgggcagcgccccgtgcaggttctgcgggcaggcgggcggcagggtggtggcgttgcgcacgccgggccacgaggcgggcgcctcaggcggctggaagcggcgggcgcccaggggcggcgtggcgtagggcacgcccaagaactgcacgacggggcccaggatctcgttgttgagctcgcgccgcacaccgcgcactcgcccgtaggccgtgttcaccaccgggaagcgctcctcgccgaggctgccgaggcccaggccggggccgcccggggcgccgccgccgggaccccctcccccgcgttgagcccccgccagccccaccagacacagcgccaggagccacatgctgatcgggggaccccccctccctccctgggacccccccccctcggagagagagagaagggggggagagggagggaggcccccctcgccccaggagggaggaggggcggggggaaaggagggaggagggggttggggagggacctgggttagactggacagagaaggggtctgttcctctccatggagggggcacggggtggggaaggggaaggaaatgggagaaggtgaaggcaggcccgacctgcggggggtggagcgagaggggcagggaggcaggatacagacagacggacagacagaaaaatacagaggtggaagagggcaagggaaattggatggggcagacagaaaggaatggggaaacagaagagacaagtggttagtgacctggaattcagaccaagttgcccccttctcccacccacaggccccctgacacctccccactcccacccagcagcccttctcccctcagcagacgcctaggttgggggtggggcccagatgtggttcaagtccaggacccagccagaggagaggcgggtcagctctccagacccagcatgctcccttccagctgatgtatccctcccaggcaggttctcctcagggactcaggagtcccagctcccacctccctgggagggaatgaggtagacaaggaagagaaaacaaaaataccaagtcattaattagctggaagaggcaggtttgtttatatgtgttaattactcctgagctgtaatttcatggcgctgaacccccaccccaggccagactcaggcctttcttgggactgcacaaacctagcaccttatccccacttcaacacaccattcgctaaggatttgtgctgcctgcgacccctctctccccagactctctccatttcctccgtcagaagttggggtaccttgaggctggggttagagtagggaggggacgctggaggggcaaatccagggacagatgcgtgatcctgcagccggttgccgggtgacgggatgctgccccgcaatgttacctcggcaacgggctgcagctttaaccctggaggggggttctggaggaagacgggaaggggctggcttggtttggtggtccattcagggcatgaaggggagggcaaaggcgtgagtcagaatgcaagagttccccccaaccttaacatagaggaagaagtatatatgttgagaggagggggagattgggggcaccaagaacgctaaaagccctgcctgttggccaatcaaagcctagccttagtgaccaggcctctggcttgggagagggggtgctgaggtgggcttgaagagacatcacaggagcctactgactgcccccctccagcaatttcaagcaaccttggaccccaccaccttttcatctttgcaagccattgtgacccatgtcctgggggcaacactgagctttcttctcttcccatcccaacccatccattcacctacccttccccttgccaccccccctacagttgctgctctgatgcctgggtgctcagggcagcaggggccagccaagggagaagatcagaccggaggggcagacacccaggtcatttcggcaagccccccccccgcccccccaccagccgccagagctgtttgctgacgcggggttttcagagccaggcgccagcccgcgggtggctctctgcaggtgtcaatttattccagagatgaggacacaggaatccttaccacacacacccagtcatgccccctgcctttcagcttctctaaggctcctctattcctccatcacctggaggtggctcggggctgattcccccaggatctccttttcctgtgccagactgggctcagctaccatggccttgctgccccctccccctccccacaacaagatctgcctcagtcaccctctcctcttgagggtactctgggcccctggcctcctcccaccagctccgctccctccttccctcccactggaggcccccccatctctctcctctccgtagtgctccctgggagcatcttttgtgggcctcttccagcttgccccagctcttgccttcagtctctc

SEQ ID NO: 1244426 - DNA, 4001 bp, Homo sapiens
gaggaaggcaggaacaggcaggtccctgagcagaatgaccaaggcaccattaccagctatactcttttccaccttgaatcccacacaccttgaagaaaggaccacgctgcagcagaaacttccttggggactagctgagaaaacactggactctactagtttttttaaaaaatggatgagatcacttagcagcctagattatcaaatctgaaatataaataagatggccagttaaaatgcataaacaatgcacccatcaattttagcctcaaaaacaatgacgaaaggagatatttaccgggctagttccaaagagttcattttcctgtggtaatgggcgcttttctcgggagtaacaatttttgaatgcactgaaaatatcaattcatctatccaaagtggaatcattagtccttgggagaaaacccagttcattctagttttgataggaacaaacatattttattataaactactaatctttctaaggttagaccaaatagaccaaaatgttatatttaagaagcccttaggcttttacaaatatcctagcactagcaaaggtagggtcatttgttaaaaaagtattatttcctactacagcaactgaccaacagataacagcaacttaagaggcactaaatgacactaaaacattacactgaatgtgggccactgcatagctagtctactaacctcatttgtggtactcatgtgtgatgctatatttaatgcattcttatcaaaaggctacagctacatacttctcaactgtagctttatggtttaaaataaaccactcaagcaatgatcttaactggttcaactatgaatcctatctttcttctggagatcaagatcacaaaataagtgaaaagacagaaaggacaggaaagtagttatgcaaagtatatcctaatgacaagagtattataaaggaattcagtctggatcaggtgctaacacttaatgccacagggccactgaatcaaacacacgagatgaccaaggtcttcgtaggaattagtattgcatacattcatctactgatcctgtgttcagtggcttgcttaggttctaatagaaaagtttggtagacagcacacttatgtgtgttgctcatgagaaggcgctccaccaaaacttgccatgagcctagacagccaatgcattaggcctctttaccacataagtgagggtggcttcctacagttgggttgagaagcttgctgcaccttggtcaacatggagacaaccattagagatggactcatccaatgacaaccaacagaagaaaccatgagaggttgtgtttttctttggatactcaccagacaacaccaaaggctccatatccaataggtctatccggctcaatatccagctgctgctgtggatgatgcgagtgctgatgatggtgcgccttaactgtagcagctgcggcagcctgtacctgagctggggctgctgcagctggtccaggagcctgccccggtgccggtgatgggaaatatggctgttgttgcccagggtttaacatggctgcagctgcagccgctgctgcggctgccgcagctgccgaagaggtgtgctgctgtacagggtgtacagcggcagccgaccccggatgaagatggtgttgagggtggtggtggtggtgcaggtgaggaggagggaggtgtggaaggtggtggtgatggtggtggtggtgacctgctgctgctgcagatgtaccgccattgtaagccgccatcatttttgcgttggctcttgcgccacaaagagacattcaaaataaatgccctttgattggaaagcaaactgggtcaagctgtcatttggccatttaaaaatgaagaaaaaccactcactccacctcaaaaaacatagagctttatgtcttcatcagtcaatccaaacaagttagaggatcttggtgtttaattttggggtgagcgtgtgtggaagggtgtgggttgccaaaaggaaaaaaaagggaaaaaagaaaagaaaaaggaaaaaaggaccccttccccccaggattcctgccacaagtgggtactaaaactccattcttaatttgggggaggttccaactttgaatgtgggaataaaggccaaacctcccgaccccctgaactccacacacgaaaaggatcaggtaacacaccacccttggaatcttgaaagagggttgactcatctaccccttccattcccacatccttttctaaacacctaccacctcctcaaaaacaggattaaaaaaaattcccaccaccctaaatggagaagatggggggaaattttctgggaaaccagcttccagcttccccccccccgaactctcaggccttcctacatctccccctactcctagtcaggttgacctgattggggagggggggcgggggttccaaactttcctgggcagaataagccagggaaggaggctggagtgaggagaggaggcgacagcaggacagagaggagaaagagagccggggcaaaagtgaagggaaggaggtgcagggaggaatgaaagatgtgggcagcgctcggacgcccagacggagggaaccgccccgggagaaggttagggtcccggggccaaagaacaggagccccgggaggcgggcggggtacggtcggaagcgggctgactcctgcccccgccgccggctgcttctgctgaggagggttgggggggagagcgggtgggtcccccgcgcaacggccccgcagggctcaaggctgctccgtctccccccctcccccccacccggcttccgtccccgcggccgctttctcctcagccgccgcggccgccttctcctcagccgccgcctcctcagccgccggttccgccgcggccggactcacctcccctagcaaagccggatagagcggagccagcgtcggacacgcgcaaccagccgccgaggccccgcccccgccttgcacggaccggctgccctagccaatccacgcccacctgtccgccaccgcctccaatcctgggccaggagcttcagacaggcgcactgttcggccagtggcaacaaggtgtgggtcttccggggaaatcccgcccccgatccgggatgggcagatagaaagaccaatcaaaggcagagtttggcttgaccgacaaggcttaaagccaattaaaaagcaaagatctttgtgacatttttctttcgcctctctcctcttttcttcttcttcttttattatttatttttttttttttggcaggagcaggaagctgcgtggtaatcccgcctgcaaaagctggaagagaggggcggaacgaaagaaccaatcatgagccagagacaaagaacagagtaaccaatccttgggttgaaaatgaagtgggatggaacctgggccaaatagacacttgaaaaaacaaatggaaaaaaaaggttgatgtaagtcccaccctttagatctcctataggacaggattgtggagaatttgctgtcatatcgagacaacctcttcaaggggcggggcttagggaaggggtggggtcttaaagtgggcgggacctagacgaagaaggcggagtccaaatcatcactggtccactgatccgagatgtccaatatcccacttaagatgtaaagtgtggggtaaaaaataggggaagaaaaagggaatgttgagcttcagaaactcaaggtccaaggtcactcaacaagaagacaaaggaaactcaaaagactgacagaaactcagtagactgacagttcgtagtctacggccggtcctctccatagttaatcctgatcttggcaaaaagaggaggaatctctggcattcagaactccactgtcgacaaatgataaagctgttggtgcaaattaaaacaaaaaaagtaaacttgaccacaaaaataataattttcctctatctttctttcttaacagggtcacattctgtcacccaggctagactgcagtggcacagtcctagctcactgcaacctcca

SEQ ID NO: 1244427 - DNA, 4001 bp, Homo sapiens
ttcaggcctacctctcacagcccatcctggctcccctatccttcctctgctgtcccccatgtcaggtccccatgcacagacatgatcctctgggtggggcccaccagctgattcacagctccacccagggctgtcagcctgcctcagcaagcctcacctctccagcggcgtccagatgtgtcaggcagctgtctcaaaacccttctctctgagccctgggtgcaccccgccggcaattcatggatccagggcattagcactgcggtggaggtgggttggctgggagaccccaggtggggttcacttgggctgtaggggaatgagggagagtggcctacaggaaagagacaaagaggttggagacacatcagaggggcaggggcaaggtgccagggaactgagctggtctcctctctcaaccaagagaggtcaggatacaccagtgaacccgctgcagccctctacaacttcctctagaggcttgtctgaagaatgatgttcttatagatactgctaggcaaaaaatcctcatctaggatcaggaaatttgcatatctgtcttggtcctgactatctccctgtgtaaatcactactcctactgagcctcagctgtgctttattgggccaacggcatctgcaacccagggtggctaatagtaataataacagcagcagcagcagcagcaacaacagcaatgggagatcttatttattgagcacttactgtatatcagactctgtgctaaatgtttaacctggatgatctcttttaaccctcacacagcccagggaggcgggctctcactctcccattttgcagacagagaaataggcagagagcagtgaagtgattggcccagggtgatagtgccaggactggtgatagtgcctgactcccaagtccgtgctcataactacaatgccaggcgagtaccgggaatgcacttgaatagaagagggtgtggggctctgaggtgcagcaagggcccccccagcaagcctcctggctccagcatagtctggggcctggatccccctttgagagggcagttccatgtcactgctcagaggaaggcctggcagggagggctcagtggtggggtcccaagagggcagggcaggcatgagggccaggggatgtcccgcgggcagtggggtcctctgtccactcacctgccccttcctgggcttgggcgcacagtgacctcagccccatctgctcccaggtatggagggctaggtcccaggcccgctgctccccatactgagccaccaggtacgaggccacctccatgccactcgtcttctctggctgagcgggtgtctcacccgaagagctcctggagtgcgctttattggcgagcagaagctggaactccttcagctcctccttcttcaggaactccaagtaacaggccaggcggccccaggctccgccagccatctctgtcccggagttaagagggtgtctgggggatgttcccaggtggtgagggtatcaggcaggcagagaacagtgctgtcctttgccttggctcttaccgtctcttattcagcattcggaacccagttttataaatcccagggcacctacagatagacgccgatagagggggagtggtaggaaaagccaggggagggaggagcccagaggggcctgcaagacactggaagaagtcagctgatagggaggtcctgggatggggtccagggccaggcagggagggtgagggtgaggggagatgtggtgacgggagatggggtgtgggcaacgctcactgttctgtgttcctcagattcttccctctcctgggtcctggactcctgagatcaacccttgagctgcaaggctgagaagaggtggggtgggaggagccgcagagcagggaatgggctttcagaacccagagtggagccccgggctgctggctcccaggtttcttcagacctctccaggccctggggcaccagccagcaagaacagcgcctagtcaacaagagcaggaaggaaacgtcacccagaggaaacccacaaggggcgtggccagggggtaggatcaaaccaggcctgggtaggccagactcagagtcacagattcagatgggccacatggcatctataggcggaccaggagcacaggcccagaccagctgacgctgcagcaggtacaggcccatactaaacacggtgtgtgcacctccacatgggcactccgccagcccatcatctagagcctgtctgcagagccaggatgcagactctccgagcagttgtgtctgcagcccaggcccagcctctcaggatgggtggggccccctgtgtctgcccgggcagctccttattgggaaacattagaactgggccagggagcatttttcccagcctctcatggttttgggagcttcttgagttgcactgcatgtcctgccatgctaccaggggcactaaagcatgtgtcccaggcccagggggctgtttgccttctgggcagcccagcacttagctggtgaacatttccacctgaaagcagaacagccccttcctcattcctgcaagcaggcctcggggagccaggggcagacttcctctttcgtggaatctgcaagatgccaatgacttcaggttgaggaatgacattgcctactcatttgctgatgtaacacaccaccaggaatttctggagatgctttggtttcacttggactggcagagcccaggcttcaacccacggcttgcttggacaaggactccttatgtgcctgatttatttctttgagcctcagtttgcccatctattaaatgggacatcataggtttaccaagaggcttcaattcagcaaaaggtcttagagtctctctctctttcccaggctggagtgcagtggcaagatctcggctcactgcaagctccctccacctcctgggttccagcgattctcctgcatcagcccagcttcctgggcagttgggattacagtcactcaccaccacgcctggctaattgttttgtatttttagtagagatggggtttcaccatgttagccagtctgatccgaggtgatccgcccacttcggcctcccgaaatgttgggattacaggtgtgagcctccgtgcctggcctaaataaattttataaatgttagttttaaaaaatggctaataagcacattgtaggacattctaatatcagattgaccagaagtggaaaagtgctgtgctaaaagtgggatgatcgggaggctctgagcactccgtgaaggaccgtgagactccatgtagcgggaggaatggcctggaggagggctgtgtgggctttttttcctcctcacaccagccagttctggcaccaactctctagacaccaactggtgtcctacagtgcaattctgacactgactgcctggagttggcatcaaacctcacaggtttagggtttcagtgaagagctggcctcatatcagatgccagttgcaaatggggtgcccagaccactggcatctctgtctgacttggtgacaaattcaagggttcccacagtccccggcaggttcaataatttgctgaaatgactcacaggactgagaaaagcactttatttattattatcggttcatgatggaggatacgactcaggaatagcccaacggaagagatgccgaggtcaaggtgtgggtgggggaggggcacagcgcttccttgccctcccgggcaccctactctccctgcccctccctgcttcactaacctggaagctctccaaaccccaaacaaacaagactgtggggttttctcggaggtttcacttcacaggcataattcattaaatcactggccgctggagatccactcaacctgttaaatagatcagaaacctgacccttcccaccacgcccactggggctgctggtccagccttcagtcgtctcttactgggatcactgtgctagccttccacatgttctccacccatgctgatgcttcccctttactgtctact

SEQ ID NO: 1244428 - DNA, 4001 bp, Homo sapiens
taaatctgtcaggtcagctccaggtctccctctggtaaaaacccaattcctccccagtcccctgatctatgaactaatatgtcaatgtgggaaaggatccaaaagcaaggactataatttctatcccatttgatttattttattttcatttgttttggtttttgtggggtttttttagagatggggtttcgctatgttgcccacgctggtctcgaactcttgtcctcaagtgatctgcccacctcagcctaccaaagtgctgggattatggccatgagccaccacacccagccccatttgatttttttttttttttttggtatggagtcttgctctttcgcccaggatggagtgcagtggtgcgaccttggctcactgcaacctccacttcccaggcaagcaattctcctacctcaacctcctaaatagctgggactacaggtgcgtgccaccacacccagctaatttctgtatttttttttactagagatggggtttcaccatgttggccaggctggtctccaactcctgacctcaagtaatctgcccacctcagcctcccaaagtgctgggattaaaggcgtgagccccatgagcctggccaccatttgatttaataagcttcttttaaacatctactgtgtaccaaacactgcggtggaactaggatacaggatgttaaaaacaaggcactatctttctcaataatcaagcttgggagaaactacactgatgaaaagttttactaatgtgaaagtgatgtccggtacaaagcagtaagaaataatagtttgacttaatgccacagccatagcattaggggttttagagaatatatctttacaacccccttcattttacaaatgaggaaacaggaccacagcaccagaatgaaggccaaaacccagcattcccaacccattaatccattcttgtaatgttatgctacactttacaatgcaaagaatattttgactagccaataaacggtggggtgtgggagaactacagacattaggaatatctgatacgggacatcatactgaaaggaagcctagagagtaactattccgtccagatccctcattttacagaagactgcgctcatgacctaccctgtatcacagcttgagataggaggcccctcgccttgaaagacgatccctaaagtagacagtagcaccatctcttggccccatcttcctgtcctttagttaacctcttcttacagcatcttagcactgtagtccaattttctgtttgtgtgtctgcctcccctgcacaccaggctgacttagtcctgtgtagagactctatggtacctagccacagggcctagcagtcaataggagcaaagaaaatcatttatcaccattctgcaacttccaaaaaaaaaaaaagagagagagacaaagcccaaagactgcggagaatcgcacgatggggtgcggggcaagcataaattgtccaggagaaaacaggactaaagcgccagaaatacaccctaaaaatgtccctccacatcggtcccggtgacacaacagtaagcactcagtgcttgctgaatgaatgacacacacacccgtcatttattcagcaagcacttacagagcgccaactccgtgcccggcactgctctcgacagacacaaataaggcacagccctgtcgtcgcggcctgacgagaaaggcggccaccgacaaaggcgagtccacgtggcgtgggacgtgcgccgaccggtctgcacttgtccacaggcgctccctgcccctcctcccatccgatcctcctcgccgcctcttagagctgaactcatctcttcactaactcctcacctaacccactcccgcgactacactcctttctttttcctctcaggatcccgaacacctcttacccttccagctgcttaggtttgaactccggctgcagccgccagcacccgaaacgcgcccgggacccacgtggttcgcagcacttgcacgcacggaacgcttctgcgcagatccgctgccggagagcccattttgcagaacaccgctcgcccacgcttcctcttgggagtaggcagtcattctagggaacaactttctgcagtttaacttccggcgctagctttttcagacctttccggttagctgcttgctttcttctctccacccccgggttctctgactcacttccttcgttcgcgagcaaattggcttcccgagaggtggcgctcacacgttgcgtgaagtccaaagagtgcctgacctagaagtagacttttcgctcccgctttgtgtttattcaccttttctagcctgtcaagcaaaaaattttgagtacctactacgtggacgcattattctaggccctagggataaaacagtatgctctcttggagcttctgggagggatgggagtataggaaaacaagaagcaaataagcaaattaatatgtaatagatcgcattttgtaagtgctgtgaagaaaaggccagagaaatctctgagtaagtgataatagaatagacctgcatgaagtgagggagccagcccagtgattcttcgagagccaagtattacggtggacatcgagtggtggaaaatgccgttagaatagagccaaatcttatgttgtgagatgctaatacagattttgcacaaggcatgacatcatcactaacaaaaaaacattcccactgctctaaggggaaatgaacgggggaaaggtacaaaaatggaatcaggagccgtttcaacaaatgatgctggagcaattggacgaatatagacccaaagaacctcaacctaaacctctcaccttatacaaaatttactcaaaatgaatcatagatttaaatgtaaaacaataaatcacttatggggaaaaaaaaagttaaaaaaaatcctcaggacctagggccaggcaaatagtttttagacgacaccaaaagaccaatctatacagggaaaaagttgataaattggaacttactgaaatttaaaacttttggccgagcgcggtggctcacgcctgtaatcccagcacgctggaaagcagcggcgggaggatcacttgagctcaggaattcgagaccagcccgggcaacatagtgaaaccccgtctctactaaacatacaaaaatgagccgggcgtggttgcaggcgcctgtagtcccagctactcgggaggctgaggcaggagaatcgcttgaacccgggaggcagaggttgcagtgagccgagattgcgccagggcactccagcctgggtgacagagcgagactcggtctcaaaaaaataaaaaataaataaaataaataagtaaaatttcattattctcctgttttcttttttttctttttgagaccgagtatcgctttggcgcccaggccggagcgcagttgcacgatgtcggttcattgcaaactccgccatccgggttcaagcgattctcgtgactcagcttcccgcgtagctgggactacaggcgtctgccaccacgcccggtattttctttttctttttttttttttttttttgagacggagccttgccaggtcgcccagggtggagtgcagtggtgcgatctcggctcactgcaacctccgcctcccgggttcaagcgaatctcctgccccagcctcccgagcagctgggattacaggtgcccaccaccacacccggctactttttgtatttttaggagagacggggtttcaccatgttggccaggttggtctcaaactcttgacctcgtgatccgcccgcctcagcctcccaaagtgctgagattacaggcatgagccaccgcgcctggccctaatttttgtatttttagtagagacgggttttcactatgctggccaggctggtatcgaactcctgacctcaagtgttccatctgcctcggcctaccaaagtgcagggattacaggcatgagccaccgtgctcggcctttatttatttatttgtttatttatttattgagatgcagtcttgctctgtcacc

SEQ ID NO: 1244429 - DNA, 4001 bp, Homo sapiens
gtctccctctggtaaaaacccaattcctccccagtcccctgatctatgaactaatatgtcaatgtgggaaaggatccaaaagcaaggactataatttctatcccatttgatttattttattttcatttgttttggtttttgtggggtttttttagagatggggtttcgctatgttgcccacgctggtctcgaactcttgtcctcaagtgatctgcccacctcagcctaccaaagtgctgggattatggccatgagccaccacacccagccccatttgatttttttttttttttttggtatggagtcttgctctttcgcccaggatggagtgcagtggtgcgaccttggctcactgcaacctccacttcccaggcaagcaattctcctacctcaacctcctaaatagctgggactacaggtgcgtgccaccacacccagctaatttctgtatttttttttactagagatggggtttcaccatgttggccaggctggtctccaactcctgacctcaagtaatctgcccacctcagcctcccaaagtgctgggattaaaggcgtgagccccatgagcctggccaccatttgatttaataagcttcttttaaacatctactgtgtaccaaacactgcggtggaactaggatacaggatgttaaaaacaaggcactatctttctcaataatcaagcttgggagaaactacactgatgaaaagttttactaatgtgaaagtgatgtccggtacaaagcagtaagaaataatagtttgacttaatgccacagccatagcattaggggttttagagaatatatctttacaacccccttcattttacaaatgaggaaacaggaccacagcaccagaatgaaggccaaaacccagcattcccaacccattaatccattcttgtaatgttatgctacactttacaatgcaaagaatattttgactagccaataaacggtggggtgtgggagaactacagacattaggaatatctgatacgggacatcatactgaaaggaagcctagagagtaactattccgtccagatccctcattttacagaagactgcgctcatgacctaccctgtatcacagcttgagataggaggcccctcgccttgaaagacgatccctaaagtagacagtagcaccatctcttggccccatcttcctgtcctttagttaacctcttcttacagcatcttagcactgtagtccaattttctgtttgtgtgtctgcctcccctgcacaccaggctgacttagtcctgtgtagagactctatggtacctagccacagggcctagcagtcaataggagcaaagaaaatcatttatcaccattctgcaacttccaaaaaaaaaaaaagagagagagacaaagcccaaagactgcggagaatcgcacgatggggtgcggggcaagcataaattgtccaggagaaaacaggactaaagcgccagaaatacaccctaaaaatgtccctccacatcggtcccggtgacacaacagtaagcactcagtgcttgctgaatgaatgacacacacacccgtcatttattcagcaagcacttacagagcgccaactccgtgcccggcactgctctcgacagacacaaataaggcacagccctgtcgtcgcggcctgacgagaaaggcggccaccgacaaaggcgagtccacgtggcgtgggacgtgcgccgaccggtctgcacttgtccacaggcgctccctgcccctcctcccatccgatcctcctcgccgcctcttagagctgaactcatctcttcactaactcctcacctaacccactcccgcgactacactcctttctttttcctctcaggatcccgaacacctcttacccttccagctgcttaggtttgaactccggctgcagccgccagcacccgaaacgcgcccgggacccacgtggttcgcagcacttgcacgcacggaacgcttctgcgcagatccgctgccggagagcccattttgcagaacaccgctcgcccacgcttcctcttgggagtaggcagtcattctagggaacaactttctgcagtttaacttccggcgctagctttttcagacctttccggttagctgcttgctttcttctctccacccccgggttctctgactcacttccttcgttcgcgagcaaattggcttcccgagaggtggcgctcacacgttgcgtgaagtccaaagagtgcctgacctagaagtagacttttcgctcccgctttgtgtttattcaccttttctagcctgtcaagcaaaaaattttgagtacctactacgtggacgcattattctaggccctagggataaaacagtatgctctcttggagcttctgggagggatgggagtataggaaaacaagaagcaaataagcaaattaatatgtaatagatcgcattttgtaagtgctgtgaagaaaaggccagagaaatctctgagtaagtgataatagaatagacctgcatgaagtgagggagccagcccagtgattcttcgagagccaagtattacggtggacatcgagtggtggaaaatgccgttagaatagagccaaatcttatgttgtgagatgctaatacagattttgcacaaggcatgacatcatcactaacaaaaaaacattcccactgctctaaggggaaatgaacgggggaaaggtacaaaaatggaatcaggagccgtttcaacaaatgatgctggagcaattggacgaatatagacccaaagaacctcaacctaaacctctcaccttatacaaaatttactcaaaatgaatcatagatttaaatgtaaaacaataaatcacttatggggaaaaaaaaagttaaaaaaaatcctcaggacctagggccaggcaaatagtttttagacgacaccaaaagaccaatctatacagggaaaaagttgataaattggaacttactgaaatttaaaacttttggccgagcgcggtggctcacgcctgtaatcccagcacgctggaaagcagcggcgggaggatcacttgagctcaggaattcgagaccagcccgggcaacatagtgaaaccccgtctctactaaacatacaaaaatgagccgggcgtggttgcaggcgcctgtagtcccagctactcgggaggctgaggcaggagaatcgcttgaacccgggaggcagaggttgcagtgagccgagattgcgccagggcactccagcctgggtgacagagcgagactcggtctcaaaaaaataaaaaataaataaaataaataagtaaaatttcattattctcctgttttcttttttttctttttgagaccgagtatcgctttggcgcccaggccggagcgcagttgcacgatgtcggttcattgcaaactccgccatccgggttcaagcgattctcgtgactcagcttcccgcgtagctgggactacaggcgtctgccaccacgcccggtattttctttttctttttttttttttttttttgagacggagccttgccaggtcgcccagggtggagtgcagtggtgcgatctcggctcactgcaacctccgcctcccgggttcaagcgaatctcctgccccagcctcccgagcagctgggattacaggtgcccaccaccacacccggctactttttgtatttttaggagagacggggtttcaccatgttggccaggttggtctcaaactcttgacctcgtgatccgcccgcctcagcctcccaaagtgctgagattacaggcatgagccaccgcgcctggccctaatttttgtatttttagtagagacgggttttcactatgctggccaggctggtatcgaactcctgacctcaagtgttccatctgcctcggcctaccaaagtgcagggattacaggcatgagccaccgtgctcggcctttatttatttatttgtttatttatttattgagatgcagtcttgctctgtcacccaggctggagtgccttggcggat

SEQ ID NO: 1244430 - DNA, 4001 bp, Homo sapiens
taagtgtagggattcagatctgtgccccaaatttaatgtggaaaatacactcactaccctatgctaaaggaggagcaccgcactggaactcggagtttcagactaaagcaaaggagattccaagcctccattctgtgcctaggtggacccgagtgggcaggcgcagggggtctggggcccggggtttttccgctccctgctgcccccctgcggcgggtgggcaggtagcggcccgcgggaaggaacccaaacccggagggcgagtcacgctaccagcgcttcaccttcccaagggcgtctgtccccaccaccccgggaaagggtcggcgggcccaagccgccgtgggcgggggcagagggcaaagggatttcgcggcagcgaaatgaactcggaaagcagacgcggacaaaccgccgccgggagggaaaaacacccgcgagccggctgcagcggggaaggggagacgggggcgagttacccggaggaacttcatggccacgaggcggaatcccttctgctcgaagcgcttgatgatctcgcccaccaggccgcgctgcacgccgtccggcttgatggcgatgaaggtgcgctccaggttggccatggtcctgcggggcgagaggtgcggtcagggcccgggcgcaggctctggcggggcccgcggaggccacgtgggcgccgccggtccctcctcccccaccacgcgcggccgcggggacacgtggcttcccggccgcttccgccccgcgcagggccggcgtccctctgcggagcccgaaggcccgcggggcgcaagctgcaagggaatctcccgctccgacgccgcgcgggacctgcgggaaatcggggggcgcccacagaccgggcccacctgcggcagcgcaagcggaagagggaacgggaggagtcgccaggggatgcgcccccaccgccttaccgggaagctggaggggccgggcggcggcgctgcgctgggagagcagagagctggtgcgaccaccacacccgggagccggcggcggaggaggggcgcagggcggagcgcggggtggccacaccccggagggcccagccgcccaacccgcaggaacgccccacccgcccggcccgacgcggccggagaacagtgtccacgcccagccggggcgcgccctcgccaggcagagatcgagacggatccagagacaggaagtgattccttctccacctggacgtcctatgagttcaactacgcacgtcccaaatcccactcctcacctctcagtacttcccgtgaccccaaaagctcctacacacacacacacacacacacacacacagaacctgctcctgtgctcgagttctctaccccggtcaaggccatctgctgctttcaccatccgcccgagcaccggcattaaccttgacttggctctccctccccgtcgtgcacccacggtccttatcctccctacctctgaaatccagccttccctcccctctgcttgagccctggttaagcctcggcctcccaaggggcctcgatctcacctctccgcgcaaaccgggagctttgctcagcacctcaaacggccatctggtcctgcctctgccctgccttgatgactcccccgcctacaggatggcgttcagactccttagcgggatgctcttctcgcaggatgccctgctccctggctgccgcctccccacctacatttccagccccaatcagccgccccactcccaccctgacatggggatccctgcccacctggcactaaagtgcggtcgagttttccagttcaccctgaggtgcgcccctggaccctgaggaaagtctagaccctgtcatagagattaggcctgtcatcgacctgtagacacttcctacttgcagtgtccctggcaaacaagctccctttggtgatgcccagcttccctggggcggtcacaagcccctcctctcggcgcctgcagcactgactgacagccgcacagcagtggtactgccctgagatggtgagagcccgcttgcttcccctcaggactctgagctgaccacagcaatcatgccatcacccgagtgcccctagcactgcgctgatcacctgtcactggccagatggatgacaatctggcctctgttataccttatcggctttccaaacttctagttacagagcattagcccaccacacattgacaatgactgtcatgtgccctcatctgggggcactgttattttttggcttcgatctgaaacacactctcatttggattaccaaatgtcaactgtgaaaacaggtctcgaaattgcacggacttttctctgtccaggggagagctatctgctccccttggtcaggtcactgatggctactcagggtacagtcaggaccacccctctgctttcacctcttctttccttcctgggaagactgtccttaactggggaggctgtaaccctccagcttcactacacacatgttcattcccccaagtcctggtatgctcatctcacgccccaaaacaaacaggccacgctttgtgtaaaagtattaatagaaattcaggctggatgcggtagctcacgcctgtaatcccagcactttgagaggccgaggcgggtggatcacgaggtcaggagttcgagacaagcctgaccaacgtggtgaaaccccgtccccaagaaaaatacaaaaattagccgggcgtagtggcgcatgcctgtaatcccagctactcaggaggctgaggcaggagaatcgcttgaaccccggaagcagaggttgcagtgagctgagatcgtgccactgcactccagcctgggcaacagattgagattccatctcaaaaattaaaaaaaaaaaaaaagggggccaggtgcggtggctcacacctgtaatcccagcactttgggaggccaaggcaggcagatcacgaggtcaggagatcgagaccatcctggctaacacagtgaaacccaatgtctactaaaaatacaaaaaaattagctgggcatggtggcgggcacctgtagtcccagctactcaggaggctgaggcaggagaatggcgtgaacccgggaggcagagcttgcagtgagccgagattgcaccactgcattcccgcctgggtgacagagcaagactctgtctcaaaaaaaaaaaaaaaaaaaaaaactaaattaaaaaaaaaaattcatctcgccatcatctgtctgtaaaggcagcccaccccaactaccctcttctcccccatcctgagaagtctcttcccctctattgcctctaccgaagccagatgaaaaggaaagataagaaaaaccctcaggtggccagtcgcagtggctcacacctgtaatcccagcactttgggagcctgaggcaggtggatcatctgaggtgagaagttcgagaccagcctggccaacatggtgaaaacctgtctctactaaaaatacaaaaaatagccgggagtggtggcacacacctgtaatcccagctactcaggaggctgagacaggagaatcgcttgaacccgggaggcggaggttgcagttagccgagatcgcaccattatactccagcctgggcgacaagagcgagactttgtctcaaaaaaaaaaggaaaaagaaaaaagaaaaaccctcagggtgggcgcagtggctcacgcctataatctcagcactttgggaggcccaggcaggcagatcgcttgagcccagcagttggagaccagcctgggaaacatgatgaaaccccatctctacagaaaatacaaaaattagttgggcgtggtggcacgtgcctgtagccccagttactcaggaggctaagataggagatcacttgggcccagagaggtcgaggctgcagtgagctgctgtcatcacaccactgcactccatcctaggcgacagagcaagaccctatctcaaaagcaaaaaaaaaaattctaatttctctttcagctagatgcagccatatgactaagttctagccagtgggatgtgag

SEQ ID NO: 1244431 - DNA, 4001 bp, Homo sapiens
accatagagacatgtacctgaaaaagtccttcccatatcttttttctttgtcgagacagagtctcgctctgttgcccaggctggagtgcagtggcacgatctcggctcactgcaacctccgcctcccaggttcaagcaattctcctacctcagcctcccaagtagctgagattacagccgtgcaccaccacacccagctaacatccttcccatttctaaggtctgatttgctttctcctcccaagctcctagttgctcagttaagtaacttcagcaggttccattcataaaataaaatttagattagctgagggagatgtctaacaaagaacactgagcactttttcctcattttctctcattccccacgagcactcaccatggccacaaccggccctgagttcatgtacttcaccagcccagggaagaatggtcggtctttcaggtcaatgtagtgctgcttcaggtgttcttcagaggcctggcattggagaggaggcaccagttaggagctaagctggaaagactccaacccatcctctgaacctcccattagcaagtccggttttatattctagcccacgttcctaagtggtgtgtggaaatatatatatatatacacacatatacacacacataaatattttttaaatcccatccaaaccatgaaactaatgccattttaacagaaagactgttctttttttggtgtgttgttttggtttgttttaggagacagggtctcactatcatcacccaggctggaatgcagtggcacaatgatggctcactgcagcctcaacttccagggctcaagtgattttcctacctcagcctcccaagtagctggaactacagatgcactcaaccatgcccaattaatttttatttatttatttatttatttgtagagacaggggcttgctatgtggctcaggctgatctccaactcctgggctccacccacctcggcctcccaaattgctgggattataggcgtgagccccgcgcctggccaagactgttctaatcgtaaagacaccctcataccgtcaatgacattaggggttttgtaagcctaaaaagtaggtggtttgaggatctagatttagggaattaaattttggctgcaactgaagtacatatgtcaggtcatctgcctggcagaggtcatgttaaactcccctgggctactcacaatgcccttttaaatatttcagataataactgagaacattctcttcaccgatgagcctggttgaatttcagtacttagattcttacccgtaagtgtagggattcagatctgtgccccaaatttaatgtggaaaatacactcactaccctatgctaaaggaggagcaccgcactggaactcggagtttcagactaaagcaaaggagattccaagcctccattctgtgcctaggtggacccgagtgggcaggcgcagggggtctggggcccggggtttttccgctccctgctgcccccctgcggcgggtgggcaggtagcggcccgcgggaaggaacccaaacccggagggcgagtcacgctaccagcgcttcaccttcccaagggcgtctgtccccaccaccccgggaaagggtcggcgggcccaagccgccgtgggcgggggcagagggcaaagggatttcgcggcagcgaaatgaactcggaaagcagacgcggacaaaccgccgccgggagggaaaaacacccgcgagccggctgcagcggggaaggggagacgggggcgagttacccggaggaacttcatggccacgaggcggaatcccttctgctcgaagcgcttgatgatctcgcccaccaggccgcgctgcacgccgtccggcttgatggcgatgaaggtgcgctccaggttggccatggtcctgcggggcgagaggtgcggtcagggcccgggcgcaggctctggcggggcccgcggaggccacgtgggcgccgccggtccctcctcccccaccacgcgcggccgcggggacacgtggcttcccggccgcttccgccccgcgcagggccggcgtccctctgcggagcccgaaggcccgcggggcgcaagctgcaagggaatctcccgctccgacgccgcgcgggacctgcgggaaatcggggggcgcccacagaccgggcccacctgcggcagcgcaagcggaagagggaacgggaggagtcgccaggggatgcgcccccaccgccttaccgggaagctggaggggccgggcggcggcgctgcgctgggagagcagagagctggtgcgaccaccacacccgggagccggcggcggaggaggggcgcagggcggagcgcggggtggccacaccccggagggcccagccgcccaacccgcaggaacgccccacccgcccggcccgacgcggccggagaacagtgtccacgcccagccggggcgcgccctcgccaggcagagatcgagacggatccagagacaggaagtgattccttctccacctggacgtcctatgagttcaactacgcacgtcccaaatcccactcctcacctctcagtacttcccgtgaccccaaaagctcctacacacacacacacacacacacacacacagaacctgctcctgtgctcgagttctctaccccggtcaaggccatctgctgctttcaccatccgcccgagcaccggcattaaccttgacttggctctccctccccgtcgtgcacccacggtccttatcctccctacctctgaaatccagccttccctcccctctgcttgagccctggttaagcctcggcctcccaaggggcctcgatctcacctctccgcgcaaaccgggagctttgctcagcacctcaaacggccatctggtcctgcctctgccctgccttgatgactcccccgcctacaggatggcgttcagactccttagcgggatgctcttctcgcaggatgccctgctccctggctgccgcctccccacctacatttccagccccaatcagccgccccactcccaccctgacatggggatccctgcccacctggcactaaagtgcggtcgagttttccagttcaccctgaggtgcgcccctggaccctgaggaaagtctagaccctgtcatagagattaggcctgtcatcgacctgtagacacttcctacttgcagtgtccctggcaaacaagctccctttggtgatgcccagcttccctggggcggtcacaagcccctcctctcggcgcctgcagcactgactgacagccgcacagcagtggtactgccctgagatggtgagagcccgcttgcttcccctcaggactctgagctgaccacagcaatcatgccatcacccgagtgcccctagcactgcgctgatcacctgtcactggccagatggatgacaatctggcctctgttataccttatcggctttccaaacttctagttacagagcattagcccaccacacattgacaatgactgtcatgtgccctcatctgggggcactgttattttttggcttcgatctgaaacacactctcatttggattaccaaatgtcaactgtgaaaacaggtctcgaaattgcacggacttttctctgtccaggggagagctatctgctccccttggtcaggtcactgatggctactcagggtacagtcaggaccacccctctgctttcacctcttctttccttcctgggaagactgtccttaactggggaggctgtaaccctccagcttcactacacacatgttcattcccccaagtcctggtatgctcatctcacgccccaaaacaaacaggccacgctttgtgtaaaagtattaatagaaattcaggctggatgcggtagctcacgcctgtaatcccagcactttgagaggccgaggcgggtggatcacgaggtcaggagttcgagacaagcctgaccaacgtggtgaaaccccgtccccaagaaaaatacaaaaattagccgggcgtagtggcgcatgcctgt

SEQ ID NO: 1244432 - DNA, 4001 bp, Homo sapiens
tctgatttgctttctcctcccaagctcctagttgctcagttaagtaacttcagcaggttccattcataaaataaaatttagattagctgagggagatgtctaacaaagaacactgagcactttttcctcattttctctcattccccacgagcactcaccatggccacaaccggccctgagttcatgtacttcaccagcccagggaagaatggtcggtctttcaggtcaatgtagtgctgcttcaggtgttcttcagaggcctggcattggagaggaggcaccagttaggagctaagctggaaagactccaacccatcctctgaacctcccattagcaagtccggttttatattctagcccacgttcctaagtggtgtgtggaaatatatatatatatacacacatatacacacacataaatattttttaaatcccatccaaaccatgaaactaatgccattttaacagaaagactgttctttttttggtgtgttgttttggtttgttttaggagacagggtctcactatcatcacccaggctggaatgcagtggcacaatgatggctcactgcagcctcaacttccagggctcaagtgattttcctacctcagcctcccaagtagctggaactacagatgcactcaaccatgcccaattaatttttatttatttatttatttatttgtagagacaggggcttgctatgtggctcaggctgatctccaactcctgggctccacccacctcggcctcccaaattgctgggattataggcgtgagccccgcgcctggccaagactgttctaatcgtaaagacaccctcataccgtcaatgacattaggggttttgtaagcctaaaaagtaggtggtttgaggatctagatttagggaattaaattttggctgcaactgaagtacatatgtcaggtcatctgcctggcagaggtcatgttaaactcccctgggctactcacaatgcccttttaaatatttcagataataactgagaacattctcttcaccgatgagcctggttgaatttcagtacttagattcttacccgtaagtgtagggattcagatctgtgccccaaatttaatgtggaaaatacactcactaccctatgctaaaggaggagcaccgcactggaactcggagtttcagactaaagcaaaggagattccaagcctccattctgtgcctaggtggacccgagtgggcaggcgcagggggtctggggcccggggtttttccgctccctgctgcccccctgcggcgggtgggcaggtagcggcccgcgggaaggaacccaaacccggagggcgagtcacgctaccagcgcttcaccttcccaagggcgtctgtccccaccaccccgggaaagggtcggcgggcccaagccgccgtgggcgggggcagagggcaaagggatttcgcggcagcgaaatgaactcggaaagcagacgcggacaaaccgccgccgggagggaaaaacacccgcgagccggctgcagcggggaaggggagacgggggcgagttacccggaggaacttcatggccacgaggcggaatcccttctgctcgaagcgcttgatgatctcgcccaccaggccgcgctgcacgccgtccggcttgatggcgatgaaggtgcgctccaggttggccatggtcctgcggggcgagaggtgcggtcagggcccgggcgcaggctctggcggggcccgcggaggccacgtgggcgccgccggtccctcctcccccaccacgcgcggccgcggggacacgtggcttcccggccgcttccgccccgcgcagggccggcgtccctctgcggagcccgaaggcccgcggggcgcaagctgcaagggaatctcccgctccgacgccgcgcgggacctgcgggaaatcggggggcgcccacagaccgggcccacctgcggcagcgcaagcggaagagggaacgggaggagtcgccaggggatgcgcccccaccgccttaccgggaagctggaggggccgggcggcggcgctgcgctgggagagcagagagctggtgcgaccaccacacccgggagccggcggcggaggaggggcgcagggcggagcgcggggtggccacaccccggagggcccagccgcccaacccgcaggaacgccccacccgcccggcccgacgcggccggagaacagtgtccacgcccagccggggcgcgccctcgccaggcagagatcgagacggatccagagacaggaagtgattccttctccacctggacgtcctatgagttcaactacgcacgtcccaaatcccactcctcacctctcagtacttcccgtgaccccaaaagctcctacacacacacacacacacacacacacacagaacctgctcctgtgctcgagttctctaccccggtcaaggccatctgctgctttcaccatccgcccgagcaccggcattaaccttgacttggctctccctccccgtcgtgcacccacggtccttatcctccctacctctgaaatccagccttccctcccctctgcttgagccctggttaagcctcggcctcccaaggggcctcgatctcacctctccgcgcaaaccgggagctttgctcagcacctcaaacggccatctggtcctgcctctgccctgccttgatgactcccccgcctacaggatggcgttcagactccttagcgggatgctcttctcgcaggatgccctgctccctggctgccgcctccccacctacatttccagccccaatcagccgccccactcccaccctgacatggggatccctgcccacctggcactaaagtgcggtcgagttttccagttcaccctgaggtgcgcccctggaccctgaggaaagtctagaccctgtcatagagattaggcctgtcatcgacctgtagacacttcctacttgcagtgtccctggcaaacaagctccctttggtgatgcccagcttccctggggcggtcacaagcccctcctctcggcgcctgcagcactgactgacagccgcacagcagtggtactgccctgagatggtgagagcccgcttgcttcccctcaggactctgagctgaccacagcaatcatgccatcacccgagtgcccctagcactgcgctgatcacctgtcactggccagatggatgacaatctggcctctgttataccttatcggctttccaaacttctagttacagagcattagcccaccacacattgacaatgactgtcatgtgccctcatctgggggcactgttattttttggcttcgatctgaaacacactctcatttggattaccaaatgtcaactgtgaaaacaggtctcgaaattgcacggacttttctctgtccaggggagagctatctgctccccttggtcaggtcactgatggctactcagggtacagtcaggaccacccctctgctttcacctcttctttccttcctgggaagactgtccttaactggggaggctgtaaccctccagcttcactacacacatgttcattcccccaagtcctggtatgctcatctcacgccccaaaacaaacaggccacgctttgtgtaaaagtattaatagaaattcaggctggatgcggtagctcacgcctgtaatcccagcactttgagaggccgaggcgggtggatcacgaggtcaggagttcgagacaagcctgaccaacgtggtgaaaccccgtccccaagaaaaatacaaaaattagccgggcgtagtggcgcatgcctgtaatcccagctactcaggaggctgaggcaggagaatcgcttgaaccccggaagcagaggttgcagtgagctgagatcgtgccactgcactccagcctgggcaacagattgagattccatctcaaaaattaaaaaaaaaaaaaaagggggccaggtgcggtggctcacacctgtaatcccagcactttgggaggccaaggcaggcagatcacgaggtcaggag

SEQ ID NO: 1244433 - DNA, 4001 bp, Homo sapiens
tgtagtgctgcttcaggtgttcttcagaggcctggcattggagaggaggcaccagttaggagctaagctggaaagactccaacccatcctctgaacctcccattagcaagtccggttttatattctagcccacgttcctaagtggtgtgtggaaatatatatatatatacacacatatacacacacataaatattttttaaatcccatccaaaccatgaaactaatgccattttaacagaaagactgttctttttttggtgtgttgttttggtttgttttaggagacagggtctcactatcatcacccaggctggaatgcagtggcacaatgatggctcactgcagcctcaacttccagggctcaagtgattttcctacctcagcctcccaagtagctggaactacagatgcactcaaccatgcccaattaatttttatttatttatttatttatttgtagagacaggggcttgctatgtggctcaggctgatctccaactcctgggctccacccacctcggcctcccaaattgctgggattataggcgtgagccccgcgcctggccaagactgttctaatcgtaaagacaccctcataccgtcaatgacattaggggttttgtaagcctaaaaagtaggtggtttgaggatctagatttagggaattaaattttggctgcaactgaagtacatatgtcaggtcatctgcctggcagaggtcatgttaaactcccctgggctactcacaatgcccttttaaatatttcagataataactgagaacattctcttcaccgatgagcctggttgaatttcagtacttagattcttacccgtaagtgtagggattcagatctgtgccccaaatttaatgtggaaaatacactcactaccctatgctaaaggaggagcaccgcactggaactcggagtttcagactaaagcaaaggagattccaagcctccattctgtgcctaggtggacccgagtgggcaggcgcagggggtctggggcccggggtttttccgctccctgctgcccccctgcggcgggtgggcaggtagcggcccgcgggaaggaacccaaacccggagggcgagtcacgctaccagcgcttcaccttcccaagggcgtctgtccccaccaccccgggaaagggtcggcgggcccaagccgccgtgggcgggggcagagggcaaagggatttcgcggcagcgaaatgaactcggaaagcagacgcggacaaaccgccgccgggagggaaaaacacccgcgagccggctgcagcggggaaggggagacgggggcgagttacccggaggaacttcatggccacgaggcggaatcccttctgctcgaagcgcttgatgatctcgcccaccaggccgcgctgcacgccgtccggcttgatggcgatgaaggtgcgctccaggttggccatggtcctgcggggcgagaggtgcggtcagggcccgggcgcaggctctggcggggcccgcggaggccacgtgggcgccgccggtccctcctcccccaccacgcgcggccgcggggacacgtggcttcccggccgcttccgccccgcgcagggccggcgtccctctgcggagcccgaaggcccgcggggcgcaagctgcaagggaatctcccgctccgacgccgcgcgggacctgcgggaaatcggggggcgcccacagaccgggcccacctgcggcagcgcaagcggaagagggaacgggaggagtcgccaggggatgcgcccccaccgccttaccgggaagctggaggggccgggcggcggcgctgcgctgggagagcagagagctggtgcgaccaccacacccgggagccggcggcggaggaggggcgcagggcggagcgcggggtggccacaccccggagggcccagccgcccaacccgcaggaacgccccacccgcccggcccgacgcggccggagaacagtgtccacgcccagccggggcgcgccctcgccaggcagagatcgagacggatccagagacaggaagtgattccttctccacctggacgtcctatgagttcaactacgcacgtcccaaatcccactcctcacctctcagtacttcccgtgaccccaaaagctcctacacacacacacacacacacacacacacagaacctgctcctgtgctcgagttctctaccccggtcaaggccatctgctgctttcaccatccgcccgagcaccggcattaaccttgacttggctctccctccccgtcgtgcacccacggtccttatcctccctacctctgaaatccagccttccctcccctctgcttgagccctggttaagcctcggcctcccaaggggcctcgatctcacctctccgcgcaaaccgggagctttgctcagcacctcaaacggccatctggtcctgcctctgccctgccttgatgactcccccgcctacaggatggcgttcagactccttagcgggatgctcttctcgcaggatgccctgctccctggctgccgcctccccacctacatttccagccccaatcagccgccccactcccaccctgacatggggatccctgcccacctggcactaaagtgcggtcgagttttccagttcaccctgaggtgcgcccctggaccctgaggaaagtctagaccctgtcatagagattaggcctgtcatcgacctgtagacacttcctacttgcagtgtccctggcaaacaagctccctttggtgatgcccagcttccctggggcggtcacaagcccctcctctcggcgcctgcagcactgactgacagccgcacagcagtggtactgccctgagatggtgagagcccgcttgcttcccctcaggactctgagctgaccacagcaatcatgccatcacccgagtgcccctagcactgcgctgatcacctgtcactggccagatggatgacaatctggcctctgttataccttatcggctttccaaacttctagttacagagcattagcccaccacacattgacaatgactgtcatgtgccctcatctgggggcactgttattttttggcttcgatctgaaacacactctcatttggattaccaaatgtcaactgtgaaaacaggtctcgaaattgcacggacttttctctgtccaggggagagctatctgctccccttggtcaggtcactgatggctactcagggtacagtcaggaccacccctctgctttcacctcttctttccttcctgggaagactgtccttaactggggaggctgtaaccctccagcttcactacacacatgttcattcccccaagtcctggtatgctcatctcacgccccaaaacaaacaggccacgctttgtgtaaaagtattaatagaaattcaggctggatgcggtagctcacgcctgtaatcccagcactttgagaggccgaggcgggtggatcacgaggtcaggagttcgagacaagcctgaccaacgtggtgaaaccccgtccccaagaaaaatacaaaaattagccgggcgtagtggcgcatgcctgtaatcccagctactcaggaggctgaggcaggagaatcgcttgaaccccggaagcagaggttgcagtgagctgagatcgtgccactgcactccagcctgggcaacagattgagattccatctcaaaaattaaaaaaaaaaaaaaagggggccaggtgcggtggctcacacctgtaatcccagcactttgggaggccaaggcaggcagatcacgaggtcaggagatcgagaccatcctggctaacacagtgaaacccaatgtctactaaaaatacaaaaaaattagctgggcatggtggcgggcacctgtagtcccagctactcaggaggctgaggcaggagaatggcgtgaacccgggaggcagagcttgcagtgagccgagattgcaccactgcattcccgcctgggtgacagagcaagactctgtctcaaaaaaaaaaaaaaaaaaaaaa

SEQ ID NO: 1244434 - DNA, 4001 bp, Homo sapiens
gatctgttgtgagttacagcaacagaacagtcttataaaaactaaatttggcaagcttcctattcctctactttcttcctgtgattttttttttttttttttttttttgagtcggagtctcgctctgtcgcccaggctggagtgcagtggcgtgatctcagctcactgcaagctctgcctcctgggttcacgccattctcctgccttagcctcccgagtagttgggactacaggcgcccgccaccacgcccggctaaattttttgtatttttagtagagatgggatttcacagtgttagccaggatggtctcgatctcctgacctcgtgatctgcctcccaaagtactgggattacaggcatgagccaccatgcccggcccttcctgtgatttttaatgccggctgaagaacataaaagctagatcttttaacctaagatttaccacaagcagattataaaccacttaaatacagtcatgcttcactgaacgtcaggcatatgtgctgggaaatgcatggttaggtgatttttgccttgccaacattatagggtgtacttacacaaatctagatggtatagcctactaaatgcctaggctatatggtgtacattacagtaacatgctatacaggtttgtagcctaggagcaataggctgctgcatgttactgagtactgcaggcaactataatacaatggtaagtatttgtgtatctaagcatacctaaacatagaaaggatacaataaaaatatgtactataatcttgtgggaccatctcttctacgcagtccttggtctttatacctttatatctgcactgccaccaatactgcgaataacaagctggctacgaaaatcagactacctcagactcagcaagttatacacccaaaaatctctcacgactttcagtttaaaaatatatctacaaatatagacaggaagatggggagagacagcgtgagtgccagtgccaggcactaaccatgtgaagaaagatgaataagctgtggcttacagaagtaaaaactaatttgggaaaagaattcaacattcaaatgcctggtgtgtttcttcatccctaggaacaaatagtaactaatggcaagaccctaaagtacaggataggcagtatggagcccgaggattccaaatactctccaagaaacaacatcgctcatttcttgaagcctggggctgctctgcaaaggtaacaaggcaaagatgttcgaagacttaattatattaatatatcgttcaggatacttatggattatttggagcaatggaaactatgtaaatcaaagcattaccataccgttaattacataggtttataaggtgagtttatattttgggattctctggtagtgatattttacaatataattatacatacagtttgtatagtctgatgagtttcctcactgagggtgaactgctgcgaaatgttttatgattcgtttattgctagtcacgttgttcaaacaacacgtctataagtaacgttccctttgaactgtactgttactagactgtcctgtgttgtaccatcgaaaaccatcgtccaacatgctcttttcccaggaatggcctgaagcacacgagtggaacactgcatagaacttttatataataaaagtactgaacgtctccggcccttaatatccagagcacccacccttggtaaatgacaaaggcaataaccaatcgccaggcagaatcctagtgacttagccaataagaacatgagggtggggctagactaagctcccggtgacttccccgcaccccagagacccaggttgtgggaggctggacgggaattggactccgaggatttcgttacccccggttgtagctgttgtcctcctcattctcgcaatcgctgcagtgctcatggccgttcccgttcccttccatcatctgcggcagcggaggtgccggcggcttcactgctgtctcactctcgtccgccatcttgagttgcgagagcagggctccgcgccccactacatggggggttcctattggacaaggggaatttgcgctgcattctgggttttgtagtttttctggcgaagcgagctgccactaggagcgactctttcccaggaaactgactacaatacccaggaatcacgagggacggctccggtcggattaagaggcggggccactgatacccggaagcctaggcattcggccacgctttgaggaaagaaggggcgcaaggttggtgggaccgacccttgggaaccgggcggccgcctggcatgatgggagttgtagttcgatgctggtttagggtttcaggcgtggaggttccaaaatccgaggtttgatttcagcctgcccttgccagtgcctgggccgctgggagccgttattggctgccgttaaggaccgttacgtttcccgggtaagtgaaagggcctgaggcccgcgggtgctacctgcctggagccggaatgccccaggccttcttagagtgggcttttccgcaagaagcctagttgactcctggccgccttcctcactcgggagtctgggcaacctgcggtcattggcagttcaaggtctcatgagaggcagtggatttttttgtgcgaagcactgaccctaagccaggagaccacactgctagggaggcagggctcgccgcctcatcttggcctccaggtacttatcttcgccaagctctttcgcgcacacgtggtccctttaattccccacaagaattttccacaacgaccctttttttcttttcttttctttctttctttcttttttcttttttaaatacggccgccttctgtcgcccaggctggagcgcaatggctcaagatcacagctcactgcaatcaaggtatcctcccacctcagcctcccaagtacctaggactataggcatgagccaccacacccggataatttatatattttttgtagagacgagggtctcgccttgttgcccaggctggtctcgaactcctggcctctaaggatcttcctaccccaaccccgcaaagtgctgggattacagacgtgagccacggcacccagcccacatcaactctttctttaataagtgccagactctgtagtaaggcatttcgtacattatctcatttaatcctctcaacaagtctacaatataggtcctattattattattcaacctttgttttgttttgttttgttttgagacggagtctctctctgactcccaggctggagtgcagtggtgcgatctcggctcactgcaaccttcgcctcctgggttcaagcgattctcttgcctcggcctcctgagtagctgggattaaaggcgcacgccaccacacctggctaatttttgtatttttagtagagacggggtttcaccatgttggtcaggctggtctcgaactcctgacctcgtgatctgcccatttcggcctcccaaagtgctgggattagaggtgtgagccaccgtacctggccatattgacctttttgacagatgaaaaaatgtggccctgagaggttggtaaattgcacagtcacatagctggttaagtggcaaatcggtatacaaatccagatctgtgtgccccaggccctctgaattctttgccaccataaaagtcccattttctgatacactattcactcaaggaaatcagttactaaaaggtaactgtgactccagtgcgtattctatatcaggggaaaaaaggtaactgccacattttaatctgtttttaaccttgattgaatgtttcagtccctgagtctcactcttttgattgagtaatctcgcctaagtgcccaaagacatggttcccattcttggaaatttcctattcgggttgagtgtggtgggtgatgagaggactaattcttaccatcagagtgctccatggccaaaaagggaaatgatctttgcctttgggaaagatctcaacatgggaagaatggcagggcgggaagaaacagttcccatctgactcagg

SEQ ID NO: 1244435 - DNA, 4001 bp, Homo sapiens
ggaggcacagcagcatcccctacccgccccctcccacgccctcccacccccatcaatcaccaacacagaaaatcagtgtggagcgcagtcggttttagtggttttctttaatcctgctctgcacttctttctcatttactacacgggatattataaagaataaatagcagatactcttaatttacaatgattagtcattccatttgttctctatatttacaataactgtaaaataacattgaactctatagcttcttcgaggtccaaggaaaaccaaaacactttccgaagaatggaaaatagcttttaaaaagtcctctacaaaagttcccccgtctctttgtacttcaagaaaaaaataacttttcccccctgcttcgccatgcgaagggcactggaatataaatagcaggttaacattattagcaacaaccagaataagtctctcttttctctgttcttttttttttcttttgcttacttttttttaaaaatacagtagaagccggtaacttttaacgtataatactgaccttttaataagtaaattaaaactgggaccgtatatacacacacatatacattcctacacagttaaacagtgcattacaggaaccagaaagctaggtctctgtagcccagaaaaaaaaaaaaaaaaaaaaaaaaaagttcattgaaaaccctcgctagagggtggtggaactggttggaggcggtgcagggggcgtcggtggggatcgatcaagtgtccgggtgcgggcagggggcccccgagttctagcacgagcacttgcactcggaaatgatggggtactggatgggaatccagccgcagcgctggcccccgcgccgctgacagcgccaccgcagcaccgtgaggtgcacggacttggacggcttgcacaccatgccctcgggcacggagcacgagcgcttactgaagcagctgcccaccttcacgtagcgcggccaaaagcggctgcccaggtcgttccacgcgtacagcacggggcagaatgtctgcgaccacagccacatctgtaacttcctccgcagcttcttgcttaggcgctgcttcttgccctgggccaagccctcggagaactctagccctttgatctcgctcggcatggcccccgacggccgctgccgcagcagctggtccagctccgccaggtcctccgcgcccccagctgcacccccgcccccgccgggccggtcctcggggggcgaggtggccatgaagcctgggtcgtagtggcccccgagcagcgagcgcagcagcgtctcgttcagatccttttccttggggtcaaagatagggtctgggtgttcgatgaggtccaccaggggcaggttgtcgctgggtgccgggcggatgtggagatagtgctggccgccggccggtgtcgcccgcagccccaggaccaccaccagggcgtagagggtgacccctaggctggggcagcgctccatgcctctggcgcgcgcccggggctgctgcttcgtcccgcgtccccggaggagagcacgccgagcccgcggcgccgccgcgctcccccgtctctccggaggcggctcacccgaggctgggcaggcgcagggccggcagcatgagccgccgggagagcccttcgcgcagcgccggctcccaccggggcggaagaaaggcacacaagttggccgcaactcctctcccgggtctactggggaaggcggccgcggctgggcatccgaaattactccagggcgaccgcggggcgcgggaggcgccggctcctcgctgccttcccgggccggcggcggcgcagggcgcgtggacgagccgctctcccctcctcctctcgctgctcttcgtccggccgctctgtgcaagcgccgctggctgagctggttctaggggcacttccctccgcctgctccgggctccgcggccggctctgcccggcggactccagcggcggcggcggcggcggcgtccgcgcacgttggcaccggtttgtctgtctcgcagggtccaagcctttaaatttcctgcactttcagctccatcaccatggaaaccactgactctctcggcgttgccccctcccccttcttccccccaaacaacaaccccaccccccacttctccacccccgaggagctggagctgcacaggctccgggggaagccgcctgtactcgccgcggaggcggcggcggcggcttcggcagcgcccagggctgtgccccgccggacccagatgccccgggaagccgacagtccggctgcccgccggagctcacaggcggcggcggcggcggcggcagcggcggtggcggcggcggtggcgcttggcaggtctccgcgcaattttctctctcccccaccacccaccccccttctcctcctcctgcaaaatgcaccgcccccctcctttctcctggagcaatgcaactggggctctaggcgccccgccagggccagtcctggggaaagctcgcggcggcgctggagccgggctggagggtgcagagccggtgtttggggagggggggcggtgcttgaggtggggctggagggtttctcactagctgggtgctttgcactgggaggggagcagcggggaagtgctgggggctcgtttctcggtgcatgcagttcggagcaagaaatttctccatgtgcatggagcgttttccccgagcgcgtcttcttctctcccgggctcttgctctaagtcccctccccccaacacacatatatacacacacacacacacacacacacacagcccctaccccacccccctttgcaccagggagtccgagagccgcagcgttgcgcagcgtgatgtaattcttaggaagcactcctgtctgtctgcccctcgggcccacgagggggttccgctcctcaccatcctcctcctccttggccgggtcctgcaccctgagtggcctagcctcaggggcgcgactggctcgcctgcggctcccctagcccgcccggctccgcgcggccgccgctcggctccctgggggcggcgcgccctctgctggcccgctatgagccctgcacctggcgctggcgggggcggccgtgcgaggtgggtcggccgctgcccgctctgcccagttcagcttctgcttctgtgtccctgtcactttgtgtgtgtctgcgtctgctgactggtccgttttggttctggctattttcccgaaggtctccaggcccccagtgtaaacaaacttcctgagattccttctcggtcccctcaaatttcacaagaatgcgtgcagcaccttctgcctcaggtaaatcggtctctggtctcagtgggtgcgagtggggaccagaaacttgaaaggtgagctgacagcagaggcacctgagtcttgcccggggtccaccctgatataactcggacaagtcatttttctcacttttcgcattagtgacgtaactattaatagatttctcttccagccctacctttctgtgattttaaataaacctccacgatgctttctcttgttcagaagcagtttctctttgatgggagatgggtactgaagggacacctccggttaatttccccttggacgaggaactcaatctcagctttaaaatgcaaactcagttttctttgtggtgaatgtgattggaatctggaaaaagctggagaagagagacttggagtggatgactcaagtatttgccagtcttccatggagtgggagttaagaggtcccattgtgacaacctaaatcgcttaactttctttccccaaagatctggtttttcctttcaacctgccccaccccaactcccaaagtttatcatctgtctaaggaagaaaacactttgttgcatactacagtctttctgcaaaacctctattaaaaggggtgggcagtttccgctgaaagcgtttccctcaattttaaagtctagacaactagaattagactatcaagggactgctcaaaaggagatcttgctttgatggatactgg

SEQ ID NO: 1244436 - DNA, 4001 bp, Homo sapiens
tatccaggtttacatcttcattattccatattcttaaaaccttaaatcaaaacatactagttaaaaactatcctattctccatttacatataataaatacaaatagttaataatcaacatttatattgtatatattatacaaaagttttaaaactcaccttattatcgtgtacaacaacatactctccagtttgaaagttgcacacagctggacatgttataatttgaccttgtttcactgaccagctccccaagggtttctgatcagaaacctaatgaaattaagataaatacaatattcaagaagtcaacttcaaacattaaaagcaattaagtttataatcaataaaagaaaccattaaaatgacagcatttaaaaaatttactggccgagggcagtggctcacgcctgtaatcccagcattttgagaggtcaaggtgggcaaatcacgaggtcaggagttcgagaccagcttgaccaacatggtgaaaccctgtctctactaaaaacacaaaaattagccgggcgtggtggcgtgcgcctgtaaccccaattactcaggaggctgaggcagcagaatcgctttaactcgggaggtggaggttgcagtgggccgagatcgtgccactgcgctccacccacctcggcctcccaaacctctggaattacaagcgcacctcaccacgttcggctaatttttgtatttttagcagagacaggatttcaccatgttggccaggctggtctcgaactcctgacctcaagtgatccacccacctgggcctcccgaagttctgggattacaggcgtgaaccaccgcgtccggccaaacctctaaaagggtagttaaaatgaaaatataactaagttcctaaataagtaaataagcaaccctttgttaaaaaaacaatagtacatttaaaaattgattatattatgcctctgcatgggaagttatgcctctgaacagcggcatgggaaattaagtagggacatctgggatcatgtctatccaattccaatctgccattgtattcctatgcaggagctgcaaaactgcaaatctacttgacatcccaagtgaaacccaatagagttagcagagtcaaaacggcacagggagctgttagcaacctgttctcaaaacgtcaaagcagatacctaacttctttaaaacatggaaaactatgttcagcagcccagagaaaagtaactgctttctatgcgaccaccaaaagcaaggttagaaagtgttctctatcaggctttaggctgaaatgggggcagggcttgcagattttcccaggactcaactccaggattcccagcgtgaatcagagatgccaacagacaactcacttggaggcaagattcttagcgagctatcaagaaagtccctcactctctaaaattgtccccgcccctacaaagagaggggtgtgaagtgtagacacggctaaaccactattcccactctgtcagtgtcatcctctcccgcccaaccaatctccgttccatcctcccgcgggcggctaagataataaagaccctaggagggaatcttagcaaggccaattccgcgagttccgaagcaaaagcacaggttttctttcttttccgagtctaacccacgtgcactcagacgctctgcccctgcaagtcggaaatatgcctttacaggaaggcaagcaagccagattccagacctcactcagcgtccccaacaggcccagccggctctctgctaagccttctccacgatctctttctgaagctgtgagaaacttgagctcgagctccgcgctcagaaaggggcgagaaggcagtcggggcgctcccaaacctattgccttcaccttatagaggatgactgtcctgccgctgtctgtcactagaaactggtctgttttgtcgctctgctccacgcctaggagtccttcaggcccggcgctcaggactaccgaagacaacgtgaattcttcctccagcgctgccattttgagcaaacctaagtacggccgcgctcactcccggcaggcctcgcgctttctctcgcgagaatgaacgggcctgagggggcgagtgcttgccaaaccaggaacctgctctcgcagcctgcgacctctggcgggcggaaggagcgagcgcgactgtgaatttagccaggtgggctgggccggcttgcgtcagactccgcctcccgagaccacgcctcgccgagtcccggatgtgctccaggaagggatagggtaggcgcggaagtgctgcttactgggtcctgaatcggctgcgtgctgttctaggtggggacttgagagactgtagatgggtctagggagtggtcgaatataaataagctagatttttttttttttaattgcaagggaactccctaggaattccatccatggccttgtggaacgatctgccaaagaaaaaatatttatctctgtaggtaaactcccaataacgtgctgttcctacgtgaaatgcttaattccccccaagtttcttggaaccctctagagatctccagtcttttcagtctttcaggccttctgagttctctgactccccttctctgagccccagtggggaaaatctctcctcagcttacaggaaattcagactagtttgatgaaggtgaagttgaaggtcccctgtgtgatttttggcaaggtttttatttccgggagaaatgtatgtttctcagataagcatggcagattcaatcaataatgttaaataaataagtaaagataaattgtgatgttcttagggagaaaccatttaataggcaattactaaacaaatgtacccagtgtgacaaagtgcctcagtttagatttaagcatccaccagatcgccatgtgtgttgtttctcattgccccaacatgacgacatgggcaaaaggagaatatccagctactgtgaaggaatcaaatgcagtctatttttataatgctaataggtcttttgttgttcaaaagtagtggcattatcatggctcactgcagcctctaactcttgggctaaataaagcaatcctcctgcttcagcctcccgaataactgggactacaggcatccatcaccacgcccggctaatttttgtattttttgcagacatggagtcttgctttgttgcccaaggtgatcttgaactctgataatcttttaatttttaggctgggttgtgagatcaagaggatatagtttattattatgcttcataacttactttgtgataggtggtaagaagaaaaacattaaactcagaagggagagataaagcgtgggtgtgtgggggaggaaggagtggtctgtgtatgtgaaattttcactaggatgaccacaggcctccttgagaggatgtctttttttttttttttttttttttgagacagggtcttgctctgtcgcccaggctggagtgacgcagtctcaactcactgcaatctctgcttcccggatttaagctatcctcccacctcagcctcccgagtacctgggactacagacatgcaccaccatgcccggctaatttttgtattttttgtaaagatggggtttcaccgtattgcccaagctgaccttgaattcctgggctgaaatgaccctccccccttggcctcctagagtgctgggattacagagccacagtgcctggcccaagggtatcttttgaggatggcatgaaggaggggagggagcgatcatgcagttaactaggggagggagcgatcatgcagttaactaagagcattctcagtagcaagtgcgcctggggcaccaacagggagattccctagaagtctatcgcagttattgtagttaccaggtgagaggtgatgagggcaccatcagtagcaaggcttttctttctttctttcttttttcttttttgaggcggagtcttgcactgtagcccaggctggagtgcagtggcgcaatctcggctcactgcaagctctgcgccccgggttcacgccattcccct

SEQ ID NO: 1244437 - DNA, 4001 bp, Homo sapiens
ccaataatcagcggctgcattgaattccaacagggactttcaagaagcaatgaggagatcagacctcaggtgagagaggaggagcagagagaggaattctgagtcatcggtgccgacagggcatgggtgcccaaggagacaagcaggaggttcccccagggaaaactcacctggaggtggcacagggggctttctccacattgttgttgatgtctttttccccattcattgcatactggtggaatttggtcttgaacagaaatttccaaggacaggccatctctatggctttacaaagcaggtcacttatgtcacttatctggatttgagctcagatgttcttcactgtggggctgaagaagggaagcagaggtgagggaaggttgaagaagagtttacagaacagggcttctcagtggggttggctcactggggaatcgatatgaacgccagcatgagccccttcatcaatgctttgcaacctctgtctctatttcggggttggaatggggagccttcggacacagacttcaattctgtaaagccacctaataatcttaaggaaaaacaatgaacccccccatccccatcgccacttaacaaggacaaactgtatgcaccatgagcctccttagcgggacctgctggcccaccagacccagccaggcttcatcactggccacaggcagggtgaggaagagcccggaggtcgttgaaacaggggtgcctttgcctgaccctgaaagacacttcccagcagctctcattatcaactgtagttttaggtctattactggggaaagcactcaagctgtagctacctttcttttaaagattttgcagttgttgttctaactcagcattattacttgctcctcttttattatgtggggaggaaatatttgtgaaaaatgcactcatccctcgaaatctgagatcatctcctttgaaacagacaagaggaagatcaaagaggcaaaaactctgtctttagaagacagtgtagtgaatatagtccatgtaagaattttaggccaagtgcagtggctcacgcctgtaatcccagcatttcgggagaccgaggcaggaggatcgcttgagtccaagagttcgagttcagcctgggcaacatagggagaccttgactacaaaaaattgaaaaattagccaggcaggcatggtgtcttgtgcctgtagtcccagctactcgggaggctgaggcagaaggattgcttgaggctgggcagtcaaggctgtttccaaaaaaaaaaaagaaagaaagggaagggaagggaggggaagggaggaaaggacaggaaggaaaggaaggaaagagggaaagaaagaaaagaacttatagccccatagacctgggttcaaatcctggaatcctagctctaccagttatgtgtcctggatcaagttatttaactgaaactcatttattcatccataaaatgggtttaatatatccatcttaccaggatttgtggggaggttacatgttataaggactgataagataatctctgttaaaaaaaattcttagcagatacaaactcccattttgaacttttcagaaagtttttccttgtcatgtaacaaccacagctaatatttgcagaaaagaaatctgaccaagatgccatgttcaaatgaccaaacctcatgtcggcatttttttacctagactttccaacaccttctctctgtaggcagaaaattcccacaattttctgagccttctcaaagaggaagaaacaaaaccctctcaaaacagccgcttccccagaaatgaaggcaactcaccttgcagctggctgcactgcctccccggggtaaggacagtcaaaccaggaagagacctgtgccttgagaacttcgggactgtctagaactgcccagtcccctcatcaaaggtggccgagagattttaaagcaggaatgaggctgagttctctgcggccggagcctcagttttcgactcgctacaaagttatgaacacactggcagccaagaagtatttatactcaccccatgccatccagagagttgtttttgcataaaggtctcttttttttttttttttttttggtttccaaagggagtgtccccagcttgtgtacagttagctaatttatgactgtgactgccagggcctgtgggtgacctgatcttgctgttacatcactctgtgtggtgcctcttcacccaacccacctctttctggtcccaagtccaaggtggcagttcatcagcagggtggctgctaagatagaggcaccacggagccaggttttatttggccaagccacatggcctcactttcagcatctgggagattttttcctcagcagggagctctctggttaatccctgtccatcctctcacttttccagcttgtgacaggagtccaggaagctgggggaatattgacagtatggaacacactggaaaatgcccaggttccagaaggccagtgatattagatgatgccattattccagacaggcctctgaactagtcacttgaggtttttggaagggaaaggaaggaaggctattggcacagagaggcctctgagatgttggtcttactaacacctcatcctttagcactaggtaagctttggtggaatggcaggtaggattaaattccttcccttataatggaaatgatcacttcttacatgaaaaagtggtaatttcttataatttcatttcatttattttatttatttatttatttttgagatggagtctcattctgtcaccaagactggagcggagtggcacgatctctgctcattgcaacttctgcctcccaggctcaagcgatcctcccacctcagcctcctgagtagctgggactacaggcatgcaccaccacacccagctaatatttttgtgtttttggtagagactgggtttcaccatgttgtccatgctggtctcgaactctgaagctcaagtgatctgcccacttcagcctctcaaagtgctaggattacaagggttagccaccatgcccggcctataatttcattccttataatgcctgaaatacagtattcccatacatatgcatttttccatcataaaagtaaaataacaactacattagggagaagttgagaagcaaagggaaaaaaagtcacccttgatctcaccgtcccaacactttgctaccactgtccactcatttccttcttgtctttcccaagttaaattcagcataatatattaactttgtcaaagataaactaagagccacaaaaaagacatggatatcagagctcaaggatctttgttgagtgaatgtgtggatgaatgaatgaaaaataggagtaaactggaatgagttttaacatatcaaagccatcttcccttcaggcttcagctcaatgctgcggctcaatgctgcggcttagagctctggcttatggagcatctgccacgaagagcaatgcattttagaaagtgacaagatggccgggcgtggtggttcatgccggttcagttcaggtaaacagcactcagggaaagagtcagaatcctggccttagggagtgcaaggcctagaaaaataaatggataattatagtacagagtgatatctgtagtgatggagggatggtatggtgctgatgtagctggttctgccttgttcaaggaaagtttacaagggagaggacaccagggcagggttttgagggatgattaggagtttgctacactctattccctgtagctgctttcacatattctggctatacctgcagcaaacacatgtattaacacatttaatgcccccacccaagagcctctgagggggatactactatttgctattcatggaatcctcaagaatcccatctacttggcctcaaagcacttcgttgattttccttcagaaaatgcagttattcagttatgtgatctgtcaaacatgtcacctcaggtgcccctctaacacagcgtctgcttggtgtggcattct

SEQ ID NO: 1244438 - DNA, 4001 bp, Homo sapiens
accatggccacggtgcccggctaggctggacaccaggtctgaccttgacttcaaccccttgccctgctttgaccctggggagggccagagccgctgggtaagcgcctgaatgctaatgtggaatgggccccaaaaggcaagagtgaagggcgccccttgctcttagtaaacccgggcgccaggctgggcatgatgtgcggggtgggggcctggctggggctccaggaggcgggcgcggcttcctcccgggcctcacgtcgagacgccttccccagggcccgccgctgacctgtgcgagtgcgcggccagtcccgggagctcatgaggcgccgcatggtgtcgtatctggagtcgcagttctcgcggttgaagcagtaccagccgcctgcggacacgaccgccgctcaggcccgcgcgcacagacccccggcctccccccgcctcagccctggacgcaccttccaggaagaggagccaccgccggctgcccctggactccttcaggtagtagctgcgggggaggacgcaccgcggggggtcggccagggctgccgacccgccgcgccccgcgcgcccagctccggcggagggaacgcgccacctgttccggccgcgcgcgacggtcgcacgggggcgccctcggccaggcccacggggagctcagggacggcggcggtcccgggaggtggcgctcgcggggcggggaacgggccgcgcggggctgtggtccgtggaaaatccccacgttccgcccggcgcgggtcccgctgtcacctcggcgcgggcggcggtcctcccggggcgcgcggcggcgcttgaagcgtgaaacgcgtccgcactgaaggagcgcgcttggcgggggaacgggacgccgcggggagcgcgggaggcgcgggcggcaccgacccggcgggggagccttcctgccgagccccgaccccacgcccaagtctcccgctgtccccggctgtcctcggcctgttgagcgcgtgggcggccccgccgctccccgacccccgacctcacgtcttttatctacttcggggctgcaaggaggtgggcagcgggcctctccccgccccccggtgtcgccggttcccgctggagccaggcgcgctctcgggctgccatctccccgccccgggaccgaaggacgccagcagagcggctgggcccagaggccgaggggtcagtgcccgagctggccggggaccagcccttccagcgccgctccgctccccacgcggagagtcaccgaaccgggcactcctcggggccaggaccgcggggcgcccgacggaagccctttctccccggggagagaacggccgcggcccgcagggaaggtccagccggagaccgggcgcgtcgggcggggcggggaggtgcagggcgcgggccttacccggcggggctgccgtcgttgcaggtcaccgaggtgttgagtaggaggtgcaggcgcaggtcctcgttgagctgctgcgcggagcaggggtacagggactgcgccaggctcttgacttgcgccatgaagctgtccatgttaccctccacggccgtgaagtccagcgggaagctctccacgggctgtccggccgccggcgccgcctcggtccgcgggggaggaggcggctgctgaccccggcgccgccaggtcttcctgccctcgctgcccccggcgcagtgcagcaggctcagcagcagcagcacgcgcacccctcggcccatggccgcgtccacctgcggggagcgggcggccttgaggcggcggcggcggcggcgggggatgccgggccgggggtgccgggccgggggtgtcgggggcactggccgctcctgctccctcgcccccgctcccgcccgccgggcctggcggagaaggcgcgcgcggctcggcgtcgaggcgctcggggccgggtgccgtcggcctccgcagctggggctccgcgcccggccgtccgagggcagcgcagggtctgggtgcgctggctgcggcccgcgccaatgagcggcgggggccgaggctgggcttatttgcgggggccgcggcggcccgggtgcccgcgcgttagatgtgccgccgccgccgcccgggctcggcggaggggggagggggccgcgctcgctcttttcttggcggaggcatcgccttttcttcccaaaccgcaagcctgacggaggggcctggactaccccgccgcggccgccggaggcgctcccggcccggctccgtgggggggcagcgcggccgggcggccccggcggctccattcaccgcggccagcccggcgccgccgcccccccccgcggggcagctggaaggggcggcggcgacggggaggggcgaggcttttccgcgcctgccggggtggggggcggggaactccgcccgcggcgcagctggccgagcccgacgggctgggggcgcggggcaggcgcgctcacctggagccgccagtgtccctctcatcccccagtgcccaggcccagagcaggccgtgggggattcggaccccggcccgcatcgccccacctcgcgcagccctggggccccgctctcaccgcggccagcgcgggcggcccagtggccccgtcctctcagcgcccctggccctgcgccgtcccgctggtgcgcccggctcggctgcgctccccctctggcgctggcgcggagccgccagggacttttatccagcagggccccccgggatcaaagcggcggcggacacagggcttccagccgagggcccggcagcagtggcgccggggcctcctggagaagcggacaggtggggcgcgaggtcctggctccctcggagacctgcgggagggaccgcgcgccccagcaaggcgccgcgggggagtcgctcagttccggggcgctcctgctggcgctggggtcagagaagcagctacgacttaaggagatcgcggggccagaggtgaggtcctggatctccgcccgccccagcctggctgctggccccatgccgaggaccccccaagaacctgccccagccgccactgggggaggaggccaagggtccagtggctgcccgctaggcctctgcttgcggcccttcatgccacgaagggcacctgccccatgcttcaccttggagagcacccctgtccactcccgaggctctgggcagtggggttagaacaaggttcctgtgggaaatcagtactggagcagggtggacaggaggggttcaggaggtttcctgctggggtgagcgcgggtgggatggacaaaagaaaggaaaggacatacgcagggccagcggggccgggcagactttctccttcaccctccggtctgaagcctgctgggcgccatgacacccattttaaaaataggaaacaggtcttacgtttcaggacaaccaggtcttacatttcaggacaacgatctagacacaagcagagcttccagagcccctcctaattcaggacagtggggagcctacggcaccacgtggggcaggagagcagaggcgcagggcggtgcctgcagccaggatgcccccgagccgccggccggggccatgtggacgtcctccttgccagccccgggctgagtgaggagcttagggagaaagtcccagcgccgcctgcacccgcagacagccgagttacctgggctcttgtgaaacagagagaccaaacgctgggagctgttgccccgcgcattcgatgggtgtaaggcaccccagtgtaaaccacaaggcctaagatcaggctggggtgccctggaggtcagcctaacctggggacattctcagagggaggcaggctgtcacaaactcaggtccctctccccacagggcaggttgcagcattttcctgacgaggggaactgaggttcagggacactaacagaagagctgaggctcacccttagctctctgctcactcagaaatcccccctgctgtccctccgccgtcgggtcagtttaaaagccaagtgtggggctggccaagggcagtagcttcag

SEQ ID NO: 1244439 - DNA, 4001 bp, Homo sapiens
aaccactcagcaaggagaccctcttggccctgcccccaccatgcacccagcagccgggagtgcagcgggcagcctggcagtgagtgaaacccaggcctccagccctccaaagcctggggccaccccctgtagcaggcgatgctagaataaggaggagagccagagctgaggctccttgccccttggcccctccaggggccatgggatctctgtctcccacacccctgtcacggcccgcctggagcagcccagaggccgaagaggttcttactgcagcctccgggaggtgtctagggaggccatagattgcctggtctcgccgcattcaaaatgaggcttatgatcagtacttttttcagccccacattcctctccagaatggcctctgccctacagcacctggcccatgtggcaccccatgggcctgtcctctgctgttgtgaggtcgacctcacgacccagcacaggagctggaggcgaggtgcacgcgaggctctccacagcccaggaaggcagcctgtcaccctgctctccgagccaggggccaaggtgtggggggcacaggccatcctcatcctgccaggcccccgctttcaggagtggggtggtgccaatgctcccactcagaaccctggactgcggggtcccctgagcagagggaccagccagttccccatagacagattggtgctggacaggggctgcctgggccccaggcttggggagggtagaaaggccctgcagtgctgctgcctgggcccggaggtgggcctggccccgtagcagcattggaggccagagcccaagccagttccggagtcacacccaacggcggagggagaacctacccatctcccaccttcagctctggggaggcatgctctgggcctctggagccagggctcaggcccccaactctcctccttgcccctgcaccctcggacttggcctggccagaagggatgggggcaagaggaaggcagccaggggctccagcccatgccctcacagatttggctctcgagttggggagcgaagggctgggggaggacactgggaaccgggccagccgtggccctgcacttcccccagggagcaccaaggctaggcgcggcttcaccgcggggctgggtcgtggccagcttcgcccctgggtctgaagacctctgggcggcccaggccaaccttgccctgccgccgcacactcggctgccttctcatacccaggcttggggatttccaggtcccgttcccctcgtggcctggctgccagtcctccagcacccctcactccgaggccgcctcatttatttattcgtttgccattaactgcggggtgagcggagtaggggagacctggggcgccatcccgcgccggaggggcctggggtcaccgagtgggacggtgggggcggggggcccccagcggtgccaggagaggtccgggctcaggcggcgaggcagtcggctgcgcgcagggacaggaagacgttcgccttgcactggtaggtcccgcggccgtcggggagccgctcgcacctctgcaggtttggggcgacgtcctggacgcacacagcctggggggcaggcaagcaaaggctgaggggccgccgcacccccacccacgtcctgccgccgccccccatcagtccccggcacgccggactcacgaggctccgcagcctggggtgcagttgcagctccggggaggcgccggccccgcccgggggttccgcccctctgtagggctgggagcgccgcgcgtacggggacctgcggaggccggacagcagccccgcggcgcggcccaccgagtaggagctgtgccccgccgctggcttgtaccacgcgaggccaggcggcgccagcagcaggcacagcgccagggcggcggccgccagtgtcgcggaccgggccatggggacgccggctgactggtgggcggcggcgtccgggctcggagcagccaccgcctgggccgccttatatctgcggcgagggcgggccgaggctgcggagggccgggaggggcggcgggcgggctggggtgcagcgggcgcgcgcggaggagccgtcgcacctccgcatcccaaaggaaccagccgcgcgggcgagcgctggaggcgcgcaaggatctggcgcttggtgggagcccaacgccccctcaagctccccacccatgccgctcgcgcccttcaggcccggcttgcgtgggccgcagtggcagcaggggagggcccacgggcgcccagccctaggagtcgtcccccaggcaatccccagtactcctgatgctggagagccagccacactgcacagtgccccgggggcggtttctaccaccctaaggggtattcttggctccaggcatcagagtccatgtggcttgtggggccctcatttctttcatgcccactggggaaggttccaccagcagggctgttactggcggggtcctctgggaggggggcaagaaggccagccacaccaaggcactggagctccacgactcctggccttcgattggaggcccctctctgccagctctgccccttggggggcaccaggcaggactgccagccgctctcctggcaggtgacatcagccttcaagctcactgtgccctcaccatttcatgctcccccaaggtcctggtcatgtcttctcttgggtatcttcccaggacaggcactggcactggagccctggcacttgtttctgggttccatgcttcccaggtgtgatggtgaatgctgagtgtcagcttgactggattgaaggatgcaaagtattgtcactgggtgtgtctgtgagggtgttgccagaggagattcccatttgagtcagtgggctgggagaggcagacccaccctcaatccaggtgggcaccacctaatcggctgccagcacagccaggatacaagcaggcagaggaacgtggaaagactagactggctgaatctggcctccatctttctcccatgctggatgcttcccgccctcgcacgtcggcctccaggttcttcagcttttggactctcggacctacaccagtggcttgccaggggctctgcagcctttggccacaggatgaaggctgcactatcggcttctctacttttgttttgggactcagactggcttccttgctcctcaccttgcacatggcttattgtgggacttcaccttgtgatcacgtgagtcaatactcccaataaactcttcatatatactcttcatatagagtcctgtctctctagagaaccctgacacagatttcaggtgaggcctggtctactcctcaggttgctgtgaggaagggtcaagagacactgggcacgggtcactggccccatgaatgccaagggctccctaggttactggagacacagcctgtgctctgtccagaagcagcctgagatgccggggctgccactcccccagcggccccttcccaccacgattgtggggagcagaggcacacaaaggagcctcccagggccacctttccctaggaagggaagcctcagacgtgtggacacacttcccagtgtcaggacactgatccctacactgtgggaggcccagccccgctgcagacagtcccagtgagaacaatggacgcccactcagagatggtggccttcagtctggaggcgccacaagcagtggccgccagctttgcacagccagggtccctcagagccagcctgagggagggtcccagggccgccgccggcaatccagcaggcaagagcatgcctgaagagcatgccccaggctctaccgtctgatcctgctccttctcctcccagtcatgactcagggtttgacgagggccttggcgtttcacggagatgtttattcatgagagttttcatatcaaaacacaccgagaccacatctatatgccgagaacacaggcacccagaggcctccagcaagatttgagtagtttaatgagttttcacttattggataaaagtgtcaacatagtgatg

SEQ ID NO: 1244440 - DNA, 4001 bp, Homo sapiens
gacaactaccaacattcaattcattcgagcaccagtcttcacttcatttcattactatatacaccatgttctttaaggtgggagcctactgatttcccccgaccccagactgcagtaggaagagaaatgaaacaaaatatatttactaacattctatttacagataactatcaaacagttcccatttttattacaggcttcctattacatagtatcataaatgcctattgtgcaggatgtttgtcgggcatctatactgatggtctccaaaatcaaacaatacttcagataatgctgcgggaggagggagtggagtatgattcaccaaaaactgcagtgaagagtaatggaatattttcaccggtggtatgttataactaatagcttctttctttcctttttttttttttttttttttttgagacggagtctcactctgtcgcccaggctggaatgcaggaatgcagtggcgcgatctcgactctgcaacctctgccccccgggttcaagtgattctcctgccttagcccccgagtagctgagattacaggggcccgccaccacgccccgctaatttttgtatttttagtagagacgggggtttcaccatgttggtcaggctggtcccgaactcctgacctcaagtgcgcccgcctcagcctcccaaagtgctgggattacaggcatgagccaccgcgcccagccagcttcttgggagaggaaggtactgctaagcaaccatcacggtagcaataaatccaccagcttcgaaggccgcaaagctaggaagataggtggaaaagcggagatggggtcctcccgcagcttctctggaggttaagagagaacaaagtcactgctgcactgtcacttgagggaaagggggagggggcggatcatcttggaaacccagcccctgggctggagcaggcggggagaagtcagcgaggctgcctgggattaacattctcgttctcaccctctccccccccttctagaagctcccctcgtcgctccaacgcggcggccagagtcccaaatgaccaccccctccaatctatcacccgagaggtgtagagagaaaccaaagaaagaactgagtcaggtggttgaggcagagcggggactcccatgacctctccgtcctcccccaacaccctccagcctcccccggaacactatcaagcccagaagggtccggggcgggggggaaagccccacacaggtgtgctcgccggggaggggcgcaatggccgggccgccggctccccagagctcccgcagcgcggccccagcccgagccccagcctcagctccggccacggtccctgccccggccccagccccagccccagccccagccccaacagagcaaggcagagcacgccgaacccggcgccctgcggccgcccagccccgacccgaggcccgcccgccctcccggccgggccctgagtccagcccgcgggcgcggcctaactgctcgccccgcagcttgccccggggcccgagggtcgctgtacctgggcggcggcctccagcttgccctcgaaggtgaagtccagcaagtcgggcttgaggcaaaggctgtagttgatgggggagacatcggcaggcagccgctcgaagggcctcttctccggcatcgcggcgaggcccaggctgtggaggcggcggcgagaggagcggctgaagacgagaaggaggaggggaggaggcggagggccgaggaagagcaggcggcgagcgagggagggggcggcagctgccagccacatccaccgagcgcgggcgaccgccggaggagagcgaccgggggagcctggggggcgggggagagacccagccggagcgctaggggctgggaaggaggcggtgcgggcggactggcgggcgggctgcctacggggaagggggcggaggggagggaaggggaggagggcccgcaaggagggagggagagggggaagtggtggcggcggctgcgtgcgcggccccgccggccgggcgcgcccccgtggagtgcgcgcgcacgcctgggcagagggcggagcggcgaggacgagggcgcggccggcggggcgggagggcgtcgggttgctcgcgcgagcgcagggctggaggcgggcgctgcacctgtcggcgccgctcaggactgggggcggccttccaactggaaggagccgggaagggcttgatcagaggaaggaaaggcataaggggccctcgggaaattgaagcctacgcagttggtcagttcagccagggtcgcatgcataaaataccagttacaagcaaaaccccaaactggattctgcctccaggtcagcgaaaagccctgacttgaggctctctggccttagttcctgttaagtagcaaattcaaaggatgatttgaaagttttgttataaaacctttaatagccgggcgcagtgtctcacgcctgtaatcccagcacttcgggaggccgaggcgggcggatcacgaggtcaaggagatcgagaccatcctggctaacatggtgaaaccccgtctctactaaaagtacaaaaaattagccgggcgtggtggcgggcgcctgtagtcccagctactcaggaggctgaggcaggagaatggcgtgaacccgggaggcggagcttgcagtgagccgagatcacaccactgcactccagcctgggcgacagagcaagactccgtctcaaaaaaaaaaaaaaaaaaaaaaacctttaataatctaggttacttcaaccaatgagatttggacttttgagggagtgatttcaaaaactgtatttttgtttccatgatttaatgtttaaaatgggatgtttcgggcggtcgcggtggctcacgcctgtaatcccagcaatttgggaggccgaggcgggcggatcacaaggttaggagttcaagaccagcctggccaatatggtgaaaccccgtctctactaaaaatacaaaaaaaaaaaaaatagccgggcttggtggcgggcgcctgttgtcccagctattcgggaggctgaggtaggagaatcgcttgaaccctggaggtggaggttgcagtgagccgagattgcgccactgcactccagcctgggcgacagagtgagactctgtctcaaaataaataaataaataaataaataaataaataaaatgggatgtttcaccttttccccattttcatctttgtttctttttaaactaaaagatccttcagcaatcatggcctctttaatggtgaactatctgtggctctctcagttctgtagataccttgcaaattgaggaggtatatatacaaatgcatatatatatatatatatatatatatataatgtaactgaaattatctttaaaaaggggggccagggccaggtacggtggctcacacctgtaatcccagcactttgggaggctgaggcaggtggatcacgaggtcaggagttcgagaccagcctggccaatatggtgaaaccctatctctactaaaaatacaaaaattagcctggcatagtgtcatgtgcctgtagtcccagctactagggaggctgagacaggagaatcgcttgaacccgggaggcggaggttgcagcgagccaagatcacgccactacactccagcctgggcgacaacgagactctgtctcaaaaaaaaaaaaaaaaaagtgggcccaggtgtggtgacgtgtgcctatgatcccagctactcgggaggctgagacgggaggatcacttgagcccaggaggtggatggaggctgcagtgagctgtaatggtgccactgcactccagatgacagagtgaggccctgtctctaaaaaaataaaaatgaaataacaattttaaaaatgttatttaaagtgtcaaaggcaaggagatttatccataatcttcatatttctttatagaaatttctcagatagaacccagtaatttccaaaactgaatgtagtatgttgtaatggaccagtactgtccagcagaaacatactat

SEQ ID NO: 1244441 - DNA, 4001 bp, Homo sapiens
gggcggatcacgaggtcagaagttcgagatcaacctggccaacacggtgaaaccccatcaccactaaaaataaaaaagacatcagccatgcgtgttggcgagcacctgcaaccccagctactcggctgaggcaggagaatttcttgaacccgagaggcggaggttgcagtaagcagagatcgcaccactgaactccagcctgggcgacagagtgagactccatctcaaaaaaataaaataaggttaaaaaaaaaaaaaaaaaaggagtcgacgtttcctaagtttctcctgggccatatattcattccactcatctccaggttgggaaacatggaggcaccaagagggcccctgactggagagatgatggaaccaccagagaacagccttgcaaataagtgctaggttctcctggagacccatttgtttgtgtgtgtgagacagtctcattctgtcgcccagggtggagtccagtgacgccacctaggctcactatgttgtccaggctggtcttgaactcctgacctcaggtgatccacccacctgggcttcccaaagtgctgggattacaggtgtgagtcaccgcgccgggcctggagacctattctagacaacacctggcaaaactgcagagactgtcacaatgctacagtatgaacattactcttcacccaatactgctaagcttcccccagaaatcccaaatcttccttaatattaaccaaaatgctcctgtccaatggtcagttagtttttttcccatcacatttacttttgggaagaaacttctcacaacttaacgagggactggttttctgatttgtcactgatattttttacgttaaggaggagtgtgtgacaattttttttttttttttgagacgcagtctcgctctatagcccaggctggagtgccatggagggatctcagctcactgtaacctccacctcccgcgttcaagcaattctcctgcctcagcctcccaagtatctgggattacagtgcgccatgacgcccggctaattttttgtatttttagtagagacaagattttgccatgttggccaggatggtctcgaactcctgaccccaggtgatccacccgcctcggcctcccaaagtgctgacatcacaggcgtgagccactgcgccgggccgacaatttcaatttcaggtaaaaagtgaaatcaacatcatttacaacattccttttaaagaggaattgtcaagttgtccttccaagtaaggagcaaagccggcaagttactgtgttttcattttcccaggtcttctggtggggagggagctctgtaacgtccccgtctgcagagctgctctccttagtgactcatgacaaggcacttgctgggaagcgggagagcaggaggagagaatcagagggagattaggataagaggtgtccctggctctgagaggggcaggactggctgggagtccctggaattagaccaggaagtctcctggagccgggaaacgggtggggaaggagggcggtttctcttcgccacagtccattctccctgcttagaaaggctcggcctttccctgcccagggcggggaaccggggtcgtaagtcccctggggagggacacggacgggaagcagccgaggggggtgaaagtccccgagaggggcccagccactacagagaaagccctggcgagagaagagaaaggggccgagtcgcggcgccggcaggcccgcctcccccacaggccgaggccggcaaatctgctgcctcatcccggcgtccccgctcccgcccggccgccgcactcacgatgctctcggccatggcggctgctcctgcctccgggctcgagccccgggccgccgccgcctgccgccccaagggcctcgcagacccggccgcggcctcagccccggccccggcctccctacgccgccgccaccgccgctccagcttcgcccgcccggctccgccagccgccgacgtcccggtgcctcgctcaatacgctcccctcgggcgcgaggccgggaaaccaggttccggccccaccaacggctcgacgcatgcgcagggcggcgccgctgacccgcccccgccatccctgcaactggaggaggggattttggaaagttgcgtctgagattacttctgctcgtcctcggaaacccaagcggcacaggaaagtccaaaaaggaagcaaagacgagcatccgaagtctcacccaaaaataactactgctgcgtattatagcgtattataattggggaaacagcattccaaacttctctccatgcacaggtaagtagagaaacaatttcaggaaggcaggatcacaccttcatgtttttttttttaagtattttttaaatttaacataagaaaaacaaacgagtttaaactgcatttcaggccgggcgcggtggctcatacctgtaatcccagcattttgggaagccaaggtggacggatcacctgaggtcaaaagttcgagaccagcctggccaaaatggtgaaaccccgtctctactcaaaatacaaaattaggccatacgcggtggctcacgcctgtaatcccagcactttgggaggccgaggcaggtggatcacctgaggtcaggagttcaagaccagcctgaccaacgtggtgaaaccccgtctctactaaaaatacaaaaattaactgggcgtggtggcgggcacctgtaatcccagctactcgggagtctgaggccggagaatctcttgaagcgaagaggcggaggttagaatgaactgagttggtgccactgcactccagtctgggcgacagagtgagacttcatctcaaaaaaaaaaaaaaaagacgtcacttcacagattctaaggatttttggagttggataccaggaaaccggaagactaaatgtatacatatttcacaacatcacaattactgtgacagtttttttaaactatgttaaattacattaattgattaaattatgttagtaattgtattagtttgctcagggtgccactgtaactacccaacatattgtccctgcccactgcctagactttatcaagacaggggaattgcaataaagagtttaattcacacagagccagcttgtacaggttactgaggttttattactactcaaaaaaaattagtgtccttgagaattcagggatcagagttttttgttttttgtttttttttgtttttgagtccgaatctcactctgtcacccacactggagtgcagtggcgcgatctcggctcactgcaaccttcacctcctgggttccagtgattctcctgcctcagcctcccgggtagctgggactacaggcgcacactaccatgcctggctaattttgtatttttcgtagagacggagtttctccatgttggtcaggctggtcttgaactcctgacctcaggtgatccgcccacctgggcctccccaaagtgctgggactatagacgtgagccaccgtgcccggctggggatccgcggttttaaggataatttggtgggtatggggtcagaaagtagggagtgttgattggttgggtcagaggtgaaatgatagggagtcaaaactgtcctcttgtgctgagtcggttcctgggtgggggccacaagatatgagccagtttatcaatctgggtggtgccagctgatccatggagtgcagagtctgcaaaatatctcaagcgctgatctgttttttaatagtgatgttatcctgagaagcaatttgggaggtttagaatcttgtagcctccagctacatgactcctaaaccataatttctaatcttatggctaatttgttagtcctgaaaaggcagtcttgtccccaggtaggaagggagtttgttttgcaaagggctgttaccatctttgtttcaaagctaaactataaactaagcgcctcccgaagttatttcagcctacacccaggaatgaacaaggacagcttggaggttagaagcaagatgggttcagttaagtccg

SEQ ID NO: 1244442 - DNA, 4001 bp, Homo sapiens
ggggcccagcccctggcctttctccgggtgtttttcattccccaatctccgctccttccctctccctccctcctgaggtccttccttctgatctgtttttcagttacataacaagccttaagatggcactgtttaaatctgtccggcacattttgcggtctgagcagggtcacgtggccttgctccgcaccgggcacccccccccctccccttttacaaccttgtttgatttctgcgacttcaagacagagcctccagcgctcatccaggcgccctgggtgatagactggctggcctgagttggtgactgagaaacctcagggatttgaaagatgccaggacttgggtcactcagaaaagaaaacctcagggtaggggttcaggacagaagtggggaggagctggagatcctgagaggacaccgggggcatggcagccgggaagaaacctgcttaacagcctcagcggcccggggaacgagagcgcccagccccagcctgcacccagctgtacgctgaggctggggaccagggagagacaggctttcttaagcagggagggtttgagccagcgacagccactgtgcaaagttactgaggattaaacaaatcagacttgaaaaatccagcgagtgtgtgagtgtgtctggatgggggagggggcactatgcaatcccctttcccagagacagccccagcccaaggcacccagccctgatagaaacaccgactagaagcccagaacctgggaaggggtgcggggaatgagaaagcggtgcaggggttgggggtagcggagcggcttgaggcttgcacagtgcagagctgggctgttagggatcgggaccgaggcagggtcgggcaagcaggtgcaggcaggcagcacggctccccctggccccagtacctttctcgagctcgctgatccgctggtgcagggaggtcagggcggtctcgatcttgaccctctcctcggtgtcgttcctggggccccccttgccctcctccagggtgttcacccgggacagcacctgcctctccagctcatcgatcttgctctgcagcagatccttgaggctgttggtctggctggaggaattgaggcggctgtactgctgcggggtgcaagggcgggggaaaccacaccgttaggcgaggcgcggggaccgtgctggaaggcccgcggcgcggtcccctctgggcgactgcgggggcggcctggcagggagctggggcgagtggccgccgcggggcctcgcaggcgcggggaggcaccggccgggcacccgcgcggctgaggcgagggcgggggatgcctggccgggtagggaacggggtgggggagggcagaggggcgagcgagccggagggggaaccggagccgagggcgcgcgcggacctcgaggttctccaggcgggttttgagcgattgcaaagtttgcccgagttggctgagcgtctcggcggccggtgtccgggacaggtcgcccatggtgttcttgcccgagccgggctgcttgcggccgccgcccgcccgggcctcgccggctccggggtccagcgtgctctggctctcgcagcggcccagcttggcggtcagctcgcggatggtctccttctggctcaggatggtctccttctgctgcagcaccgtctcgcggagctgcagcacgctgctccggagctcctcggcgccgccggcggccacggacgcggcgcacatgtcggcgtccacgggcaccgaggtgcagatgaagcgcgtcggcccgaaatcctgggccccggcgcccaggaggcagagggcgagcagcgcacaggtgcgcgcggcgcggccggccggcatggctgcgggcaccgggcgctccgggcccggctcggctcggctggggctcggctccggctgggacccggctcgggctgtggctccgcgagcggcccgcgctctgggcgccgcgctcttcggccgcgcggtccacaccgccgcgctatcaggcccccactgccgcctgcgctgcggagcccgcgccttttatgccgccgcgggaggggcctcgagccgccgacgtcagcgggggaggaatcccgctttaattgtccgcggcccgggcccgcggcgcggcgggggtctcacgagcgcgccaccggggctgcctccgctcgcgtcccccccgcccttctgggagctgccgcggccccctcctcccccgcccccgcctgggccggcgctgctgccccgaaggctccgagagctcagggggaaggaagtcgggctccggccccggactcgaggatggaccacctgcgtggtgtccccgaacctccgacggggctccaggcgggcgggaaaccaccgcgtccgggagatagaattcggttcggccctcctggctgcactgaacacccttgggccggggtcgtttggagccgggctgggtgcccaaggacccaggtcgtcaacacccgagtgcccggtggtcaacggctcggagtggggcctcgcggcgccactaagtccagagcgggggtcaccgggccgccccgcgtttcttagatgtccgtgtgctattgagaagccgccgggcagcctgggtacagggacttcccacgggtcggggcccccggcgcctcccctcccccagctcccgggctctgtggacccggccccgtccccgggggactgtcagtccccaccccgtgcgggcggggcgctggggacttctcggaggcagacctagctgatcgagcctttcctgtccgcggcgccggcccgatcgcgggcaggcggcgtcgccggggctggacgttcgcagcggcgcttcggaagggggccccgcgggagcagccgcccgcgtctccagcagcttccccttgccaggcgccgcgcgcgcccggtatccccgggtgtccacctgtgcgtggggggctgtttcccgtctgtccagccgcgcccacttctcaggcccaaaggccagcaggaagggtcccggaggtggctgggggcgtccacctgagaagctccgctctcgctcagacaccccacccggcacccgcgcactcgcgccttcatctggaccgcggggctcggctcccgagatcgcggtccgggttccggcgccgggctgggggctcaggaccagggctggcgcagccgccccgccccgccccgccccggggctatcagagcggtcaaagcctcggaaatccctccgtccacgctcccgtggtacagagaaggaaactgaggctccgagactgcggggccgggctacagccgtggccccccgacccctccccgccgcccccggcttctctggtctctgcgttctgcagcctttccctgcgcgcagccgggggctgggggtccccagccagcagggacccacgggcagtcccgggtgccgggatcgggcgtccgcccctcgggcgggagcagaggccggctcgatggagacctttttgagaaatggcggcctctacccgccccccagcccccgagcgcccgccgtctgcgttcagcatctcagcttttaagcctccctgagccggggctgcgttctcgttgtctccttcggccgccgcttcctggcgccagagggaccccgcggcccgcacgggcctgtcctcggctccgctcggagggtgtgcgggttcccgctccgctggccccgcttgcccaccacggcgcgcccaaacccacgcggcccgcggccccttgcgtgctctgccgaccccgggccgcaggaggggttagcctcgccggtccccacgcggggtctgcgccggcagcgccacgggctggaacgcgcctcgggagaaattacccgcgcggggtcgcggcgtcttctgccccaactcccgtagggagccgctaggcgggtgccctcctggccccagcgctttggcctcgccgccctcccgcacgcgtccagtggggaggccgcgcccgtcaggcctggagccggaccgtgcccagccgagagcgcgcgggcgcgggagaggagc

SEQ ID NO: 1244443 - DNA, 4001 bp, Homo sapiens
tggggtgcagttgctttggggagcccttagtaggcaaactgcagcttgtctggtggagatgggggtaagacaatgctcgcagaactaaggagagagaagcttggggaacaggaatttgtaatgtggggaagctgagtctaaatgcagtacggtgaagtaggtgcaaataagagtgaagtggaaaggagtgagaagggtggttaggggtgaggtctctttagggagtgtaaaacagaaggccatgaaaggtcaggaatggctccatgttactttgttttggtgatgggggagggggccgggcaggcggaccggaaaaggaggcaggcgggggcggtgagtcagcccagcttcacccagatctcggcggggcggggcagggcgggagctgggccctcagccggcctcacgtccctgctccacgtgtgcctctcgcacgtggctccccaacgaggaaccccggaactcgaggccccgccctcctcgcttcccgtcaatcgagagcagtcgccccgcctcctacccgcccttccccggccaccaggtcgtgggctggaccccgaacgatagcagggccaggacaacctaggggaggagagaagggaacacgcgttgccggggcgaccgggggggcggagctcattatgtaacgaggccgggaggcaacgaccaatggggtggcagccacggcttctgctgaatgaaaacaaacgcagcacgtgggcccggctctagagccatgtgagccctcccggcggccggagccctgtaggtgccctccctcgggccgggcaccacgctctggactcctcaagtgtcgctccctcctgtcactgaggattccccagtgagatccgaacgattctcccagcccctccttccctgaaccccatcgcgccactcttctcagattccctcgcgcctgcaggaactagaggagggggaagacaagaggggagggggtccgttttctgaggccaggcatactacagctgcaggtagtggacagatggggccgtttcggggcactgttccaaagctcccagtccccctaaattcttcgcttcaccacccgtacctcctctccatttcctcctgcccagggattcgaggctcaagggagctttgggactctgaggggtggtgatggggcgtttctgagagcatttccagcccgaacaagccgctctggaaatcccacactaaagcaccgcagcacgttagcaaatctccgggccgagggacaccccagtcccttacaaagttcctctttttataaggcgtagatggaggtggggagacagtgacagggaaaagatgatagtaaagaaatctcagtacctgtgttgttgttggagtccagggtcgtcatgtcttcaccagctgagagcggtcattcaaactggaccttgactcaaactagaggttgcgatcgccgctgttgccccctgggcactggctaagggcggggagtggaccccgcgactcacgatcaggatccgaagcaccctgcagcaaggtcttggggtggccggactgcagccctgcagaagggttggacgttgaggcaacggagttctgctttgcatgggaagagcagagagagtgtgtagggggaatcagcctgcagtagttctggctagaaggtagcaaggagggtcgggtctctgcagtgtacggggtgcctctgcctgccggctccgcagcgctgcggggtggcgaatctggagctcccggtgcaaaagtcccagaggaagagaggttgcaaccaggaagtaagtaggtgatggggagaaacggggcaccgagtcgcaaagaggcgagacgtgtgccctgctacgttccctcggcagtaatatttcactctgccaatctcagccgccttttgcccgagcctttccctgggacagagggctctgcgcaggcgccagcagcccagggttcccgggccgcacgcggcactggagcaggtaccatgtgatcccagggagcgcctcgtgccccagtgacacacttttccaacagccggcacgttgagctcttgcgcgcctgcgcaacgacaagactgtcgggatttgtagtccaccgacaaagtgggcggactgcgtgcctttcccctttctgcctggcaaagcgcttgccgggacctgggaggagctgagagtggggtggggtggggtgcgctgaagagtcagggtggcgtgtttagaaagcctgtatggcaggggcatgtgaatttctggggagggactggcaagcttgtttgctgtctgggagatcaaagctaagaggccctttctgcaaaccttgcaaacgtgagggcttcacgtgattgcaggactgacctcgtcctgaggttactggtgaccgggagagagagaagccggggagggagatttccctggagtcaggagcttaggctgccctctgcttcagggcaaagtccagagaaggaaaggaaatgtgaccccctttcccttctactcgccttagggagaacacctccaggggaaggagttcccacagaggtagggatgtctgtagggactccctgtttgcttgtatgacaccattccacccactccagttgactttggggtgagtcatttccctttgtctgggaaataaaaaggacaacagaggggaactaatagtgaaagtgctttgaggtcctaaagtaatggggaagaggtgaggcagggggtgggggcagagtgacacccctgcccctcggtgctggaggataaaatatgaattccacagaagattactactcagaggggaacatgtagatcatcttaagcctccctctttttactagtggggaacaggaagcttaggagaagtgaccgacccaaggtcagacgtccattgctagtttcatctgcccaccccgaatgggaaggtgggtagatgtacaagtgaaatactgaacaggggttagaaacagccagcattgccgggtgctttggctcatgcctgtaatcccagcactttgtgaggctgaggtgggttgatcacctgaggtcaggagtttgagaccagcctgaccaacacggtgaaaccacgtctctactaaaaatacaaaaattagccggatgtggtggtgggtgcctgtaatcccagctagtcaggaggctgaggcaggagaatcgctagaacccgggaggtggaggttgcagtgagccgagatcgccattgcactccggcctgggggatagagtgagactctgtctccaaaacaaacaaacaaaaaacagccagtatttcgcttcagagcagcaactgtcccatgagtaataacagatctcaagtagaggagatctatcatgttagagggcttgggtcatggaggggatggaagcttcttaggcagcgaagggagagggagcctgagccacctgctgctcccgctaattcctccccagtcccagtgcttctagagagggttttcttcacataggaagcccttctccacaggcagctcctgggatggtattgatggatgcctgggaaacatgaaagccaccgaaaaggtagagaaaaagaatatgggagtccgggggtggtggctgacacctgtaatcccagcattttgggaggctgaagtgggcagatcacctgaggtcaggagttcgagaccagcctggccaacatggtgaaaccccatctctactaaaaatacaaaaattagctgggcgtggtggcgcacgcctgtagtcccagccactcgggaggctgaggcaggagaattgcttgaacccaggagatggagattgcagtgagccgagatcatgccactgcacaacagcctgggcaacagggtgagagtccatctcaaagaaaaaaaaaaaaggccaagtgtggtggtggctcacacctgtaatcccagcacttggggaggccgaggcaggtggatcacccgaggtcaggagtttgagaccagcctggccaacatggagaaacctcgtctctactaaaaatacaaaaattagctgggcgtg

SEQ ID NO: 1244444 - DNA, 4001 bp, Homo sapiens
attttataatataggtttatgttagatgattttgcccaactgtaggctaatgtaagtgttctgtgcatgtgtaaggaaggcaggctaggctaagctatgatattcggtagatcgggtgtattaaatgcattttcaacttctgatactttcagcttacaatgggtttatcggaaggtagccccatcgttaagtcgaggagtatctacacaagttaggtgggctaagatcctgggttcggagttgaaaaagctgcgtttcgggaccttgattttaaataagcagttggacatattaacctgaaacttaaagggcaggtctggactgggggtaaaatattgagaatcactggcatatagacagttgtagctatgggcttagaagaaattgcctgagcgggaaattgagagtgagaagacggcctttgaggaataccagcaatgaataacaaagtagaggagggtgaggccgcaaaagagaggtctgagtcaaaccaggagcgaggcattccagaacacatgtgaagagtgctttccgtcaaggaagccatggtcaacaacgtcaaacgctgctgagatatcaaataagataaggattgaaaggtatcaattaagttgagggacaggtttcagtgggatgatggggcagaaatcagactgcagtaggttgaagggtgagtaggtggtaagcaaatggaagacaataaatatagacaactctatcaaatttcctgctgtaaactgggacgggaaaaggtgacagctgtgggggtgggggaagggtttaagatagagaagcttgattatgttaagaaggagcaggtgaatatacagatagggtctgaagtactggcagaaggactagccttaaaaggagaggccatggggaaaaggaagagaaagaagccaaactaaatgacctttaagatcccttcttactctagaatctcatgacctacaagtcccttcagatagggcatttgcatatatgcataaatctatgcaaacttattcaaaaattctgttataaatagatcagtcaatcacatctttcacccccaatgacgcagttaatgtcctcaggtttatgaccagtgtaatctccgggcaggactcatcccttgagagcttttagctcaaggcagactgcaatacagcactcaaccagctctctctcctcgccaaacccatcctacccaacgatcctaaaggctaaaggaggaagtaaatttaaaaccctgaaactacagcatatcctgctgcattcgaagcgagtgtcatccataaaaacaaaacgtgacaccccaaatccatcctcactccaagctaaagccaattcctgcctgacccgacagttgacaggtcccccagatggccgggctttaacactaaaagtcattggcaccccctcctctttcccaacgacctttaatttgtgaagagccagacatgggttcctgaagatccttcctacaccccttgccccgaatgcagcagaggtgctcccggcagttactccggcgccccctaataagccctcgcaagggggtgcggaaagacccccagagcccgtcagagggggcttcggcgaccgcgaccctgcggctgtgtggaggacgagggaacaagccccaagggatgggaagggaggatgacgggaggcgcagcagacgcgtgtaacgaggggtcatctcccctcgaggggggtggagttgttgaggagggctaatcccctgccaccgctcccctgctaccctcaagtcccgctctggcctcgcgccccattgctcggattcactcccactcctctggggccgcctggaccccagagtgcccgcgagcccggcgcccctgcctcaagcctgggctcccagaccggcactcacccggcccgccatcttcgcggacacgtccggctcggcggctgcagctctgcgctcggcaaagcccgcccccgccgcgcgcgcgcccccgccgcccgccctcgcgcaggcgtgcaaccgccgtgaggacgcgcgcgtccctggccgcgtccccggcgtcctcgctccacagggcgcgcgcgcgggctcggcggccgcctggggtgcgcggggtgggcagagcggcggcgccattttggctggagctgcggggctgtggtgggtgactccgtttccaacgtgcgtgtcagtccgccggggcctggagggctgcgcctgcgagtctcatcccccactggcggttcgcgccggaatttgtctcaagggctttaatgcttcggatcacttatccctttgccagctgctgttcgccctcgaatgtccattttggtctgtgcttccacactctctttaaacatggtcttgctgatgagagcgcccggcgcgttccctggcttcccccaaaaaagatcagctccgaggagttggttctgagttcaaattctccatgaattttctcacttttctttgtaggcgtacttgttttcctagttgctggaattgtcatcgttggcagttttatttatgtgtagcctggaaaactcagtattttcagatttgaaagtgaattgtgattatttttatacattatttttattaaatatttgtctttatttaataaaggcaacttgcatcttcgaccaaccttttcattccccagtgttgtttcattttagacaatatatatggtagaatctgaataaaatatgccctaaattgagccttgttgaacctcaatgtttccaccataccatttctccactggaatctcagaatatctaactgcaagcacgctgagaggagaaagattctgccgaatggattccctgatgcttttatttaccccactatcatatctctcttcatatttgcacaagacaatagggaatgataggatttgttcgctttcatttctcacaattagaataaatcggggtttttttcccaacatgaggaaagaagggaaataactagaagagctgagcatgcatagtgatttaaatttgagaactaataaaatcagacagtgacctgaagatgaactagggacagaagaaaaaattcatgccagccaggcgcggtggctcatgcctgtaatccaagcactttgggtggatcacctaaggtcaggagttccagaccggcctggccaatatagtgaaaccccgtctctactaaaaatacaaaaattagccgggcgtggtggcgggcgcctgtgatctcagctactcaggaggctgaggtgggagaatcgcttgaaccccggaggcagaggttgaagtgagttgagattgcgaggctgggcaacagagcgagactccgtctaaaaaaaaaaaaaaaaaaaaaaaaattcacgcctatttcattaagtctcacactgaacctgaggaccagggtgcttggttgaccaaatcagatgttagctaaatcatgggtgggtcggagaggttatcaggaaagataggaaactagttgagttctgacatactaacgtgcagaagctactaacttacaaaaacaaatattagaatggcttggggagtccaaagggttaggttcttttctttgtccctatctacccatcacctgtgtaccttcatctctctgagcccagtttccttatttgtttttgtttgtttgtttttgagacgcagtcttactctgtcacccaggctggagcacagtggcatgatctcggctcactgcaacctccgcctcccgggttctagctattctcctgtctcagcctcccaagtcgctggtattacaggcgcctgccaccacacccagctaatttttgtatttttagtagagacagggttttgccatgttgtccaggctggtctcgaactcttgacctcaggtgatccactggccttgtcctcccaaagtgctgggattacagaagtgagccaccacgcctggcctagtttccttatttgtacagtgagaggtataattaaataagcttaacagttgtatccttttttttttttttgacaccttgactttgaacctagaa

SEQ ID NO: 1244445 - DNA, 4001 bp, Homo sapiens
cattgcactccagcctgggcaactgagcaagacactgtttcaaaaaaaaaaaaaaaaagagaaaagaaaagcacacatttgggattgtttctgatatataactgtgggtttcacagaagtagttttggctgctaaaatagaaaatgttgatattagatgttactgtagtactatcaagagtaactattcactaccacgattataactgagcaattacatttggcagacactgaatttaaaaaaaaagtagcgttgttaagaactgttatatagtgatcttagctcatggttaacaaattaaaaactgctttgctaataaaaatttgtagaaaattggtgacatcttaataactcatacctagggatctttacaccaacaattttgttatgacaatttcagtagtctgaaaagaccgtgtatttgtttaaaggtaaagtttgcagcttttagagggaaaaaaatctttaaaaaatcggtggagctgctttctttacaccttcctttttgacaattctgtaaattatactccactgtactgacaaataacaaaggcaaaggtatcagagtcacaagttcaatttttaaaaaatttacatttccaaccatgcacgagtaaaacataggtttccttacctcatcatcatcatcagaatcattcccaaacactgatggtttttgcaaaacagggtgcaactgctgtgttttctttggcaaaataagcccatacctgcatatattttttttgaaatagaaattaaacctttatgtttaaatgttaacaaatacatctactacctcttccacatgaagctaccaaatcaaaacatgtcataagctttatgaacacgtaacagactgtttttgcttctcagtgatctcaaaattctaacatgccgtaagattctataattactactctaagtgatcatttgtggacacgggccaaactcgaataccatttttatcaaagaagagaagtaaatgaaaagttcagaaatgttttaagatggcgaagtgacagtaacatttaaaaaaaaaaaaaaaaaacatgtgtagtggaaagtttagttcatgtccactaaagattttaaaatgctttcaactatccttgtggtctaaacagtcaagaaaatggctagattttttttcctactgtgtacttacacagtttctaagaactgactggatagtgtaactcacgaaaatttttaaaagataactgagaaacccaagtagccatggggcaagttcgcattacactttattaagatcatgtgctttgcctcggagcatctgagagaaccatcccatcagatccaactcctttagtttctcacgttttggcctttaagatgcggagatcacgggaggccgcatcaaaagtaaggattacacatcaaaggtaaaactttcaagtacgtacagtatttgtctcttttgcggcaacgtataccccaatttcctatatgcctaccctttttctgtggcttctcagaacaatattcctaaaacgagaaggaagggcgggaatcaggacttgagcttctgccaaggagaacaaggccctctaaggaagccaggaactgtctctcttcacactgcccctgagagcatccaagcggggagaaactcaagcgcgggttaggaagcaagactgaggggcctcagaccgagcttttggaaaatagaaaagtctcgctctctgcccctcagcctaacttcctttatttcctcacaagtttctccctcaaacttcgggcttccatccgggaaaatgtacgggggaggggaatctatgttcctcaggacttctcgttttttcccgtctctacccttgacgacacagtcccttcacttccagcgcatttaaaactcctcggccaaagatacagtcgccgtagtttctcatcccccagcctgaccctaactcccggatcactcactgcctgcccggaatcgccatcttgctcccgtgtccgctgaacgtggccgacgcctccgtgacgctgacgccgatgtcgtcacgtaaactctcgcgcggctttgggtggcccggatcctgcttgtcggttgaatcgctggtttgagtcacttctatggtactgggaatcggatccagtgacctctgttttgtttcggagcccaccggctgcctcaaaatctgtaggagaaaggaatgacaacgttctaggccagttgttcgcagtgtgtggttctgggaccagcggcatcagcaacaccggagatactgttaaaatgacaaattctcgggccctaccccaaacctgcagaatcagaaactttggagtgaagcgagttatctgaattttaaccagcgggtaattctgataaagtttgaaaaccactgccatggctatcgatattccccctacccccttccaagtgttcactttaactggttcaggataattaggcgaaaaatgaaaatctgtgtattaataataccttacataggaccaaaattattattaaaaaaaaaattttttttttgagacggagtttcgctcttgttgcccaggctagagtgcaaaggcgcgaactcggttacctcaacctccgcctcccgggttcaagcgattctcctgcctcagcctcccgagtagctgggattacaggcatgtgccaccacgcccggctaagtttgtatttttagtagagacggggtttctccatgttggtcaggctggtctcgaactcccgacctcgggtgatccgcccgactcggcctcccaaattgctgggattacaggcatgagccaccgcgcccggcccaaggaccaaaattattaataatactgttcacgggccattgggtataggaatcaggatcatatatgatacttttttttttttttttttttttttgagacgtagtctcgctcttgtcgcccaggctggagtgcagtggcataatcttggctcactgcaacctccgcctcccaggttcaggcgattctcctgcctcagcctcctgagtagctgagattacaggcgtccgccaccatgcctggctaatttttgtatttttttagtagaggcggggtttcaccatgttggccaggctggtctcaaactcctgacctcatgtgacccacccgcctcagcctcccaaagtgctgggattacaggcgtgagccaccgtgcctggcccatatatgatacctttttgaaaactctgcccacatctgtgcactcattcactcttggttcattcccagctagtctcagagcagccaaagagatcaattactgagataaggatgttgaaatctccaactataattgcgaatttgcttctcctttcaattctatcagtttgtgtcgtgtattttgaaattaggtatgtaaacatttaggattgttacgttctcttgcattaacctctactaacctctatagcattaagaagtggccctctttattcctttattcttctttgtctgcttggtctgctatcaatataactagctttcttttgattaatgctagcatagtgtatctttttcaacccattttaatctatttgtgtatttacattcaaattggatcacttgttgacagaaaatagttgggtcttgcttttttatccagtctgacagtctcttccatttaatttggatgcttaaaacattttcattaaagtgactatgattgcaggctgggtggggtggctcaggcctgtagtcccaacactttgggaggttgaggccagcatgcacaacatagccagaccccatctcaaaaaaaaaaaaaaaaagtatgattgctatttgttttctatttttcccaactgtgattcagcttatgattttcatgcttcagcctcctttgttggtttattgaccatacttctttgcttgttatataagctgttgctttagggtttctaatatatgtcttaaacttatcacaatctgccttaaagtaagaatctaccactttgtgtatagtataagaagcttagaaaagtatacttcca

SEQ ID NO: 1244446 - DNA, 4001 bp, Homo sapiens
caccccatggccccggctgaaagcttcggccctcctctgctgtcactcaatgatggggagccctaccccagaagtgtatcccacgagggcatcagggacgcagtgagtgttgctcaagggagtcaggaagagacggcaacgtaaaggatgtggctccatgtccatggtgccccctggtcaacataaggagcgtgggatccgatggaaaggtggagctcagggaaaatgggggtccttgcctctcgtgtaccccctcaaggctgaccccttagatggcccaggaatggcaggtgctacaaaaatggtacccacgtgggcatggaaatggggcagattaggggaccactggactcagaggggagggaagggctcatcagcacccgctcagggagcctgtccctttatgttcccaaataaagggtcctagaagactagaaagccaaggtcttttattaaaggtcccgactggttttcccactgtatttccatgccagccagggtccagggacagcctctcgggaggtaccgggtggctgggcctggggcccggtagcacagcgcttaacggtatctgcctgctccactccacggggccagaggcaccagcacgatgccgccccgactcggctctgcggtggcccctgtgggcctgcccttcctttagctccagctgctgcccgcggcatccccgctcattcccgctgcgcagctccgcgcttgctatctaagatctccctccagttgtcactccaggagagcagccgtctccttgtcgggggcaggaccaggtgccgattgtggcagcaggtgaacaagatgtgctcccagcttggggtctcctcctggcctaggacagtgaaagacagcgcgctgccatctgtcatgggtattattactccctctccctaatccgggcaggccagaggcctggaggctgccaaggataacgggtccaacctcgaactgtgtccttgtcatcaatgagcaggtcccccaagaccaccgtcttgtcccttgtcaggataattcgttctacgaactggggccccaggtgctgctccacccagcggtactgtgtagaaaacacagtctgtgagtagggcctgatggaagccggaattcagggatagggacttggctctaagcccttgagagccccccacccccaccttctgggtttctggtggtttctttttaaaatcaggatttaggcagctccacgtgcggagtaggggcggggcagccacaccttctcacccacacagtggtggtacttcagcagggggctggtgcagatgaagacctgcgtgctgcggagaaggacgcggttaccgccgggagccaggagcccgcccaggactccgcccgcccccctctctccttactccggtaggtcgttcatctcccgcacagcgtccaaggctcccgggatgggctccaggtccaggaaaaagcccggggcttcgtacacactggccactttatcctgaaagacaagagttctgggtcccggcttcccgttcccgcgaggacccgcagggaggctcctgggggctccgggcccgagctcagaggggcggagggggcgtcggtcaggggcacgcgcccaaaggctcctccccagggtgcgctgcccgcgggttccagggtgagagctctgcgcccttcacagagaagggggagacccccggaacggagcgagcgggccctgcccgggtggggaccctgcgccccctaccgccaggtcgggccgcagggcgcggtactgctcgcgggccaggaagccgcggcgttgctccagcggcacgtgcggctcctcagggaagcggcggcggaagccccgcaggaggccggcctcgaagtcggccaggacgccgtccatgtccaccagcacgcgcacgctccgcgccatcgccgccgggccggagctgcgagctctcggggtctggggggcgcgggctcggccggaagcggagggagcgctgcttccggagtccgccgggctgatttgcatagagtgtccgggccgccccgcccaggtcgtaaaccagtgccgacggccctgcggttgcgcgaggccatcctagggttcgggtgcagggacggctttggggggcacttttctgaccctgcgcttcttcgggacccagcctttgtccccatcagccgcctcccactttacggcagacgtacccccgttcaccccacgttactagtaggggaccgaccttccgggggcccaacaaagggatgctctgaaatactgggaagcatctaacgaggagtcaagggtcctaaacccgtggggctagctccacattttttttctttttttctttttttttttttttattttgagacggagtctggctctgtcgcccaggctgcggcgcagtggcggcgcgatctcggctcactgcagcctccgcttcccgggttcaaccgattctcttgcttcagcctcccgagtagctgggattacaggcacccgccaccacgcctggctaatttttgtagttttagtagagacggggtttcgccatgttggtcaggctggtttcaaactcctgacctcaagtgatctgcctgccttggcctcccaaagtgttgggattataggcttgagccaccgcacctggccaaagtcttattaccgcagtaccgtggtctcagtggattgctttcgtctgtgcagtggagcaggaacaatccctcgaggactacaaagtgaaatgaatctgttaactggtttgtgtaagtctagctcgttaagagactaattcacactagagttggcttgaaacatgggagcttcaagtgtggtttcccccggaaagatgattttgatcaagcacaggtaatcaggactgtcctcaggactttatgtggaactgacatcgcttacctactcccgtctagaaaatgctgaacagggccaggtgcggtggctcacgcctataatcccagcactttgggaggccgtggcgggcggatcatctgaggtcgggagttcaagaccagcctgaccaacatggagaaatcctgtcgctactaaaaatacaaaattagcgtggtggcacatgcttgtaatcccagctacccgggaggctgaggcaggagaatctcttgaatccaggaggcagaggttgcggtgagccgagatcatgccattgccctccagcctgggcagcaagaacaaaactccttctcaaaaaaaaaaaaaaaaaaaaagaacatgctgaactgtgatacattttgttgactcttctttttgtggatgtcatgaaacttcctgactccactcaaatctatttgcctacaaactataaagccaggcgccgtggctcaggctggtaatcccagcactttgggaggcccaggtgggagacagcttgagcccaggagttcaagaccagcctgagcaacacagggagaccctgtctctacaataaacaaatcaataagctgggtatggtggcgcatgcctgtggtcctagctactcatgagccttaggtgggaggaacccttgagcccaggaaattgaggctacacagccttcatcctgccactgcactccagcctgggtgacagagggagtccctgttgggggaggggagagccaaaattataaacacagatttaagtggcccatctcgccattgttccccatctgatgaacccactgcttccaaatatatgtaacagaggctgggcacggtagctcacgcctgtaatcccagcactttgggaggctgaggcgggcggatcatgaggtcaggagatcaggaccatcctggctaacacggtgaaaccctgtctctactaaaaatacaaaaaaaaaaaaaaaattagctgggcatggtggcgggtgactgtagtcccagctactcaggaggctgaggtaggagaatggcatgaacccgggaggcagagattacagtgagccaagaccacgccactgcactccagcctgggccacagcgagactccgtctcaaaca

SEQ ID NO: 1244447 - DNA, 4001 bp, Homo sapiens
ggtaatcccagctactcgagaggctgaggcatgagaattgcttgaaccgaggttgcagtgagctgagattatgccactccagcctgggccatagagcaagactctgtctcaaaaaaaaaaatacacacacacacacacacacacacacacacactagaacccaacagaagaatataaattttcttttaaaaaggccaggtgtggtagctcatgcctataagcccagcactttggggaggctgaggaaggaggattgcttgagctcaggagttcaagaccaacctaggcaacatagtgagaccccatctctacaaaaaatttttaaaattagctaggtgtaatgttacatgcttgtagttccagctactcagtagggctgaggcaggaggatcacttgagcctaggaggtcaaggctgcagtgaacaaagatcaagccattgcactccagcctgggtgatagagtgagaccctgtctcaaaacaaacaaacaaacaagctctgccatttggctgtatgaccctgggtaagttgctgaacctccagaatgttcaaatctcttgtaaactctatagccaacagtaaatataatgtccagttccaaccattaatcatcatatgtcctggccagtaaggaaaagctgtcttaatgtattaaaactagaccctccttagcaaaacaacaagtttttaaaaattaattttctaaggtctctatactggaatctttggttccaatcaggaaccatttgaagtagcaaatgacaaccatttctgagcaaaggacgggagcaacccacctctttccgacactcctcactgatgatcttgctattatccagaatatctggaaaaagagaaaactccttttacttgtcccttagaacccatcgtcttgtcaagctcaacaagggaagctagaatgtgacttactgtaagaagaagggcatcgctttccattatatgcaaacctgctcaaggtcatgtcaaaatcagaaatcacctataaggcaaaagagagatgatgcctaaataggcaccagaattctagtgtggccctgcctcagcctgggggatgattatggaaatcaatacagctcagtggccaggatgtaggcaaagccctaggggagttaccgagtgacacagagggatagaggggaagtgatcctaattagtacccgttaaccctgaggaaaacgcagtctcctagtgtgggggcaagggtgaatactcaggacccctctgactccttcaatatcaggtccctcctaagagatctctaccattacggcccatctggacatcttcaacttactggggagccgctggcttggggaggataaggccctaggtactggtgtgggcgccttctgtccaattagaggaagcagcatgaccatattgagaaatctgaaatttgggttttaggacaggcgaaccaacccgctctccttcaagctcccggccatttcttggggcagagagctaggaggggtccgcggcagagcaaagcgggaaggcccaatgggcaggaagcctctccagccgcccccagcccggccggcccccgcacgccccagaggtacctgtaaccggtctccgccgcccttgcggagggcgcccacgatctcctgcacccgcccaggctgccgcatcaggaccgtggccttcatcagggtgctcacctgtcccgagacccgagagaaccactgacccctgcgccacgctgggcccgaggggagcccggggctcgctcgggcgcgcgtgtgaggcggggccggggtgcgcgagggggcggctactggcctgggtgaagcggcggtgcctcggtgaccagctggggggctcgaagcgccccgggggtcggagtccgggcccgccccactccggacgcttcctccctcctcacctcctctgccatcccgttcgaggcctggtcggcggctcgcgggacaacgacagccccgcgaccgcactgcgcaggcgtcgcctcccgcctggagcccgggcgggggttggtggggccgggggcggggcgggggtggggccgagaatcgagcggtcccggagatggccgcgatccgggtgggcttgccggttgcgctaggcaaactggaggagggttctatttattatgaagagcagggtgaaggtcccaaggtgttggggttacgtgggtaggtagggttctgccactctttgtggaggaaaagccttgccaaacgtggtcatttccaggctgaaagtttgtgacaaaaacatgactggggctgggcgcggtggcccatacctgtaatcccaggactttgggaggccgaggcaggatgatcgcttgagccgaagagttcgagaccagcctgggcaatatgacgaaaccctgtctctacaaaaaatacaaaaattagccgggcatggtgacacgcacctgttgtagtcccagctactcgggaggctgaggcacgaggatcacttgagcccgggagatccaggctccagtaggccgagatcataccactgcactccaccctgggtgacagatgacaccctgtctcagaaacaaaaacagaaaaaccacacggctggatgggaggagagatgaaggagccataaactgaattctgttaatcacccagaaagggctctgttaactaggccattcctcattccagaagaaactgagtgactaacccatccagcgggctgggagacccgggacagctttctgaaatgtaatcagcgttggctgggcacggtgcggagcacttgtaatcccagctattcaggaggctgaggtgggaggatcacttaagcccaggaggtcgaggctgtagtgagttatgatcacaccactgcactccagcctgggtgagagagcgagacccgtccctagaaaaagaaagattttttttttgagatggagtctcactctgtcgccaggctggagtgcagtggagcgatctcggctcactacaacctccatctcctgggttgaagcgattctcctgcctcagcctcccaagtagctgggactacaggcatgtgccaccacgcccagctaatttttgtatttttagtagagacgaggtttcaccatgttggccaggatggccttgatctcttgaccttgtgatccatccacctcgtgctgggattacaggtgtgagccactgcgcccggcctaagaaagaaatttaatcagttttacttctcccttcagcctcaattgacttggatttccttgagttcggtgtctagggagccaagtgttgggctgtggaaggtagatgaatgctccagggatagagacctgtatcaggtgagtaacaggagctggaatcaataaacactcagatggtgctagtggtcatggttctgttttgggttcaaggacacagaaggaggtgtgaggtggttttcagcctaagtggggtggtaaggaggggagaaggaagaggacaagtccaggaggcagttccagaacctgagagcacaatcctgtgtgatctcactgcagggccaggattctggaacttgggttgcctgatagaccctatacaaaagatgtagtagggaaaaggagcgacagctggctaaaggggccccccacaaccctccccgacaccctaggaaagcagcctctctccgctgtcccagggtgccatggagatggagagcgcggcggcctccacacgtttccaccagcctcacatggagaggaagatgagtgcgatggcctgtgagatcttcaacgagcttagactagagggcaagctctgcgacgtggtcatcaaggtcaatggctttgagttcagtgcccataagaacatcctctgtagctgcagttcctactttaggtataacagggttgccaaattcagccaaaggggtaattgggctcattttgagacactttgatccattttctgtttcccaccccatcaccttaactttagggacactgtcaaagctctgggctccttaaaaattaaaaaaaaatttt

SEQ ID NO: 1244448 - DNA, 4001 bp, Homo sapiens
agcttggggtaggcccagggatgtccacagcagcaagccgtgcctcaggaagggaagtagtggaagccagcagattactcccaaggcaccctccttactgccccgtgcctttgccttgtgcttggaaaccagtaaccccacacgtacagagcctacatatttgcacaaagaactggaaaagctgctgcacttttcggagttgggggtgggcttggtttccacgttaatacactcccgggcggatatatggtgtccagactccccatgccgagcgctgcctataaatgaacactcgccacacactggagcctattcctgaggctgcagaaagtaccagggcattttctccagtttaaagtttatcattaggcatccgctgtagaagagctcagcacactgggctctgtgaaagtcaccttctgaagtgcctggtgttgatggagacaaacggtacttggtttccttttttaacacctgtccctcaacaaaccacattactgatgaggcatctttctgatgtcagaagaaatgtcacttgttagagacagtagtacagagaacaggactgtggagtggggagcactaactgtgcttgggaggcagacagacttgggtttgagtcctgactgagcccctgagcagcatgtgacttggggcaagtttcctcatctggaaaacagagataataatatctacccaacaaaagagaggatgcagtgaacttgtggctaaaaaacgggctcttgtaacttccttctcctctttatcaaaccctccagcagcaaccctaggtggccaatcaagggatgccaaaaaacactcagcctctttaattttgtgcataccaaaatcccctgttccttttgcaaaatacttcaaatttaccaaccaagatctgtgtgtaaacgtccctccttggatctttcccctctatccatcctggacagaacacctcgggagtcggatggtaggggttgagctcaggtgttcagcaaggccagctctgcaaggggataagacatgaggtggatcccacctcacctggaccactgactcactgtgtgacccccagaaagtcacacaacctctctgggcctcaaatacccctggaagctatgctttcatggacaacagtaaaaaagatgggtaaagacacccatcaaagtcctggggacaaagaagtgggaatgtgactgcggtcggggtgaaagaggacaacttataacgtttatttttctaaaaatttaacaaacgacttgaggccaaatatgccacaaattttgaagtcagctttaaatgcagagttaggtatattaacactttgtactctcccgcattttcagaaaccttggatggcagccaacagatcctgagcgcggggccgcatcttcccggtgcgctgtggcccctagtcccccccagaccctattctatcagagggccaccccgaggctggggcgctgaccgtccaaggtcaccggcgcaggggcggtgtctggggctcggggcgagaaggaggcccggcgcggggcggggcggggacgctcacgctcagccctggccgcaggcggccgtactgctccgacacccagaagccgcgccggtcctccagcgcgatgaagggctggtcgggaaagcgcgcgcggaacttcctgaggaatccgccctcgaagtcagccagcacgccgtccatgtccaccagcacccgtagggcgcggcctcccgccaggcccagcccgcccgccgccccgcgccgccccgcgggaaccgccgcgctgcagagccgccgcgcacaccagccgcccagccggatcatggcccagcgcgctggcccgtcgtgggcgcggggacctgggccgcgccgtgctgccggagccggccagacattcccgccgcggaggagaagcccccaacgctggggcgcgcgtggagcgcgggacggggagcggggcggggagcgcggggtgcgggcgcgcaagtaccggccccagagcgaggccgcggcgcgcgcggtccctaaaggaacacgcgccggcggaggcggagccccggggcggggcttcgaggacggacagcggtaagcgccgcgcgcctccagaaggtccgcgctcccgcgctgtcgatttgcgtcttctccgtggaccctgggcccgggctgccttctcccactgcacagactaccatggaggagcagtgcaaaccgagaagcaggcctgtgtcgttagacatttttgagcactaactgtgtcgagtgtgaaccaaatagacaaagttcctgccatcctggaacttacgttttagaaggggatccagacaacaggatggaggaacaaaaacagggtgcactctgaaagcctctctgctttatttacagcaaatgtctgcggagagactgatagaaccaatatctgctaacatcatacagccttagtaaaactgatgattctcaggtaaatatatgaataaatattaagtacccctgtattgcttttttttttttttttttttggagacggggtcttgctctgttacccagggtggaagcagtggcatgatctcggttccctgcagccttgagtttctgggcccaagggatcgtcctgcttctgcctcctgagtagctgggaccacaggggcctgccaccacaccctggtaatttttttttttttttttttttttttgagacaggagtcttcctatgttgggctcaaacgatcctcccacctcagcctcccaaagtgctgggattacaggcgtgagccaccgcgcccggcctcttttcaacttttaagtacagggatacatgtgcagatttgttatataaattgactgtcttgggggtttagtgtacagattattattacccaggtaataagcgtagttcctgataggtagtttttccatcctcaccctcctcccactctccaccctcaagtaggtcaccgtgtctgttgtccccatcattacgtccatgtttacttaatgtttagttcccgcttttaagtgagagcatgaggtatttaattttctgttcctgtgtttgcttaggataattgtctccagctccatccatatggctgcaaaagacatgatcttattctttttttatgactgtgaagtattctatggtatatatgtaccacattctctcccttttttttttttttttcttgatagggagtcttgctcttgttgcccaggctggagtgcagtggcaggatctcggctcactgcaacctccacctcccaggttcaagcgattcccctgcctcagcctcccaagtggctgggattacaggcgcccaccaccacacccagcttttttgcatttttagtagagacagggtttcactatgttagccaggctgatctccaactcctgaccttgtgatctgcccgcctcggcctcccaaagtgccggggttacaggtgtgagccaccgcacccggccgatttttgtatttttagtagagacagggtttcaccatgttggccaggctggcctcaaactcctgacctcaggtgatccgccccacccccctcggcctcccaaagtgctgggattaaaggcgtgagccactgcacccagcctgtgttacagctcttttagccccaccatttggcaggtcccgagttcttgtcctgcatccaggaagaatggggtaggcagacaagtggagagtgagcaagacgaagaggagctttattgagcaacagaatacttcagaagagacctgcagtgggcagctcctctccatagccagggtttccccacaagtgttcagctttcagcagagagggtagctcctctctggtaggcagttcatcccaacaagtgtccagctctcagcagaaagggtagttcctctctgcagctggttttctccccatctacccgtcctctctttgagtctggctgagtccagggttttttatggacctcagaggggaagaagtgagtgctgattggtccatgggcggccataggtggccatgagca

SEQ ID NO: 1244449 - DNA, 4001 bp, Homo sapiens
ctgctctgagccctcccgggtcccgggcatcggcgaacgcgcctcccgccgttccctcgacccgcgctcctatgaactcgccgctgcgaggcccagcagctcccgcccgcggccccacccgccgccggctccgccgccgcaccccactcacccacgcactcgttggcttcgcgggctgtggcgcgctgccagggccggtcgtagtggaagggcttgcagcggtcgcactccgggccggccgtgttgtgcctgcagtcgcacaccaggctgtcgtcgcggtcgcgcacgcagcgggccgcgtggccgttgcacttgcaccggccgcccacctgcaggtcggacaccgcgtagaagtacgagtcgcgcgccagctccgagtcgtcctcgttctcgtcgccgaacgtgtgcaggcggctgaaggccacgcggatgtctgtggccgtgacccagtcctgcagcacgggcgagttgtcgaagtcgtgcgccgagggccgcccgtccagcgtgctgaaggcgatgaggccgcccgagagcgggcgcatgtcggtgtgcgagtcggtgcacacggcctcctgctcgttctgcttggtgatgggcgcgcggtgcggccggttgtacatcttgcggcactgcgtggagtagaactggaagggcacccacgtgcgcccgtagtccatggacttgtagatggccatggactcgggccgcggcgagcagaactgcaggctcacgtaggtcacttcgaacttcttgccgagggacagtgtgagcgtgacgttgtgcgggaactgcaggtagttctcggactgccagcacgtcaggttgtgcgggttgttgaggtcggtgaggaaggcgggcgggtgcgccttcttggggtcggacgcgttgcagaggtggcacgagcgcagccgctcctcgccgcgctcgctcaccacgcagtagcgcgccgggggccggccgcaggtgctggacacgcgcacgtccttgccgaaggccgcattgacaaagtccgggatgcagcggcgcgggtggccgttctcgtccgagcagggatcgggctgcgccgcctggcccgcgaacatgctgagcccgggcccgccgcgcaccgcgcccaccaggcacgccaccgccgccagcgccgccagcgcctcccacactgcgcgcatcatgctgcgtccagcttgccccggccctgccgcgccgaggatctgtccgcctgccgcagaaggcgcctgcggagagaagggagctgcgctcagccagcccgccccgcgccctccagctctcggcggggtggcgagcggagatgcgggagaacgcccggcttcctgggcacccaccccgcagccgactgcccgcctctctcccccaaagtcccgcgggcggcgaagccggggccctccaagtccgcaccgctcgcgccccttcttccccgcccggcgggagaacgctctgcttccccgccaccgccgcccccacgccgcccgaggggcatgcctgagccggtctccccgtccgcgaccagcccccctcgcaccccaagtttcgggcgcaggagagctgggggaccccgactctgcacggcccgcgccccttcgtctcgcagcccggggtccctctcagatgccccccgatcgcgtccccgccggaaagtccgcgttcgggactttacctctggagggggcaaaagagaaagaaaagtttgcctggcccctccggggagcccgcgcgccggtcgccggagagcctctcgctcgctgctagcaggcgcgtcccgcctcagcgcgggcttgccagctccatgcccggcgcggccgccgctgccccagccccagccccggtcccggccccgccgccgcctctctcgcccgagtgactacgcggccgcccggctcccgccgctcccgccgagctcggagtgctgccctgcccgcgcccggggcgcacacacactcacgctggccggcgcgcactcacacacacgcgcgctcgcccccgaaggctccgccgccgccgccactcgcgctgggagtgaggggcggaggggagcgcgggggcggggggcggggccgccgggcggggcgccggccaataacgtccgcgagctgccgccagctccgagcaaagttttcaccccgggaaagaagaaagttaaagggaaccggcccggacgcccgagagggagagcacaggcgggtgggaacccgggagcccgagaaagaacagcagagacaaagagaaagcgaggagagcacccggggaaaccccggagagggggctgggccgggccaggcgcgcaccccgtgggggaggaggggccgccggggactgtcagcctcgcccgcgccccgcgccgcccggagagcctcacgcccgggggagcgcgcgggcgggggaagggggccactttctccctcccggtcccagccaaacacatctgtgtttgttttctttgctgcgcggaggtcgggccttcctctaacccagcctgatggcccccggtggcaccgcgcacagggctgtgcccctgtgggcacgcagcccgggagcgtgaggaagaggaggaggatgtgacctctgcctgctctccatttttgcccgaagcccccggggtccggcgaggaggggctgctcgcccgcactcccacggatatcaccgtgcgtgagcctgtctgtcgggaacgcggcttcgttctagccaagggagcagtggtgggcaggaggctgaaggggtaggaagctggcagcacctggacgctggccaccgcccctccaagacgggcctgcctggtctcaggcatggggacagcccagccctccccagatcccctgaggcaggcgtatcggtacttcctcaaccgcatttttaagggtgcaaagccctgtaatagctcatgggacctccacagcagctttgctgttgtattaactccattttgcagatgaggaaactgagggtcccgggagctgaagaaactcgcacaagatcaacccccaagtaaacatcaaaaacaggaagagaagcctgggctccttccactgcagggcattcgtcaaatgcataaccttgccgaatgatggtgtcatggggcatctgcggggccacccagcccctccttgcctcattctccatcgccccaataaaaagactgaggacagtgacagcatcctttggtcatcttgcaacagcagccagagagctctgggaaaggaatacactgggccgagagtttggaacggaatctctgctcgtttatttgttacttgtagatgtgtggtccagtaatagacccggatgaaaagccccaggtcctggttccggcccaagggctgccttgctgcattagctccattaagtgcctcagtttgtcttattggcattttcataaaccctgagaatctaagaaggggcctcggggctcgtctggcccagctccgtctccttggaagaaggccttccccagcctcccagagagacggccacccaagccagctcttccagggatgggagctcaccacagctcaagaaaataaatccattccattgcaggacagcctggattcatcttcttaccccggggtagcaatttagctgtgccttcttgtgccgtttaccacactctgcactgtttatttatgccttacctcaccttgtggcagaaaggatttcaggtaacttacaagggtacataaaatatgacacaataacaaattaaaagtgaggtcaaaggaaataaatgaaatggttaaccatggtgacctgtgaaatcgcaatggtatactgaaaggcagcatagctcttaggaggaaacgcttcggagccagggtacctgggttcaaattctgcctctgctgtgtgactatggaaagtctatgccttggtttcctccatctgtacaagggagataatactttctaccccactgggttgtgagcatcacgtgagttgacacatttgaatattatagctgatgggatatagacatacatattgcaggtct

SEQ ID NO: 1244450 - DNA, 4001 bp, Homo sapiens
tggggatcaatatcgattttaaaatacgaaaaacacctttctttttaacacggagagaagcctcatccgaggcaagatggtagtagtctaacctcatggatgagccacttgggttcacccttaaggacaagaaagaggggtcaaaaagctcgcactcttccccatcctaacattttttaaaatccctcacctcaaagacactacccaagctcagaaggtaagtgctgggtcgggaggggaatggaacaaggtttttggattttttttttttttttgtagaaaatgagctgctagaaggaaaaggcccaagtgaaagcctcagaggcggagtcgtgagcgaacctggcaggagacgaggttcctgtggcagagaaactcgtgaccggggagctgggttcccgctgggtaccccacccggcctcaggcaccgcctctacccgaaatgaatccccccgccgcccccccaggcctcctgcctctaggagcgccgcggccgccgcccgcggcctccttccctctcagctccgcttcgaggccggctccccgccccgactgcccgcgcctcccgccgcacccgggagcgggaaacgcggccgctggcgcgcggggccctgcgcaggccgctcccctcgtggccgcttccctcccccaccccaaccgcccccgcccctcaccccagggacccgcccggggccgcgcgccgccaccgggttacacaaccccggccggcgacgggggggggggcggccgcggtgcggggggcgccggcgcccccgcagtgcagggggcgaggctgcggccggtggtgatcccgggtcacccggctccgccgccccgtgtggccctcgacacccttccccctccgctcctcagtgggccggagtcggtgacaggaatcggcttccaacatggcggacaggaagcggccccgcgaggaggagagaacattccagccgcgccggctctggggggagcgggcgcggggcgccggcctcgggaggagccgcgggacaagactgcggggtccggcgcccaaaaagggcgtttagtggtggaaatgacccgtgagatgaggggtcccaacagccccccccaccgagacggggagccccaaggccacaggtgggcttggggtggcgggtgaggggcacttcctcaactcaccctacctacccactcctcgccgcctgcaaaagggtctcgcgacaccatccgagtcgggattcgctaggccttcctgagttacacctcgagggattttttgggggggtaggtttaccccatctcagggcccccaaattgaggtaactccagggacgcagggaggtgaatgggaaaagaataatgaggttggacttgcaaggccgacccagcaggtctcccttcagccggggccggggccaggaaggtcacgctggcctggctgggcctctcccatgctggagggaaggagagggcgctgcaaaccccattgctcagcccgagctctagaatgaaaggggcatccccagagccggaggggacacacacacacacaccccgaccccgtccgcgcttttcggatccagccccacccccatctctcctgtcctccacccccaacccccttcccccacccgtcctccctcccagacctgttttcttcttcggcgtttcctggtgctgctggagggtgtgtttctgctcatgtttcagcggctttggctgggccttggggctgccctcggctccatgctgcaggtattggtgaggctgctggtgatgatggtggtggtggtggttgtggctgtggttgtagaaataataatggtggtggtggtgcggctgctgctgctgctgctgagggtgatggtgcggatggtggtggctgtgatggtgctgaggctgtggctggccgggcttctcctccattgaaagcggctgggactccctggctgaggctgcgggctgctgcaccgtcaggatctgagactgcttctcagggctcactcagtatatctgagcgcgtctcgccagcgcactggttaaccgagcgattctgcgagattggcagccgcactccaacaatcaggagccacgctgtgccgcaagccccgcccccagctcaaatcctctttccttccccttcgccgctgccgcctggccaacgccacttaccctgtgcaacctcacagggccgggccttcaacgtcagcactatggctctctcttctgtcgctttctctccttcaccacgcagtctgtgaacagcactttctacactcctcgccggcaagcaggctcgtgtcgagggtagcagattccactggcgattccactggtgctgtgagccatctgctggctttgcacctcttagaatctggtgtttttttgttttttgttttgttttgtttttaatccttttccgggtaaccagaaagggaagctcaattcccttaaccccgagaccactaaaggggcaatacaaaaagaggaaataaatacatttttaagcatacaagagcttcacaatccagtagatcattttgtattctggattcattttgctttgtattcatatgctaatctcttcctttccacgaagggattatagggttccacaatggggtatctgtgtaattttctaaaagggcacaaagggtttaaatcattgtttctttgtagttggaggcaagggagagcaggaggaatgaaaatttacactgaaggtttttttttttttaattaaactctgcaggtgaggtcaactgtggaaccaaaataggttttagaatgagaagtttcaagagcaaaggaaggggagaaagagcacttaaaagttattaagtgggtttgttttttttttttttggcacttatggaaaaattgaaattaaaagaaatattctgtagcgttttgtagtgtagatttaacttatcctgcattaccacatcacagtatatgattttcaaaagcaaatgttagagccatgatagtggttactcaggaaggaagagggttgtgatggggagggacacaggttactctgataatatttcattttgggggctaggtggtgattacatatatttgcttagtaattatttgttaaactgaatatacagataaaatgcacttttcccaatgtatgttatagattgggggatttttttaattgtaaaatattcataatataaaatttaccatcttaatattaagtgtatggttcaggtgcattaggtacattcgtattgttgtagaaccatgaccatcatctatctccagaactttttcatcattccaaactgaaacttcatacccaataaaaataaatgtcctttccctcctccttccatcccttgataaccactgttctgttttctgtctctacgaacttgactattctaggtacctcatataagtgggattgtactgtatttgtctttttgtgactagcttttttgcataatgtcttcagagtagcatacatcagaatttccctcttttttaaggctgactaatattccattatatgtatataccacattttgttcattcactcagcaacggacatatggactgtttcctcaatgtatgttacgtttttgaatttttaaaatgtggcttgaattcctacaacaggacaacattaaaggaacaagaagcttgaaagcaaaaagtttatgctatgaaattaatgaatgtcaatgcaaaagcttatttaaaacgtaaaagctggtttccaataacaaatgtcattgaatcctgaaaaccatgaccaaattttggcatgttctatacagtaaggatttgtgttgccttgttaaattttattttattttattttgagatggagttttgtccttgttgcccaggctggagtgcaatggcatgatctcagcccaccgcaacctctgcctcctgggttcaagcaattctcctgcctcagcctcctgagtagctgggattacaggcatgcgccactgtgccaggctaattttgtatttttaatagagatgggg

SEQ ID NO: 1244451 - DNA, 4001 bp, Homo sapiens
gtctcaaaaaaagaatgaggccaggcgcagtggctcacacttgtaatcccagcactttgggagactgaggccggcagatcacctgaggtcaggagttccagaccagcctgaccaacatggagaaacctcgtctctactaaaaaaatacaaaattagccgggcatggtggcacatgcctgcaatcccagctactcaggaggctgaggcaggagaattgcttgaacctgggaggcggaggttgcagagagccgagaccgcaccactgcactctagcctgggcgacaagagggaaactccgcctcaagagaaaaaaaaaagaaggccacatatctccccagagagcttccctcacaaattgctcacaaggaaattccttgtgagcctctaaaattttcaggatacacatcgcccctataaactagtcctaaaatcaagatctgttgattctgacaatgtcaactaccagcttatcttcacaagtaaaagaccagaaatcggccgggtgcggtggctcacgcctgtaatcccagcactttgggaggccgaggtgggcggatcacgaggtcaggagattgagaccatcctggccaacacggtgaaaccccgtctctactaaaaatacaaaaaagtacaaaaaattagccgggcgtggtggcgggcacctgtagtcccagctactcaggaggctgaggcaggagaatggtgtgaacccgggaggcggaggttacagtgagccgagaccgcgccactgcactccagcctgggagacagagcgagactccgtctaaaaaataacagtaataataaccataatccctctacctaccctgagatgaatgcatacataaaattttcctctgctccctcttttcacaggtaaaatgcagatttactgaggctaatcaccgactcacaagaatgtaatcatttgcctcctcactgcctaacctcccttttttgcccctcctgctagctccttcctctttaactagtgatgttcccaaaaccatctttggaaaaagcacaggtctcagatcctcctgtgacctgtgctttttcccggttggatcctcaaccttagctaattaaacctttatcggttgagacctgcctcagtcacttctggttaacaagagggaaaacaagagcaatccaactagcagaaacggtaggtatctcgtacataaagcgcgtgaattttttttatacacatcacagatcatccacagttgacatactgtcttcaaagttcaaatggaattgaatgcacagcgataaaacaggaatagtctcctgagataatacgttgaataaaccttaggccacacaggcagaagctcaatgtgccgcgatgcagagcttaatacggctggaataaaaatataaattcctctgcttgggctgaacccactctaatgcccaagaggaaaagcaagggaagtaaaaaggccaggaacacaaaggaaggaaagggacggagtgggaccttcgaggccggggtttgtgactggtggcagaaaccccgcgaccactgcgaccctagggcgggcacctcgttaacactgcgacctccggaaaagtggcaactgagtcgagggaaggggacgagcgcctcgcgaccactagggaagcagacaagcctgaagtaactaagcagacgcagttctcaacccgcaaggacgagcaagcctgttcggggtacccttacagtgactgttggctcgccatcgagctcctccatagcgccgaaccccaggctcctagaagtcgctcggacgccaatgcttcccgctcaggcctcccgctcagagctggctgcgagacaagactccgcctgggcgtctcctgcagcgcctgcaagcccaaaccctcagtgctgcggcgctgtctcctctcagccacggccacccctctgcggtcctctgcacgcgtccttccttcctggcgtcgacagcaaatcagggaaaacagcgccgaggactgactgcactcagagtaccgcgctaacaggatcaggcggcgccggggacaccctggtgccgagcggagaaaaggcccccggagacggcgggaggggcaggaggaccccggggctggagacggtgcgaatgcgcgtgcgtaggctggggcggcggcacttgggtgggaactcgtgcgggatttaggtcccagtaagcgtacaacgtctcccaactctgggagtcctcgctacatcccggtctccaccttagtgtcgtcgcagccacttgtccaaaccccgacagtcaaacgggcttgtgctggaaagcaatcgcctccacttccacactagaacacacacaagaggcacgggaacaaaatcgatacccctgaaggcccggcgctgtggctcaagcctctaatcccaacactttggcagcccaaggtgggtggatcactggagttcaggagttcaagaccagtctggccaatatgatgaaacctcgtctctactaaaaatataaaaaattagacgggcgtggtggcggacacctgtaattccagctactcggaaggctgaggcaagagaattgttccaacccgggaggtggaggttgcattgagccaagatcgcaccactgcactccagcctgggagacagagcgagactccgtctcaaaaaaaaaaaaaaaaattagctgtgcttggtagcgcgcgcctgtaatcccagcactccgggacgccgaggtggttggatcacctgaggtcaggagttcaagaccagcctggacaacatggcgaaaccccgtctctactgaaaatacaaaaattagccgggagtggtggcggacacctgtaatcccagctactcgtaaggctgaggcaggagaattgttccaacccgggaggcggaggttgcagtgagccaagatcgcgccactgcactccatcctgggcgacagacggagactccgtctcaaaaaaaaaaaaattattttgctgagtctcaaaaaaaaattattttgctctttttctcttaataagtttccgttatacctcaagttggagttatcgcctgtgtaattgaaaacttttccagagttaaatacagtttgagagttaaccactctagagagaggaaggggaaaagagaggggaaggagccacactcttttagagagaggggaggagaggaaagagaaaaataagttgtaagataattgtttcatttttccaaccgttttccattaggattaactgaaaaagaaggatacataaactacttcatcaaaaccttattcttagaaatctatagaaaggttgaggaaggaaaaggtccatatatagtatgcgtaatcagtatatagaacaaggataggccgggcgcggtggctcacgcctgtaatctcagcgctttgggaggccgaggcgggtggatcaccaggtcaggagagagagaccatcctggctaacacggtgaaaccccatctctactaaaaatacaaaaaaaaaaaaaaaaaaaaaaaaaaatcagccgggcgtggtggcgggtgcctgtagtcccagctcctcgggaggctgagacaggagaatggcgtgaaccggggaggcggagcttgcagtgaaccgagattgcaccgctgcactccagcctgggcgacagagcgagactccgtctcaaaaaaaaaaaagaacaaggatagcactattagctgtagttttcctttttcgcccttgtattactaagcctatttgaatgattgggtaaaatggttggtatatagcagtattagaccaaagaatattgccaatactttttcctcaatgttatctagctcttggtcaggcaatttaactacttttattatcttaaatggcattttgtcagccttaaaataaaaataatcaaggaaatatagcactaagatctaacaagctctctctctcttttttttttctttgtctttttttttttttttttttttttgtctttttgagacagagtcttgctctgtcgccaggctggagtggagtggcacgat

SEQ ID NO: 1244452 - DNA, 4001 bp, Homo sapiens
gaggcaggagaatcgcttgaatccatgaggtggaggttgcagttagctgagattgcaccactgcactccagcctgggcaacagagcgagatcctgcctcaaaacaaaacaaaacaaaaacagccgggcgcagtggctcacgcctgtaatcccaacactttgggaggccaaagccagcagatcacgaggtcaggagttcaagaccagcctggccaacatggcgaaaccccgtctctactaaaaacacaaaaattagtcgggcgtggtggcagatacctgtaatcccagctactcgcggggggggctgaggcagaagaatcgcttgaaactggaaggtggaggttgcggtgagccgagatggcgccattgcactccagcctgggcaacaagagcgaaactccatctcaaaaaaaaaaaaaagacacaaaataattataaataattaagttatgattatgtcaaatgctacacagcagtatagaatgttattagaatactgcgtgctgcacatttggtaattattattattttttgagacacagtcttgctctgttgcccaggctgtagtgcaggggcgtgatctcagctcactgcaacctcctcctcccaggttcaagcgattctcctgcctcaggcacctgagtagctgggattacaagggcgcgccactacacctggctaatttttgtatttttagtagagacggggtttcaccatgttggccaggctggtctcgaattcctgacttcaggtgatccacctgcctctgcctcccagtgttgggactgcaggcgtgagccaccgcgcccggccttcataattctttttaactgaaattgggtaaataagtagactgtagactcctgccctattttcaaaactgcagaagcattgctagcgtcttattaaaattaaatcacttctcggtaacaagaattggaccgggcacacaacagatgtcataccttagaatgagtaccaagctctttttcatctttaagagaatctgtgtattacaaataaacatttccataaaccaatatttgaccacggcaagtgtgtaatactttctggatcacacccattttcacatgctgtcggctaatcaaaaacaaaaatccccattttgggtatggctttattttctaaagcgggcgttacgggggtaagaattaacagagacttcctcctccatgtcaagcatgaagcgtggtgctttgaaacctgcaacctgacttgctgtgcacaacgcaagagaaagttacgatctaacctattataagcgtcacatcaggaaacaggtttctctcgacgaaactaaaaatagcaactccgcccactcgttctcaacccctttagcccgctttgtttttctccagagcactcatccgtcactagtatttttattgaatattcaatgaccctttccttcctcccaggcctccaggccgtaagcatcgagagagcctgagtccccgcgaccgcgtatggcagcgtcggagtcaatccgctggaacgcctgccacaagatgaaaaacagccaagaggagcaaggaacaaaaaagactggttccgatcccggtgagggtcacttccaagatcggcctggcattacctggtactgggacagggcgggctcttcgccgccgccgctggggccccgaaggcgaacgactaagaaggagctgtcttctccgtcccacaggaaaagctctccgccgaggccaaagaccacgtttctcgtcagcaactgcggcggcggcgacgaaggcaacgacgaagaagctggtttctcagcttcggttggactctggtttttcagtccctcccggagccgcaagaacacgacgtggttaggaagccaggtctgccacagctcgccgtcgcccaccggtccctcggcggccgccatcttggcccaactgctcccctcactccagttgctcagcccgccgctgagcacagccaatccgcggccgtccactcactgtttcggccaatcaccgagcagacggcccggaagctcgagaggctcgtgccaggtcggggggcgaaggcgaggccagcccaccaagcaggggcgtcaccaagggaaagccaatcaccattatttctgaagcccaagggggcgggacgagaagtcaacataatggtggtgctgctggaaatctagcacctggggagagcctgagacttgtgtatctaattgcctattggacacctccatctgggtaaacccaggcatccagaactttccctcaagacttacctccctcagtgcaggtcgggctggcctcacgcatttcgcttggatgcctaaatctgtctccacgtggggccggtcgataaaacaacacttcccagaatacgctgcgatccattcgcggtctgcacccggaaagtacacctcccaggggtctgtgcgcgcctccagggaacgggtcttgtggctttgtctcccgcgaagaggagatggcggagtcgttgaggtctccgcgccgctccctgtacaaactggtgggctcgccgccttggaaagaggctttccggcaggtgggtatggggtttgtgcagtggtctaccctagatcgtcccggtgaccgccgtcttccctgccttcgccttagccctgctccgtggagcaggtgccgcagcgcgcctggtctggtcaaacccaggcctgctgactgtagagtgtgggattagcccgggtcggtcaagtcctagaaagccttgtttttggattcgattttgttttgaatttaaattgtggtcaggacatcaccgtttgcacctctgcaataacactacctactgttgctgcggaggtggccaccgagagaggcactttgtctacgttcgtcttgtgagatagagatgatttctattctagagagtagtaaaatgaggcttagaagagggctccacctcagttctggcctcttctgaacacagtgtggttattagtaagtaatgtccaagaaagtaacccgacgcaagaaagatagcagatacagcagagtttctcagccttgacaatggacattttgagggagatatttatatgttgtggagggttgtttaagccacgtctcgggcctccacccactagatgctaatagtcctataactagaattgtgacaaccagaaatgtctccaagcattgccaaatgttccttgggggacaaaacctccctgagttcagaaacgctgctgtgcaggaaggccgttacccagccatatctagagtagcaagaatttggaaggaatataaatgttctgtaataggacattggatgctgagatattatgcacacaaccattaaggaaactggcaagctagaataaaaaatatggttctttgtaaatacgtgtacaaagcattgtaattttatgtatctctacagaggaatatgcaaaagtaacactagttagtattatcattgaaattttgtgtctataaactttctttaatgttttctcaactaatgtaagagtgttttttaaaaatagaaatgctttttttttcccccccaatcttgctcttttttcccagagatgcctggagagaatgagaaacagccgggacaggctcctaaacaggtaccgccaggctggaagcagtgggccagggaattctcagaacagctttctagttcaagaggtgatggaagaagagtggaatgctttgcagtcagtggagaattgtccagaagacttggctcaggtcaggctgggctatgtgttttcagggagggggactgcaccaccaagaacggctcgtgtcctcttttatttgtttacttgagtcctctaaacccaccattcccctaaccccatttagaattcaacagcctttaacccaggcttttctacacttaatgttagacttgtctagatgaaatggtctgaaataccagaccgtagacctgctcatcactgcaacatcatcatttatgaaactaaaaagaaagaaatttcatttcttgcctccacccttg

SEQ ID NO: 1244453 - DNA, 4001 bp, Homo sapiens
tgagccaccgtgttcagccaatgaggggctcttcataaaggaatgtgaggtaataaatgtagaaggagtgacaatttaaagcccaggattctgcaataatcaatgtagaaacagattcaggaggccaggcacggtggctcacacctgtaatcccagagctttgggaggccagggtgggaggctcccttgagaccaggaattcgggatcagcttcggcaacatagtaagaccccatctcaaaaacataaacataaaaataaaacttaggtgggtgtggtggcccatgcctgtagtcccagctactcaggaggctgaggagggaggatcgcttgaatccaggagttagaggctacagcgagctatgattctgccactgcaacccagcctgggtgatggggcaagaccctgtctcttaaaacaaataaaacagattcatgaaagaatcatcacatatcagtggatgtgaagccactgggtaacaagttactgggaggagaacattcctacggtcctaaagtatcacaccacttactgctcgttagttacaaaggagaaactacctttacaaagtagagtgatctggcagacattagctcaaccaaatgtttaacctcagcatcatcaataacaggacggaactatgatgtggctcctggtgagatgcaacaggagctctgcggcattcctgccagaaatgtttggcctggatgtaatcacgagggaaccatttgacaaattcagactctggaaaattctgcaagacaacagacctatgctctaaacgtatcaatgctacatttcttgggtatgataacggtattattgctaggaagagaacacccttgtttttaggagataatgaaggtttaggaatgaaatatcatgataaatataatctattttcaaatgccccacagtatactcaggggattggttctgggacccccacatattccaaaatccgcatatactgaagtcccacaatcagcccagcagagcctgagtgtaggaaaaaccagcctctgcatacatgggtttcacatcctgcgaatactgttctgtcttctttgtttttttgagacagagtctcactctgtcacctgggctggagtgcagtggcgcgatctcagctcactgcaacctccacctgggttcaagtgattctcctacctcagcctcctgagtagctggaactacaggtgcccgccaccacgcccagctaattttttgtatttttagtagagacggggtttcaccgtgtgagccaggatggtctcgatctcctgacctcatgatcagcccgcctcagcctcccgaagtgctgggattacaggtgtgagccaccacgctcagccgtgttttgttttgagacagggtctcgctctgtcccccaggctggagagcagtggtacaatcacatctcactgccgcctcaacctccctggctcaagcgatcctcctgactcagcctcctgagtagctgggaccacaggagcatgcctccatgcccagataatttttaatattatttgtagagatgggggtctctctatgttgcccacgctggtcttgaactcctgggctgatgcaatcctcctgcctcaacctcccatagtggtgggattacaggtgtgagcctctgcacctggctgacactgtatttttgattcacatctggttgaaaaaagtccacatacaaatggacccttgcaattcaaatccacgtcattcaaggatcaactgtccttcagggaaaaaacatacccactgcttacacagagctctgtagaggtttatgtcaggctcatacagtgtgttccccagatcagcagcagcaatgcctgggaactgagtgaggaaacacgttaaccattgctcagtttcggtgaaaggacacagttaccgttgctgggttccggtgaagggacacgtctgccattgctcggttccggtgaaggggcacagttaccgttgctcggttccggtgaaggggcacgtttaccgttgctcacttccggtgaaggggcacgttcaccgttgctcggttccggtgaagggacgcgtctgccgttgctcggttccggtgaagggcacaggatgggcattcatggtacttgtcttcaacttttctgtaggtctgaaatttcccaagataaaaagttcggagtagggagagtaagtcttaatccatttccttctcagggaatcaaaaccacggttcttcagagtgttgattcttaaatttgccaaaacgtaggggagtgctagcttagatccatctgtgttccctagttccatgtcccatgggacaagacaccagcctcaacggtattaggtcaggagggcggattgcatggaaagaaacagaatcgaggaacaaagtgggctctgcccgttcaaacggctgccctgggagtacaggctgtttctccctgataaacatcggtgagaccaacatgagtgtgaggctttgcaggaacttgccctgcatttcctccctctccagataattctctggtctaacatttcagaaggctttttaccagactcaccctgagatcctttccaacctgattataagagaaaccatcatgaccccactgctcactctgaggctcctctaattaacggacctctaaggaatgtgtttggcattaaaggggcagaggtgggtaaagttaaggaagctgctgcaaatctcctgaaaacggaggcaacccaggcggtgttctgtcagtctgctgcccaaggaagggccagatgccctgaacccttctctctcattcaacacggatgaaaagataaagaatccagaaactaaagggcagattctagaatttacctcctgcttaagctgtcctggcagtcaggctcctggatctcggaactagaaccacgcctggtttatgtaaaatcaggagatgggactaaacagatcatctcgtccacactgattgaacagaggagaaaagcacaactcccagaagtcatctttctcgctcgatattgtccatctcccctccctgtgctccttcagtggaagcgcattgggtgatatcctctgtattaggtagcaatgttttctgggcaagggaaactattggtattacaggctggctgacaaaagctggagttacacttttttttttgagacagagtctccctctgtcacccaggctggagtgcaatggcacgatcttggctcaccgcaacctctgcctcctggattcaagtgattctcctgcctcagcctcctgcatagctgggattacaggcatgcaccaccacgcccggctgattttgtatttttaggagagacggagtttctccatgttggtcaggctggtctcgaactcatgacctcaggtgatccgcccacctcggcctcccacagtgctggtattacaggcatgagccaccacgcccggccgagttacacattttctataaagcaatgacagtctctcccctccaagaaggaccttggcaatgtctacagaagtcaataatgtccattattctttggcttagcaattccaattcacagatatgcatgtgtgaagtgtgcagagatagatgtgcaacaatgttgctgggcgcagtggctcacgcctgtaatcccagcactttgggaggccgaggtgggcagatcacttgaggtcaggagttcgagaccagcctgaccaacatggagaaaccccatctctactaaaaatacaaaattagccgagcgtggtagcacatgcctgtaatcccagctactcaggaggctgaggcaggagaatcgcttgaacccgggaggtggaggttgcagtgagctaagatcgcggcattgcactccagcctgggcgacagagcaagactctatctcaaaaaaaaagaaaaaaaagtgtgtgcgacaatgtttatcatagtattatttgctacagcaaaaggagaaggaaggagtgaaatatccatttatcaggcagtgggcaagtaaattacgctctatatattca

SEQ ID NO: 1244454 - DNA, 4001 bp, Homo sapiens
ttctccacgaacgtatcacaaaaaccaccaccaaggaaaacaaaggattctcgtattttgaatcaaaaagtactggccatgcatattcatactatatcaagcatgtcaatcaaaatgggcaaaataacctaaaaagcagtaaaaatgccaactcttgcctctgagtggttagtgaacctatgttttcccaatatgaaatttacaaactgcatcggatcaactgtatttcatactttaaatctcgaatctctacctcccactgcttcgggatggatgatttactcaagacatttggggtcacagtgtaagccttttgctcccagtaaatctaaatcatgcttctcaacaagattctgcacatataaaaggaacacgtggcacgcctcgccatgctccccagaggaaactaaacgcccccagaatagcccttctgtccactccagaaacaggctttcctcaaaaagggaaaggggctggattcacacgttgcatcatatacactcacgaagcaacagcgctccaaaactttttctgactccattcattacaaaatgtcctggatgtgctttattatcacagagacagacatcctcacccaagggacacactcagaaacccaaactcaactcggcagcaaactgggagacacgagaagttgacagcaaagtatccatttccccaaatcctccttcttccagtcaatgtgcatcgatggggtcagctcagcccttaactcgaagaccccgggaccacaggggccaccacgcagctgagctctgcacagcccgggctgttcccgcgcccgggaggcgtctggggaggaggctggacggccagacaatgcaaagctccccggtggccgcgaactcagcctggggcgggggaggcgggggcgggagacggagccgtgagcgcccttctcggccacagccacggccacggtcaccggccgcctctcctgacctcggcctcggcccccaggtccccggtccccggggaaggggctccgggaaggcaggtttctcccggaaagaaaggaaacgcgctggtttgggcgccacgggcggggggcgtgcgccctcccctcccctcccctccccactgtgggaatccgcgggggtcggcggcggaggcaggaagggcctggcgcctctgctcgcgggtgaaggggtcgcggaaccgggatccccgagcgcagccgcccccacccgaggctcccagcgtgtgcggacggaggggctcgagccgggatcccgggggccgaggggggtccaactttccagggcgggcgcagcgcagcactcgaaccaaagaggggtcctgggatgagggtgcgggcacagcgcggaaggggggggggcagaggcggggacggcggggtggggggcggggagaggacagtgggtcggggggcgggggactgggggcaggggtcggggggtggagggcgggcagggggacaacggggttggcggagggcaggggtaacgggcgtggggggcgggcaggggtaacgggcgtggggggcgggcaggggccggcgaggcccgcgccgctcaccttcctgtgcttctccttgtagggcagcgccagccacggcatgtcccgcacgaagtcctgccactgccgctggtcctggtccgaggacacgaagacgatctccaggcgccgccgcggctcgggctccgccgccgccccggcccccgctcccggccccggcccggccgccgcgtccccccgcaggcgcccgtagaaggcggccaggctggcgctgagctgcgcgcagggggcgctgaggctgcagccgaagtagagacccagcagcgagatgccgcgggcgcccagcgagtgcacgtccacctcctcgccgccgcccgtcaccagcttctcgccgagcagctcctccaggaagcccgacatcctggcccaccgcagggcgggcaggcggctgcgaccccgctccacggtccgcgcggcgggaggaggcggcggcgtcggcggcaggcgctggggagagcagagcccggcccagtagggccgcccacgccacgccccctccgcctgcccgcgccacgccccttcccccgccctgccacgccccctccgcggcccgcgccacgccccttcggctgccctcgccacgcccctccgcccgccctcgccacgccccctccgccctcgccacgccccgtttgcggccggcggtggccagagctctccgcccaggcggggtccgcagctgccggccgcggtgcgcggggtgactgcttgggcgagaagccggacccgaaacgccgcactctccctggaaagcccacggccgaagtgaagaaaggagaagggcccgctgagccggcgctttcccgggctgcagcccggcccgcattttctctcctccccagttctaaattccctccagacctccagggatcccgccccctccccgcggagctcttcaccctcttcctgttcctccccggcctttccctcctcctctccctgcacgaagcctgacccttaggccgctccgggccccactgaccctgagatgcttataggacccgccgtcctcactgcatcaggccgggcctggctggacactgactcctctgtgtgttccaagctgttctaagggggccgaggacgccctcgcagcttctggtggggtctggttagggtgccaggtctcagtgtgggatttccgtccaggggtcgccggggcctctccccccagcgaatctgtcttccagccccacaaatggatgcaaaggacgccgcggggcctccagaccaatgctggccgcgctcctgaatccgctccatcctcatgtcaagtctatggatagttgagaacatttctagagattttttttttcctaccagctggcaggatgctccccaatgcttagggagaagctggattaaacaggtggtctgggccgggcgcggtggctcacgcctgaattcccagcactttgggaggccgaggtgggtggatcacaaggtcaggagttcgagaccagcctggccaatatggtgacaccccccccccgcctctactaaaaatacaaaaattagcggggtgtagtggcaggcacctgtaatccgagcaactcaggaggctgaggtaggagaatggcgtgaagccgggagacggaggctgcagtgagccgagatcgctccattgcactccagcctgggcaacagagcaagactccgtctcaaaaaaaacaaaaaaacaggtggtccgtggcgagtactctggccacgcagcgcctccccccaacccaacccactggtgcacgaagcaggtgcagatccgggcccagccacagtaacaggccgccggtgtggatcagctactgacgactcagcgaaagcaaaaaaataaaagctgaaaacccgcccctctcagagcttccaccgccgcttcggaggatatttcctgtgcatccatcgccacctaatggaaagagtgaaaaatgaggccgaccaaactccatttgtgaaaagacactgccgggacaccaggcacaatgcttttattttacagcagctttccacatacacaaatgataggacgctttgcgggagctaatttaaacctcagaatagaacttcaagcttttggcacaaaacgtaagtgttcacatcgaaggttctccgtttttctagggtagaataaggaatggtgcagggttccagcttggtgaaatgttaccatataaaacaattgggagaggtggagatgggagcggaaagtggactggcgtctctacaagttatatccacttccttagtcacctgctggtattgctaatgacacaggtaagatcttagatggaggaccgccttcgaacaccctagaatcctactgcaaagtcgaattccaccttaattctcaggagactttcatgctgaaagtctgtgccactgtagggacaatattataaaacacacacagaaagcatcactttttagtgaaaactttatttatttat

SEQ ID NO: 1244455 - DNA, 4001 bp, Homo sapiens
gcagaacacagtgtaattctcaagcacgaatatagtttaggtttggcaagagaactaggggagacccggagtgaatgccacacccaggatggccatgggaatggaaagccaaacacctctccagggtacactgatgatgacatgccacgatgttacttgcattctgaggtaggagttcttattcccatttcacagataaggacactggggctcagagattacaacactacaaggctgagttcacatagggtcagcccttcctttacactccacactcctggcctcacagatcagatgtgtctttttgaaagggtttttatccaggcgccatccgcctctggaatctgcaggggctcatcctccctctgctggatcagctgtggtgacaacccacacctgggagattcctggaggtgccacagggagagtgggacagcagtggggggcatcagggggttgacagggcttcctgaggcgcagcctggctgtgggtttgctcagcttttgaaagcaaccacttgccctaggtgtctttactaccagcaccggggggcatctggatttggtggtgacactggggtggggacagtagggttccaaggggctgtggggtcctcatgcctgtgttctggcctgggtgttgccggcagctgtgtgctgtggccgagtctgtctctgccccacagttcaggctggccctgactgccaggccccagaggtggggtagagggacggctaggacgggaggctcggggtctgggtctagggctgcagacctgtaggtacttgctcctgagggtcacggctgagtggctggagggtaaaggtggggccgtgagaagggaagggctcttcccacagtggcatggggcggtggcaaggggcttgttgattaaaggggcaggtccagatgtggggctgaggcttcacgacagtattgcggggagggtcagcgggcgctcggtcggaggggagttaagccacgggctgggttcggggaggggatccccggcgccctgggtcgccgagaagccgcggagccggcgcacggggagcgggctctgggcgctccgctcagctgccgcgagtgcctggggcgggagccgcctgcccaagtcctgtggggctccggctgcgcgcagccgggagagcagaggaaaacaacaggcggggagggagggagcgggagggaaggcgggaggggagggacgcgggggccgccccccgcctggaccggctctgtgctctgggggacccagaacccgaggctctctgagtcccagaggtcaggggaaaagcctgcaggtcaccagctccacgacccgcgccccactcgcccccggcttcagcggtcctgaggctctgggaaggggtagggtaaccctggcgacccggctccaggcctttttccgagcgctggtcgcacctccagccacccgctgcggagtgggtgggccagccaagcaccctctccccgcccctattaaccctatctgtccagtctccggcctcggacccgccctctcccccagcctccagtcttccccgccatccccgggatgtcgggggaagggagaaagtttcagggctcgcaagcttcccgcgctctcccccgatcctccgggcccccgcccctctgcgcagctcccctcggaccactcaccagatagaggctaccctgcaccaggaacacgaagcagcagcgagtcagttgcatcttcctcctccgctctcgtcccctcgctctccccttctcttttcggggtcccaggcctccttccccttcctgctccttcaggcgcgccgtcccatgctccagtccccggcggcccgcggccctcccctcagcgggtcgcccagggccgaccccgcccccttcggtccagctgtgcagccgccgcccccctcccctggtccagctgcgcgcggcacggcccccgctcgaggtcccagatgtgcgccccgagcgcctcgaagggccccagctgcgccgtggctctgctgctccagatctgcgctcggcgcccccctcggctccagcggcgccgctctcgcccagatgtgctggggacctgcgcgcgcgcccgtccttggtgctaattccccaaaccaggctgctccacccgccccgtcgcggcgcgccccctggcggacgcccccagccgcgcggagccccggccgcccgctccccgcgctgcgctgcgccccgccagactagagcgctcctggcgcccaggcggctcccgcttcctcgtccctcccaccggcggcggcggcggcggcggcaggtacagtgagcccagccggtacctccggagttaactcctcccctgccggcccgcagcccggggacctaggacgccggctctccagccaggagaggacggcacgcgggggcggagtagctcttggagaggaagggagagggtggtggccaggggatacggaccctaccgtttccacctcttttgcagggcgcccgttccccgggagcgggcagcaagaatcggctgccctgcccccaactcaggagtcctggaattaagaaagatcctttttttaaaaaacccattctaagagccaaaacctgtgctgagggaagtccttctgggtgtctagcctgcactccttttgttatgatgtctgctccttccctcttctactttacttggaggggctgagataatccctggaccttctcggtccagccactgtgacaggaagtatttggctgggcccctgggctgaaaaggctgttaggggccaggctagattctggggccgggggcaggtcctgagaagctggagagtgaggggagcaaggccttcctggagcctgtcccttcattattcactacttaccctctctatgccacaggggtcaccaggccgagagtggctcctgtcccagtggggtctctgcaaacctccagggcaaggaggaagaacacgaccctgatctgagattcccaaagatgggggcccatcctccatcacccccactccatatcttcaggtctccctcctggaattccagggtccctttagtctgtagaaaaatgaaaggtcaagtcctggcatcccttggaggctatgaaggtgaggaggcaccccatcatttgaagtggtcccagcttgggctgggcccaaggagcacggtgggtgggcactctgctctgtggccctccaaggcccagcttggtcccgtggctgcaaccccggcacgcacccagcctcctcccccaccatctgccaggcgggtgcgcggggaatgcagatgaatcttaatatcagcctgggccaagtgcgatgagggagacagattctgcaaaacccagacagcatcacagagccccctgcatttccaggcaccctgggccataccaagatgcaacagctctttcttggtgttggtggggggtggggtgggtggtggcgtgcatgtctagtcaaagacccccccaaagccggggaggcaggaacaggcaaatctttgtttggcctctaagcctctggtctggctgggagggagaagctgttggcctgagtgtgggcagctggttccggcgctcagctaggcaggggcgtagctgggcccactccttgtctggtttccagaaggtcctgtccctaggagagctgtgtggcccagcagaaagagcacaggttttcaggccagacagtcccagattctgttccagacctggctgtgtgaccttgggcaggttactttggttctctgatgtccgtttcctgatctgttcttgcaagaaccaaatgagacaaaatgtgcaaacaaagcgcaggcacaatggctggtgggcagtcgtaggagtgcagtaaacggaagttctcgctcctccacttcccacacatttgctccggctgctcctcctgccaggcttgcccttactcccctcttggtcatttctggctctcactttgttcaagtttcccctccgcatttatccatcacccactggccgagcctgtccgccgtg

SEQ ID NO: 1244456 - DNA, 4001 bp, Homo sapiens
tttcataattcattatatgaatattttcatattcatatgataaggacataatactttcagaaaataatagctgtgtgatttttttcatgctaaggagagtgaaaaaatggaaataagggtcaaaagctctggttttccccaggagcagggaaagaactccaaattcctgaggggtgagggaacagcataaccagagactaacaacaataagaaccaggtgtggtggccacggcctgtagtctgagcttctccggaagttaaagcaggaggatcccttgagcctggaagttcgaggctgcagtgagctatgattgcaccactgtactccagcctgggtgacagagtgagaccttgtctctaaaaaaatcagcgaaacaaacagaaaaaaacaaggatgaggaatgaagcagctgcaagaattcagggaaagaaggaacacagaagccagatgtggaaaaaggaaaatgatccagaaaagcaaggcctgaggcagaaggaaaggagaatgtgtgggatcagggcctgagaggggacattgcaaggagtcctctcaaagctctgggtacacaagactaaggaaacccccatctcactggggctcttgtccctggtaaattaggcgattaatgaatgattctcttgtgctgagtccatgcccctcgtaacttttttttttttttgagacagagttttactcttgttgcccaggctggagtgcaatggtgcggtctcggctcaccgcaacctccacctcccgggttcaagcaattctcctgcctcagtctccagagtagctgggattacgggcatgtgccaccacgcctggctaattttttgtatttttagtagagacggggtttcactatgttagccaggatggtctcgatctcccaaccttaggtgatctgcctgctttggcctcccaaagtgctgggattacaggtgtgagacgcagtgcccagcctgatttttttttttttttttttgagacaggagtctcactaaattgcccaggctggactcaaattcttgggcccaagcaatcctcccacctcagcctcctggatagctgagactacaggtgtgcagcaccatgcccaactctctcacagcattcttagaagcacagatttggctctgggttttatcaaaagcagtgacattttccattgcaccaatcaaatctatttagccaggctacaggatgagaaacgatcatcggaggtctcagtgccagtggaaccatcttgcaggccaaaaagtaaagatgaccagaaagagggaacaagaatacatccagggtgcagatacagaggccaagacaggctggcggcctgggctgggatggggggtggaggggctcacctttcccattctctaagtcagaacagctcctggatttgtaaaagtgcaggagccccatggacataacgtgggctgatgtgtggattctgttgctgacatccacgggccagcgctggtagaagaggctcctagagaggtccagccatttcttggagaaggccacgaccaatagtaggataaaggcaaccaggctgagctcagaggccaacacctgggccatccagcggaagctgtgtgtgattctccattgaaagggcagcggagagttctggcgctggcccaaggacctgttactactgagggagagggtggaggacagcagtctcccatcttgtcccagctcacctgtgccccatcctgcctccccactcttcctttcctttccaggtctctgatgttggtctctttctccttctgacctggggaactcattcccagagtactctgcatccatcttgagcaccacttcaccctctgtctcccctttccctcaccagactcaattgtctcttctcatcttttggatattttcatcagctgccaccatgcagcctgaggtctgagaaagaatgaggaagtctaataacagacctcgatcaaataagagactcttgatccaagagaaggccccaacccattcagcaggccaggtcccctaactgccacggaattttcctggggcacagtgagatgggggagggaagccaagtcttcagcaattttttttttttttttttttttttttagagagagagacagggtctccctctattgcccaggctgggatgcagtggcacaaccttggctcactgcaaccttgaactcctgggttcaagtgatcctcccacctcagcctcctgagtagctgggattacaggattgtgccagcatgcctggctaatttttcaattgtttgtagagatggggtcttgatatgttacccagcctggtctcaaactcctggcctctgccaggcacggtggctcacgcctgtaatcactgcactttgggaggccgaggtgggtggatcacctgaggtcgggagttcgagaccatcttgaccaacatggagaaaccccatctctactaaaaatacaaaattagctgggcgtggtagcacatgcctgtagtcccagctactcaggaggctgaggcaggagaattgcttgaacctgggaggcggaggttgcggtgagccgagatcgcaccattgcactccagcctgggcaacaagagtgaaactcagcctcaaaaaaaaaaaaaaaaaactcctggcctcatgagatcctccccacttggcctcccaaagcactgggattacaggtgtgagccaccttgcctggcctgtggctccagctctaactctttccggaaatcctgtttctcaggccacagctcagaactgtggatctgacacctccctccagcttctgcctccctttacatatgagcaatggtatgtgagaggccctcctgtggtctgcatatggttaatttgtcttcaccaaacctcatgctgaaatttgctccccagtgtggtggtgatgggaggtgagagggcctagtgggtggtgtttgggtcatgggggcagatgccttgtgattggattaacgccttccctgagacctcactccattagctccccgcaatagctggttgttaaaaagaacctggcgctgttaccaagcaaaagtgctcgctgccagatgtgcatagaagccaatactccaatactagggcactaggttttgagaaaaggaaagctttattgtgagctgacccacgaggatacgggaatccagctcaaatctgtctctctttgctggtcttaaggcagtacttttattagaaaaggtttagggggaggattctgggattagcgggtgattggtggaaagaaaggagaagtctagaaagtccttaatcatgtctggttatctccaaggttcttcgtgggttgcatgtgcaaatttggtggcgttagtatgaaacagcaggtggaaattcaggctgtgacatcagcaagctcgttctgtgcggattgctgtcagccatacgggttcccactgatttcagccagtcctgttataagcaaagggatttttcagcatttcagcaagctgtttcttagctgccatcctgtaaactcgaaaatgtctgttaatcactggtttatttaactgtttggggcacagtttcagctcctcccttaccttgtgatctctgcacaagccagctcccccttgcctccaccataagtgaaagcagcctgacgtcctcaacagatgcccaatcttgagctttctggccatcagaattgtgagccaaatagcccttttttctttataaattattcaccctcaggtattctgttatagcaacacaaaatggactaggacagtccccttttctcttcctagttcctctgccctaaccccaaccccaaatgctcactgatggagcagggggagggagcaggagcttatccccaggaaaagatcctccctccattgttctttggacatgtcttgcaaagatgtcatcgagcttcccattgctttccccaacccttcacctccctcccagctctactcactgctagtcaatcaccaccagttccttccctcttcttttg

SEQ ID NO: 1244457 - DNA, 4001 bp, Homo sapiens
aggacaatatttcttttatttttttatttttatttattatttttttttttgagacagagtttcactcttgttgcccaggctggagtgcaatggcacgatcttggctcactgcaacctctgcctcctgggctcaagcaattctcctgccccagcctcctaagtagctaggattacaggcgtgcaccaccacccccagctatttttttgtatttttagtaatagagacggggtttcaccacgttggtcaggctggtctcgaactcctgacctcaagtaatctaaccgcctcagcctcccaaggtgctgcaattacaggcaagcaccaccaggctcagcctcaaaagtctatatttctatattaaccattcagtgctgacaaaaactggtactcggtatttcagaaaatgtacaagtttactggaaatttttaaaatgtattaattaaataacttctcatattactattgaaggaaatagatacatgtatgtttatacttgaaatattcttttggagagatttggttttgggagaaggtagaatacttataaatcatcactaggtcattcatttataaaattatagttgcaagctagtctgatggtagtggatccccagaacttattaaccttagtgtcaccaacgttggtatacaaccccccacaactaaatttgactggcttttaaaaaattatagctgtggccaggtgcagtggctcacgcctgtaatcccagcactttgggaggctgaggcgggcggattgcttgaggttgagagttcgagaccagcctggccaacatggtgaaaccccatctctactaaaaatacaaaaattagccgggcatggtggcgggcgcctgtaatcccagctatttgggaggctgaggcaggagaatctcttgaacccgggaggcagaggttgcaatgagccgagattgcgccactgcactccagcctgggcaacagagcgagcctctgtctcaaaaaaaaaaaaaaaaattatagctgtgaactagcatgaggcatttaagatcctatctagtagactccaaaagcagctgagatgaaaaagggataaaaatctcaagaacaaactatgaggtttaagagttattgcagtctatccaaacctgaggtgtcctcctgatatttctaaactgacgacttcaatgtgcaaatcgtcaatagaggggaattgggcactccccaaaagagcaaaatattaatatcaagcaagcgagaagctgtattctgcacgttagaggctccttcactaatacctgcaaaccaatgatcacccgtaacattttaaaatcctaaaactaagccattcctccatggcacccgatcctctagaattccacggggaaagcaggtttcgtggtttaaaagtgaaggcggaggcacgctcctggctcaggcggactttccaggctgctgggtgggttattccacgggacagcgacagccaaacggcaggttcccggagcagcagcagcagctcatcaggctgggagcaaagcccccttctctttctcctgcccctctgggataggtgggcctctgccgtcggctaccgcggctcccgcccgcacctgccctgctcccagcatgggctgcggtagaccccgccccccgcggcagaccacgcccacctgcccccccccacccccccacccgggtcgggccaggccccgccccatcagccccagtcccgcccactccatggccctgtccgccgccgcagcgcgcgcccttcccctcctcaccgctacctgctccggttccggcgctcggccgctccgttgccctcgggcgccttggttgcggccctccgctgaggagccatcggaccaggccgccgcggagccgggccggacgcgggcgccaggcccggggacgaacgccgtaacagggagcgcgaggcaggcacggcgcagggacgcgagtgcgacgcgctcggccatcggcccctgggctggcggccaggcccgagcaatcggcggccgagcggggcggggctcagagcggaggcggcggccgcgagggcggggcggccgggcctggctgcgcccccggacctcgcgggaccgcggcggcgcaggtgaggtgcgggtgcggctctggctctgcgcgctaggccgggcggctcctggctggaagcgtttcccccgcgccagtacctgaagagggacggccgggctcccgagcgacgcctcccagcgtggctgtcccgcagcggcgatgcggggctgctgagagaggctcgcacagagcctgtgggtgtaaattgtgtgtaactggtcgtatgtacaaactgaaagtgctgtgttacagagcccttagggtcagcagcctccgaacccctgcacggaaccaggggctggattactgaactgagtctgtctcacatgcaaagctttcctttccttttctcacccaatcctttgtgctttcatagtagataggaaaaataaataaaaaatacataaattttacccttccccagctgcttcgttatcccttggatgccgcctttattcagtataatactacggtcagctctgatgcacttgggggctttttcaaaattatcagcttaccttaaatcctagacagttttctccaacctggagtcagttttgcagtttcttcctctttataatcaagctgatctgagctctagaaatacaaattagttttaatattacctaaaatttggataaatttcctacagaagcatcatattgtgcggcctgataagaaaatgtttagaggcttctgcccgactgttttcactagcatagtacatctagtttaacaaggtctttaaaacaaggttgtttggcagttatttgtgttattatagatcataaccatcttataaacaaactagtgctgttttgttttagcaacaaatcacacatagcagaggtctctatatcttaacatggaggtagacttccagttcattttcatgttagcaaaatgagtttcctccaagttaatctatcaaaactggccagtatcagaactgaaactgaaagtataaggagaaaggcaaagggagaagcttctgcccctgttgataactcttgattttctccactaggaagaagtccccaaggagacttcgccataggagttcacaggaaatattgaaatgtcaggttccactccatttcagatgagattagttcatttagaccttaaaggagctccaccaaaggtctcgtacctctcagaggtaaggactcccttttacctctagagcattactttttgccttggcttcattctttaaagttttgagcagtgttctgtggaaacgggtacctagaacacaaccacaaggttctcggtggagcaagatggtggcagcagcattgattttgaatttcctccatagcctctcacaaaaacagaacaaccaggatgacaaaagggaaaaaaaaaaaagacagagaacaaaagaaactcacagcttctttcttttgggttgaagtgtatctttccaaaaagatatgttcaagtcttaacccctgggacctgtgaatgagaccttatttggaaataggatctttgcagatgtaatcaaaataagatgaagttgtactagaatatggtgaaccctaatccagtgattggcatccttatgaggagagggaaatttagagcctgagacacacggagggaaggcagtgtgaagacccaggaggatgccccgcggtgccagcagccaagatggtcatgacgtgccacgaaccccaggatgccgaggacagctgacgatcaccagaagctagagagaagcaaggaagggtcctcctcttcagccttcagggagagctgggtctgctgacacctggattttggacttagggcctccagaactgtgagagaataaatttctgttgtgtcaagccgcccagttgtttgtttgttttttgagacggagtctcgctctgtcatccaggctggagtacaatggcgcagtctcgg

SEQ ID NO: 1244458 - DNA, 4001 bp, Homo sapiens
ggtggtgtctttgcttagagtggcaccaaacgttgtttcctttgttcgatattgtttgggtattttggtcactttgggttgagttaccacactcagagagttaatggtgtccactgtctgcatcccacttacagtgaataagcttgaggtaaatccagaaggtgtgggatacatgttatgttcctttaaagatgatatttgggtagaacatggagtccctatcacatgggcttttgtttccatcatccacttcagtaagtaagtaatgttttgtttgtggtcacatgaccacctgttattgtaaagggttatctcttgcaactgaaagagttggtcaaaagattggtctggaatgaatgtgaacttattgttgtgcaggtaaagatgtgtgagatttgtcaggtttattaatgtacctggaagaatttgtgtcaaagaattattagacaggtccacgatatgtagtttggagggcatgttggttggaactgtccaaagtttgttactactgaggttgagaacctcgagacttcttagtgtatttttaatgaggacaaccttttccagcatgttcttagaaacatccagatatttaagattccactgataagcagtatcagatttgtcaagaagtttaatgttgttgttagcagcagacatgttccacagagaccgaggtaagtgagcaggcaggctttcaagcctgttgtttgaaatgtccagggtcctcagattggtatattgggttaactggttatgcagatcagtaaagtggttataagacaggtttaaatgtataatattctcttgcagtccagatggtaatgtagacaagtttctgcctgaacagtccacatgcctgtgcctctctgtgcatatacattggagaggacaaatgcataaaataccaggtgtgagaaacagaaggatgaacaggcagagagacattttcaatatctgatattccatcaaagcctagaaacaaacagatacacccttcttttaatatgcaaatacagtttaggcatctgcatgggtcagttagcattaggcaaaattttcaataaacctcgttgttgtcgagtccttttataattgttccagtgattaaactaacaaagctccccttcatttatagtccaaatgcttaatccttcaattgggctatgtggtagagagagactctctccctactctctcctgcattttctcctttattttctctctccctccccccttttctaaccatattctttcttatttatctttctagagccttaatatgataaaatagcattctttgcaaataaatagttgcagttgtaggctattactatttttgatgatatgctttcttactcagatgagaaaaaatggctgtcgtgtcttttttttttaatctctgcagtaatgtaattcaatgtgtgtatatagggtagattttatttagatattaaagcagttcttcgaaattttatctgtatgtttttaggataaatatatctttgtaaaaagcacttgaaaaatccagaccaacacagtacctataaacctcacattttataaagtgatttttttctgtatatttcagtgcccattttaaaggaaaacaatatgtatatttacagagtgactgaatgtataaaaaatatccctcaactgacactgcagcaaatttctggtgcatgcacttgctattgaatatatatttaatcctaacgttgactttttcttaaaagaaaaaggaaaaagattccaaagtcagccttttactgatttaaataacatcttaccgtggtgtcgtcttcaacatcagcatctcattttctctgggaaacttaaaggtcgtcttgttctgtagagtcggaactgtttctggctgtgggctgtgcttgcctgctcagctgcattgtgttgctgtgagctgaagctctgcaaccacctgatcagtaccacataggaggactgcagagctgtcgctggtgctgactcaaatttatggcaagaggtgcacacgcaacaaaatggacaattttttaaaaaatttgtggcatcaagcgtacctatatatctgatttgctataggatgggataccttatgcatgagagttggcccttactcctttctatgtatttgtctgagattgggttccatattttaacatttgcctcattaagaatctgtgaatttttaaaatacctctactctttatcctttttacatgttgaaaataaatttgaccttcctcatggatagttttctatgatattagtcccactattttttaactcctgcctttttatattcctttctaaaattgtataattttcatgtcacttttttaatattataaaaaatctgttttatgacttttatgtcttcccccaacatggtgattattatgtttaatcagcttttcaaatttatcaaccacttaagtgttccgtcttcccttttaggatgtatagaagtactgaaatacgattattttttctttatctttctgatacaatgatcatttgaccaaggctacacacaagccaggatacatttggaaattagcatcttatacttcagattatcagttcctatgtaaaataaacatgttttattttatatatttggagttaaagttttttttctttatgcaaccttgggtggtaagtggatatgagtattgttttttccaaagacatttttggtgctgtatgaatgaccatttatttgattttatgttttaagaatagcagtatcaatttaggtgatttcagagtgttgcacatttcatctttctgggaaagtagtttatagttttaaaattacatgaaatgatataaaaggaaaatttttcatcatgagttttataaagtgagatcagatttatgataaattttgctccactcttcagtggactgcttgtgtaaatctgttaaaacacaaatctgatttccagaatggcaagtttaaagaaagcaaataaagttacggtattttcgttaccaagtggcaccatttaaaaacgagtaatatttagcatgttatgtgtaaggaaagtctctttatgccttgttactaaatcgtttgtttttctctaaattatattagcattatttagattataccacaaatagaatttgttgtattaaaatttgaagtttattttcttacaagagaaactatactctaggagccaccttttgtataaaactaatgttcctcgaaaagtatctgcattttaagagtccgcaacatagaagtttattgttgattgggtgctttattgccactttactttgagggttcagttgaactctcaattggattcttactgtggatttaggaaaccagccatcaatcatagtgcttaaaataatgtgttaaaaatactacattcagcaatattgtggaaatagggaatgcattgacatttagagttctatttaagctcatatatacactgctgcacttctaaagatgtgactgagggtcaatttaccgaccacttaaatctcttaattttaggaaacctcattaagtcagtgtagaagtagagttatgcattttcattacacttaacagtacttttgtttgaaagaaaagacatgttacttcattaatggattcaaatgaatttgggtttaggctgtatcaagtttagtttctgttgtatataatagaaaattccagtgcaatagtagtggcaatgtttctcatttcaagtttgggacataccaaattgcttcatattattcaaagattattgtaaaattctcaaaaagaaaaagggagatcatttcaatatatttgaattctaacaatctcttacactgggtgcagcacaccagcatggcacatgtatacatatgtaactaacctgcacgttgtgcacatgtaccctaaaacttaaagtataataaaaataaataaataaataaaagaaattctcatgaaataaaataatactgtattactgttactcaaaaaaaatattttttagagg

SEQ ID NO: 1244459 - DNA, 4001 bp, Homo sapiens
gtgttatttgtgaggtctctgttctgttccactgggctacatgtctgttttggtaccagtaccatgctgttttggttactgtagccttgtagtatagtttgaagtcaagtagcatgatgcctgtagctttgttctttttgcttatgattgtcttggatatacgggctcttttttagttccatacgaaatttaaagaagtgttttctaattctgtgaagaatgtcaatggtagtttgatgggaatagcattgaatctataaattactttgggcagtatggccattttcatgatattgattctttgtataaaagaggatggaatgtttttccatttgtttttgtcctctcttatttccttgagcagtgggttttagttttccttgaagagttccttcatgtcccttgtaagctgtattcctaggtattttattccctttgtagcatttgtgaatgggagtttcttgaaaggtttaaaggatgagaaaataatgtctggtttgattatccctaattataatattacgtttcagatattaatatcttattcattccacttccaccagtatttattggatgcactttatctgaccaagattgggaaggtacagtgatgtgtaaaaacaactcctgccctcagaggcttgcaagcctaataagggtgattaaacttaacagtcaaataaaaatggacacatgaatagtgatttataatcttggaagcatgagctattgtaatcaacacaccatgtgacccatgtagggcacttattattcctaacatgtagatgtgaaagctgaggctcagatcttcccaacttgactctgctcatcaggacatatgccctatatccctgtgctgccactctgccaaaaagagcagcaatgagttgaaagtggtaatttcaataatcacttattattaacttattaaaatgttataagagttctgagattaggaatttcaggctagaaagatcagagactgcctctcgtaggaggatgacatcagaactggatttccaatataccgtaactggtgactacggtatccaatgtaggccctcacattggttacgaggagattctcttgttgaagagtttccgcagggcagccttcatgtcccgatttctcagactgtagatgaaaggatttaacattggggtcactgccgtgtacattacagtgatcactgcgtcttttaggctataattggtcaaagggcggaaatacgtgcccatgactgtaccataatacaaagagacaaccgtgaggtgggaaccacaggtggagaaggccttgagcacgcccttggtggaaggaacctggaagactgtggagaagactcgaatataggagacaatgatgcatagtaatggcacagagaaaatgccaacccctaggtacatcatcttcacatgaaagtggatgtcagaacaggataacttcagcaagggggtaatgtcacagtagaagttggccacttcctggttgccacagaaggacagactagctgtgagcagagtgtgggggagggcattggcatttccaatcacccaagacccagcaataagccagatacaagaccgtggactcataattgttgtgtagtgaagtgggcggctgatggccacagctcgatcatatgccattgcagccaaaatatagctgtctgtgttacccaaggctatcatgaaatacatctgcgttaggcatcccccaaaagagatggatttgctgcccaagagatggttggccagcatcttagggatggttaccgatgagaagaagatgtcaaccaaggagaggttggcaaggagaaaatacatggggttgtgaaggcgaacatcagagcaaatggctaggacgatgagcaggtttccaatcaatgtgatggggtaaatgaacaagaagaggatgtagaagaaatcttcctgttcctgctgaccagtaactcccaggaggatgaattccagtgtagaggactggttattttccctcatggcttctttaacatgaaaggggagaggaatatcattatattagcatagttactgtgtgtagtgataatccttctccatcacttctgacttaagtgattcagctgtgtatacacctgagtttattaaattatagagatatccagtattttggggaaacatccctgtaggtcaataggactaattgtcattcacccctttatagtcatgtctaaaaagtgagcaatctctgaatcagaagtgcccatccttcctgttccaagcaccaccactaaacgcctagaaattaatcatataacaaataattgtcatgtcccatggtctagtcactttgttagacctcatggagaagttataaatatgtgacaaatacagtttattcatctatttattcaagacgtggtctctgttctcaaggaccttacaacttagtggagaagccaaaatcacacactaattttattacccatgataaggagaggacagcattttgaagtctttgacaaaatattccagtgcaaaaggtctgctggtgaaagggccagcccagaaattaggaatttttccattgaaaaaactcagagggatcccagagcccaggaggtaacatgtatctacactgtgtcggaagattgtaaatcacagggaccagtgcatttagatcctactaaaacagtctggagaattttctccccaggtgtctcattttcaaagtaaattttcaccatttcctttaaaagaaaggaaaaaagagttgttggttttttttctctctttggcaagccctcaagtatatacaatcacaatgcctttctctcagccttctcttcctgttcttaattatttctttgggtgactcaagcaactgcttagtggcttcaaccattgcttagtaaactgtgaggtttacatctgtaggtgtgaacttttccctccgtatttccacttcactcatactgccaacgtgaccaaactgcacatccaacctaagatgagggcaagattttaggggaaggaaaaccatatcttgtttatttttacctccttcagatagactattatggaatattttctttttttttttttttcttttttttttgagatggagtctcactgcatcttgcccaggctggagtgcagtggtgtgatctcggctcaccgcaacctccgcctcccaggttcaagtgattctcctgcctcagcctcctgagtagctgggattacaggcatgtgccactacgcctggctagttttttgttgttgttgttgttattgtttgtatttttagtagagatggaggtttcatcacattggccaggctggtctcaaactcctgacctcaggtgatccgcccgtgtcggcctcccaaagtgctgggattacaggcgtgagccaccgtgcccagccaaatattttctattgtatgtatcaataagttttctcttaatattttttgagtcaaatccaggtatatttcttgtactccccatatgtgggatgctcacaagcttaatgactcagtttctctctcacctctacatctaatcttgttgattcttcctttaaaataattattacataattcagcctttctactaaatgtcccagtgcttcagctccatcattgttttctccctgaagtattgtaatgctaactcaactgcttgactccaggtttcctcctctttgatccgtcttgtactctaagacttaaattacagcggcaacgatcagctgcttagtcaaatccgtgttgttctcttcttcttggacgttcaattagactacatttcccagactcccttgcagtgaggtgtgctcatgtgactgagttctagccattccacacgtgtcccagttctgggctcctccacaccttcttacccttgtgccagttggatgcaaatggagaggaggctgaacaggatgatggagacacatgatggaatgaacctgtatccccagtactccacactcaggagaacctcccccaaacaaaaaca

SEQ ID NO: 1244460 - DNA, 4001 bp, Homo sapiens
catgattacaattatgtctggggtgcttcttattctttccatacccagtagcaaaggtgaatataaactgcaccaaccagaagcatttaaacagtcgctactactgctgaggcctcagatccccagaagtgaaaatttggcttagctgaccagataagggccaagtgccagctctttggtacctgtgttcagagacctgggcatcaaatgtgtggtcatccctccttggagggtctaggtttcggtaacaccacatttacacttttattttcctagttctgcctgaggtatcttcttcatgccgttggtaatctgtgggtggcatcagcatctgccttttcactatttagtctctttcaggatacacctatgtagccaattctctgtatcaaatcttcttggtataaatataccaagtgtgatttctgtttcctgcatggatcttaactgaccttaacagacataccagctctataatacatgaatgaatactatgcagtttgattatgtttattcattatcagattgtatttcagaaactaatatttttatacattttcctgctttccaccaatattttatatgatcaaaatactaaaaaagtaagtgatatgttaacacagcttttgccaccagagtacaagtatagtaggggtggctagacataaaagtccagtaaagattacattagaatagtaatttgcagccttcaaagcatgagccattttgatatacacaagctgtgtcagagagtccggcagatattattttcctaacatgtagatatgcaagctgagactcagactttttcaactttactctgctagtaaatttctgctaactgggacatgaacctgatattcccagcctgccactctctcaaaaaagagcaggaatttgtccaaagtgataatttcaataaaatatcacatccgttacaagatttctggtagaggaatttctggctcaaaagaacaaaaggagcttcttgaagggcaatgacattggagctggatttccaagtgtatcccacttggtcattacagtatccagcgtgtaatctcacagcggctatgaggagattctcttgctgaagagtttctgtagggctgccttcatatcccaatttctcagactatagatgaaaggatttaatgctggggtcactgccacatacatcacagttatcactgcatctttggggctgtaactggtcagagggcggaaatacatgcccatcgttgtaccataatataaaaaaacaactgtgaggtgggagccacaggtgcagaaggctttgaatagactcttggtagatggaacttggaagactgtggaaaagacctgaacataggagacaatgatgcatagtaatggcaaagagaaaacgccgacccctaggtacatcatcttcacattaaagtggacgtcagaacaggacaacttcagcaaaggcataatgtcacagtagaaattggctacttcctggttgccacagaaggacaaactagctgtgagcagagtgtgggggagagcactggtgtttccaatcacccaagacccagcaataagcaggatacaagaccgtggactcataattgttgtgtaatgaagtgggcagctgatggccacagctcgatcgtatgccattgcagccaaggtatagctgtctgccttggccaaggctatcatgaaatacatctgcattaggcatcccccaaaggagatgaacttgctccccaagagatggttggccagcaccttagggatggttacggatgagaagatgatgtcaaccaaggagaggttggcaaggagaaaatacatggggttgtgaaggcgaatgtcagcacagatggccaagatgatgagcagatttccagtcagtgtgatggggtaaatgcacaaaaaaatcacaaagaagacattattctgttcttgctgactagtaactcccaggagaataaaatccaggttaaaggattgattttctttcttcatggcttcttcagcatgaaaggggagaggaacccagaattattagcgcagttagtgtgtgttatagtctgccttatctaccacttaaacgtttttaattattttacaaattcacctgctgtcaaacttatccaccacttttcattagccatggctatacctggtttttacaatcataaatatagccagcacttttgggtaaaatctctgttggtcaatgggacgaactctcattgacctcctggacactcatgtcaaagaagttagcgatctgtgaagtaaagatggttgtccttccaaatgtagcaccaccaccttaatatctataatttaatcacataacaaaaacctaatttcatgtttcatgtcttagatttttttttactttgtagagaaacaataaatatgtgaaaatacagttattcatccacttatttgttacacaagacatagcatctgttctcaaggaccttataattgaataggaaagccagactcacacaataattttattacacatggtaagaaaaggatagcctcttggagtccttgtgaaaaaaacaaacaaaaaatcctccagtgcaaaggatgtatcatagtaggaatgcagtgaacaatttaaagttgttcctccaaccagtctcggggtgagcccagagcccaggaagtcagaggtgtctacactgccatcagattctaaaacagaaagacaactggcattaggtcctagaaaaacaagctcagtgaacttactccacaggtgttcgattttcaaagatattccctatctttttgacagcttttctctcttttcaaagcccataactatacataatcacagtgctttttccactggcctttgtcttggttcattttgtgttgctataacagaatacttgagactggggaatttataagaaaagaggttgaattgtctcatggatctgtaggctgggacattcaagagcgtggccctggcttctggcaagggctttcttgctgcatcataacctgtcagagaaggtcaacagggaagtggatacaggggaagagagaaaacccgagaagtatactggttttatcacaacccactcctgtaggaacattcccttaagattaatccagtcttgagagaatgagaacacacttactaccatgagaacagcaccagaccactcatgagggatccacccccttgactcaaacgcttcccactaggctttacctcccaacacctcccacactggggatcacatttcaacatgagttttggtgagggcaaactcaatccatagcagtcttctcttccttgtcttccttatttctttttgtagtaatccaagtccacagtggattcaactattctttagtaaactgtcatgtctgtatctgtggtctcgatttctttttcccatatttccatattcagtcatcctgctaacatgtctgaccaaaccccacactctgcacttaaaacctaagtagtttgcaagatgtttcttttctttttttttttttttttttgagacagagtctcactctgttgcccaggctggagtgcagtggcgagatctcagctcactgcaagctccacctcctgggttcacgccattctcctgcctcagcctcccgagtagctgggactacaggcacgcgccaccatgcctggctaattttttgtgtttttagtagagacggggtttcacgtgttagccaggatggtctcgatctcctgaccttgtgacctgcccacctcggcctcccaaagtgctgggattacaggtgcaagatgtttttgaagaggaaaatcataacttgtttatgtttatgtcttccaaattgatttttgtaaaatatcattcattttgtgcaccaattaatttgcactcaattattgagttgaacccaggtttatttcatggttccccacatgtgggattctcacagaaacactcatccagtttatcttctgcctgtacgtctgaccttgttgaatcttcatt

SEQ ID NO: 1244461 - DNA, 4001 bp, Homo sapiens
gatctctctttgtgctactctgtgctggcttgggtgaggggtgattcaggtaatgtgacagagttttttctacaatgttcaatatggtgttttttctacttctgtgtactaccagggtgctataaactttcacttggattctggagctctcacaaaggtattttcatctgtggatggttgataaattagtctgtatgttggtggatgagagatacaactgtcgattccaccatcttgttgacatcactcctttcacccgttttgaaatatcttttacctgatgtcattgcagcaatatttcacttaaaatatttagtattttccaaatatgtctgtttctctttttaatttcaagctttatatattcctgtgctttcatcgtgtctctttaaatacatctatctatattttattttttaatcagtatgttgaacattactttttaattgatgagttaggtccatttatgtttaatgtaaatttatgtacttccccgagtagactgtgacctcacatttgtaacccagtttgaggcctctgtacactgtcattatgaatagaatgagttgatgaatgactgcatgaatgtcaaatgaattgaacaccacctgtcgaggtctatatcacgtgctggatcagctgatacaaatatgtatgattgcaatctctttcaaacctccacagccatgtgactaactttcttatcagctactatttactttctgtactttggatgtgtgctagatgagagacacttctaggtttaaactggatatagtcagataaggccaagaatgtggccctgtagtcaagtacattgaagaatttgaccctgcaacattctagtgttggtgttagtgtgaccttatttacggccaaggctgatgagacctgggggacaccaggttacaaatatgtcttttttatcaccacatatctatatgctgtctctgagctggagccatgtcccaatcactgctgtataacacacaggacaatcccttacatagggtgaaggatattcctagtctccactttaatgctgtctttccaaattgccctcatgtcagcctcttaaagtgtttatctaggagtcttcccagagccccatgcatgtccttgttcctcaggctgtagatgaagggattcatcatgggtgtcaccacagcatacatcactgtggctactgagtccttcacagagtaggtatggaggggctttaggtataccatacaaagtgtcccatagaagagggagactgcacccaaatgggaggcacaggtggagaaggctttgtatttcttagagactgagggtattctgaggatggctctgataatcagcacataggaaatgatcacgaatccaaagggaatgaggaagatgaagcagcctgtggcaatcagcactgtgtgattaatctgaatgttggaacatgccatcctcagcaatacatacatctcacagaagatgtagtggatttttcgtgacccacagaaggtcactctggtcatgaggagggtgtgtatgaggccatagaggacggataggacccaacacaaggaaaggagtaagatacagagcttagggctcatggctgtggtgtagtggagggggcagcagatggccacatagcggtcatatgccatcacagccaggatgaggttgtccagggccaccaaggagaccaggaagtagagctgtgtcagacaccctgcataggagatggctttgttatgggactggaggttcaccagcatcttggggattgtgttggtgacaaagaagaggtcagtgaaggagaggttggccaggaagaagtacacgggggtgtgcaggcgggaatcagagctgatggccaggatgatgagcacatttcccaccaccgtgaccaggtacatggacaggaacatccaaaacaggatccgctgctgctcaggactctctgacatccccaggagaaggaactctgaaccttcactctggttgcctccatccatttccccaactctcttttaacattaacaccagcaaatgtttaccaaaagtccttaattgaataaaaacatgaagataagcaaaatcaacattttcttagaattaagaatgtcttacacccaattttataatttttgaaaataagaaagtgaaaaatataacaaagtttttatgcgatataattatttcagctacttcaaagctgggaaactcaatgttaaaggaataatgtgtaattcttattttcaatcctgtcatcttacactattcttgaagtgtttggtgattagtgtgttatgatatgtatatgtgttaaaataattaatatagatacatgcagtataagtagttcaaaaaaggaagaaaataaaagtatttgaaaggagtaggaacaattattatttgttgatatgatgatctatctgaaaaaagtgggactatccactgaaagactactagaaatagagtttagaatacttgaaatcaagtctttccctgctagtaagatagtacgcactgccacttacttgctgtgaaacctcaggtagggttccagagttccttaagactcagtttcttcatgcgaatcatgagttatagggtgggggaaaattaagtagtaaagtgcttaacacaaggagttggtaggcaattagcactcagaaatgttgcctattattgttatatttaacgagaatcaggaaaaatgttataatgaaaaactatctcatccccactgtcaacaaataaatcatggcactcagatgttaacaagaatcaggcgaaaccttcaaattctccagtgaggggtaaagtaaaaattaaataaattgataaacatatcaaggtttctaatatgaagagaagtgtcaccaagctatatactcttttgaattaattgaaagtttactggatatcaaaattataacagggttttggagaaatgaaactggtctaaatttcatctaaatataagcatgtagataagctagaaaaacattgaataaaagaataacagggtgatgcttgcacatcaaatattaagaattctaaagcaatatgatagtaatgttggaatgaacagatcagtagaaacttcacagatagacacaaaaacgtggaatttggcagattaatttgggtgcactgtatattagccggtaaattctgcatgggtacactctatattagcaagtaaagcctgcattattcaagaaatggcacattgagataactgtgtaattaatttcggaggactagttcgaacaatattttgtatcttatcaaacacatttaaaacatactaaagattaaaatactatagtgtgcctttttttccttcgaaagcctaatgtgtatagaataaaatgtttaaaaaatcaaaaaagaaaaaagaaacatgtatatgtaaaaatataaaaaaatgtagtatatataaaacagctgaatgcggtcagggaaagagtaagatctcttccaatactactgacagttctcagtgactgtgggaactaagcaaataggtaaataccaataaccagccccattaggggagactagtaccctgaattgttacaataaattatctaaaatgtccatattccaacaaaatttatgaaccatgaaaagaaacaaagtatgatccacatatgaggaaaaaatcaggcaacagaaactacctgtgagcacaatgtgatgtcagccttctttgaaaagacctcaaagtagccattgaaaatattttcacaaaactaagagaaagcatgattagggaagtaaaggaaggtacagtgagaatgtcatgacaaatggggaatatcaataaaaagaatggataaaagagagccaaatggaaatcctgcagtcaaaatgtacagtaactgaaatgaagattttattagtcaggctgaatagtagtattgaactagcagaaaaaatagcattctttaagatagattgatatcaagctgaaaaatagaggaagagaaaaaatgaagaaaaat

SEQ ID NO: 1244462 - DNA, 4001 bp, Homo sapiens
tccctcttcatcaccctaatcttgatgttatctttagtttttaccaccattcttcccactgtagtctttactcatgtcttttctttctttgctcaatgttccaggggtttgttcattttattttaaaagaacctatctttggcttttaaaatcctcttcattgtatttttgttttatattttattgagttcgattcccaatttatttattaaaatatctcctttcctctatgttctctgggatcactaaattgttcatttgttccagaatcctccccttctactggccatactaccactgctatttatgaatatgcatttatgtttgagagttttgttttcagggatggatggaattcttgcataaagagaaggaaggtgaggaactacagaaataaaagataggatggtctttccaagggcaaggtctgacttcctacagagaaaaggaatgcagggaaaaggcaagagagtgttgctttgaggccccaaagataaaatcaacccagagcacaagaggaatcttgttggcatttctgcatgaaccatatgagctgtgtccagagtgactatatgtcaacattgaagtggtgcgtgttgtacctgttagaacatcaagaaaggggaagcctcacccagggcatctgtggtaggggtagtgcaaagtgtcttctctaaagagcttgaagatagcaggctccttagagaagccaaacctctgggtcataagtgaatgggtgctagaaaacatgagagccctccctaagctatgactgtgtatatatagataagcctaggactgtgggcctatgatcaagcaggtttaaatatttgaccctgtaaaatcctggtagtagtgttagcatgacattatttattgccaaggctggtgaggtctgggaggcactgggatacacattgtgtcttttcttcaccacaggtagatatgctcatcctgagctggagctgtactctgactgttgcatatcccaaagcataatgccttatgtgtggagaaggatatttccggtctccacttcaatcccctttccaaaattaccttcatttaggcctctgaaagggtctccataggactcttcccggagccccatgcatgtctttgttcctcagcctgtagatgaaagggttcatcataggtgtcagcacagcatacatcactgtggctactgagtccttcatggagtaggtatggaggggctgcaggtacaccatagcaagcgtcccataaaagagggagaccacacccaaatgggaggcacaggtagagaaggttttgtatttcttagaggccgagggcatttgaaggatggttctgacaatacgtacataggatgtggtcatgaaccctaagggggtgaggaagatgaagcagccagtggcaatcaacgctgtgtgaatgatgtgggtgttggaacatgccagccacagcaggatgtacatgtcacagaagaggtagtggatctctcgaggcccacagaaggtcaccctggtcaggaggaaggtgaggaggaggccatagagaacagacagcccccaacacaaggagaggagcaagacacagagcccagggctcatggctgtgacatagtggagggggcagcaggtggccacatagcgatcatacgccatcacggccaggatgaggttgtccagggtcaccaaggagaccaggaagtagagctgtgtcagacaccctgcataggagatggctttgttctgggactggaagttcaccagcatcttggggattgtgttggtgacaaagaagaggtcagtgaaggagaggttggccaggaagaagtacatgggggtgtgcaggtgggaatcagagctgatggccaggatgatgagcacatttcccagcaccgtgaccaggtacatggacaggaacatccaaaacaggatccgctgctgctcaggactctctgagatccccaggagaaggaactgtgagttctcactctggttatctccatccattcccccaactttctgtaacattaacaccaacaaatgtttattaagtgccctcatttgaataaggacacgaagataagcaaaatcaactcttttcttagaattaaaatatcttggactaaactttaaaaataacaaaagcaacaggtcattataggcacaaaaatagaatatggaaagtatgcaacttatttattccagcaacttctcacctgacataatgaatattataaaaacaatgtctaagccttatttttaatcctgccatcttccaatagtcttgaagtgtttaaagtttagtgtgttatgttatgattttatacagggttttaagtggtatttaatacaggtatatgcattacaagaaaagattattgtccaattggaggaagtggagaaataaaatattggaaaggagaaagaagaattattattacttgttgatataatgatctctctgggaaatctaagaaaatgaatggaaacatcattagaaaaaaaagatgtctgtgattagtcagtgaagtgacccatgacaaaatgaacaggctctcagctttcatggtccccgtaagccacgtagtgcagtgctaaagaccgttctgtgggaactcttttttttttttttttttaattttaattttagattcgggggtgcatgtgcagatttgttacaaggatatattgagagatgctgatgtttgggcatctattgatcccgaactcttaaattcaagtcaaagcactgcctcttcttggctgtaatgcctcaggcaggtcacttgtgttctttaagactcaggttttttaaatgtgaaaaatgggttggggtgaggagaaaattaaggaataaagtacttaacacaaagagctgacatgtggagagcactcaataaatagtacctgttattatatatgaatgataagaatactaagattaaaatatgaaacacattatcagcaaacaatctatgcattaaggtattaataagaatctctattgaggcataaagtaaaaatttattaaatggacagatataaccaagattctagataaaaaagatgagatgttgcaaaggtgcatattctgagttgttctaaaatttaacctatttgaaagtcaaaattgtaacagggttttaaagaaacaagagctagtttaaatttcctataaaataggaatgaaaataagctaggaaaatgttgaagacaaggagacacttgctctattaagaactttaaaatagtgggggtactggtgctagaatgaacagatcagtagaactgtctagaaacttaagaaacagccaagttcatgtggaatgtgacactttaattcaccagggaaaggttgcattatgcaataaatgacattaggacaactgtctacttattttttgggaaaagttacatcaatgttttgtattttatcaaacatactaaaacataccaaacatactagtatattttatcaaaatatactaaagattaaaaaattattttttccttttgaaaaactgaatgtatatggaataaaacattaaaaatctgaaaagttataaaggagataataaaaattgtatcaaattccagcatgtagagttagataaccatggctaatgtctttttagccgagacatgaaggaccacaaaaagccagtcttgtaacacaataggcaaagagctttgcagaaaaacagccaccctgagcagagcccctgagcagggaaaggtcattcttgtgtttaaggaagtaaatataggccagcatgtctgggagcaaagaggatattggtgagacaggatgttgtgcaatggccagtaatgaactataaagcagaagtggctgtgcatatttagcaactattgtttttcttcatagtttatcaacagtatttaaaaaatcaggtatggctgttgcatttttaataaaacactttttcagtgtcactcaagatacattatgtgaatagccttcttaatatggaagcatacttgtatgcc

SEQ ID NO: 1244463 - DNA, 4001 bp, Homo sapiens
ggagacactcaaagggcggctgggaggttaagctgtttagatcttatttagcactaacctaagattatagagcactatttagaaatgattctatccatgcactttggaaggcctaggtgagcggatcacaaggtcaggagttcaagacctgcctggccaacatggtgaaaccccatctctaaaaatataaaaattagcccgacgtggtggcatttgcctgtaatcccagctactcgggaggctgaggcaggagaattgcttgaacccaggaggcgggggttgcagtgagccaagatcatgccattgcactccagcctgggtgacagagcaagactcagtctcataaataaataaataaataaataaaaataaaatgattccacaagccaggcatggtgcctcacacctgtaatcccagcactttgaaagtccaaggtgggaggatcacttgaggccaggaattcaagaccagcctgagaaacttagggagacctcatctctacaaaaaaatcttaaaattagctgggcgtagtggtgcatgcctgtagtcctagctacttgggaggctgaggcaggagaatcccttgagtccagaaggttgaggttacagtgagccacgattgtgccactgcactccagcctgggcaacagagtgagaccctgtgcgaaatagaaaataaaaataaacaaaaaatttaaaaatttttttaattaaacaaaaatgattctacaatcaaagcaaaattctgagtaacataacaaaatcctgtgataatttaagaatgtggggcatgaagaccatttaaaacagttgttcttaaactacatttttccaagatcaccttgggaagacaaacaggaagtcttagccaggtcaccaagaccctcttccctagttcaactactcagctatgcttcatctccactacatattgaaaaattatgtacgatgccatttcaacaaaaggatggtgaggaaataatttagaataatattccaatattaatatcaatattttactggataaactatgtaatagctccaagtgttatcatcagagagagaagaaagttttcttctgatgaatgactctgctcagggctcccttcatgtctctgttcctcaggctgtagatgaaggggttcagcatgggggtcaccacagtgtacatcatagccatgacagtgtcctttagagtagaactattagctgatgagcataagtagagaccaataacggttccatagaacagtgacaccacagacaggtgggagccacaagtagagaaggccttgcagatacccttagaagaagggaccttgaggatggaggagacaattcttgcataggacccaaggatgagtaggaatgggatgacaagaatgagccctcccatgataaatatcacccattcattaactcgagtgtcagagaaggccagcttcagcagagcagacatatcacagaaaaagtgggggatcacattgtctgcacaaaaacacaacctggccatgagtaaagtgtgtaacatggcatggaaggtggtcagcacccaggacagcgccaccagggcgagacagagcatggggctcatgatggcggtgtagtgcagggggaagcagatggccacatagcggtcataggccatggccacaaggaggaagctctccaggtctccaaataacaggaagaagtacatttgggtcaggcagtccgcataggggatggatgggtcctggttctgcatgttctgtaacaacttgggaatggtcacggaagagaagcagaggtcagagaaggacaagttgctgagaaacaaatacataggcgtgtggagatgggagtccagtcgaatgaggacaatgatgaggaggttccccaggagggtggtaagatacatggccaagaacagggcatagcacaggttttgctgctctggttggatgggcaggcccaggagcaggaagtctgagatgctggtttgattttgtcccatcatgctctgtctccagtatctttaatggaaaaacaacagtatcctttaaaatctgaattttaaaatggagatatttctgtgacacttggtctgctgagtgttctgcgaaaattatttaactgacattataataatcatctctataccacaaatatctataattagaatctctataatcagaaatgacttaactttatcttttttctcttcatttatctttaacatgtaacaatattccatcctttctaaaatactcatctatttacttctgaaacataaagtgtgttggtttctctcttacctgcctcaccagtaactgcagttggctcctcctctgtcagtatcttacatgttgatattcctcagggatttttctaaacttcattttttttttataattctgcataatggccaataaaaacacatctactccaatggctttaattgccatttaaaactcaggtgtaggctgggcgcagtagctcacacctgtaattccaacattttgggaggctgaggtgggtggatcacctgaggctaggagtttgagaccggcctggccaacatggtgaaaccttgtctctactaaaaatacaaaaattagcctggtgtggtggcgggtgcctgtaattcagctactcaggaggctgaggcaggagaattgcttgaacctgggaggcagaggctgcagtgagccaagtttgtgccattgtactccaacctgggtgacagagtaagactctgtcaaagaaagaaaagaaagaaagaaagaaagaaagaaagaaagaaagaaagaaagaaagaaggaaggaaggaaggaaggaaggaaggaaggaaggaaggaaggaaggaaggaaaggaaaggaagaaagaaagaaagaaagagaaagaaagaaagaaagaaagaaagaaagaaagaaagaaagaaagagaaagaaagaaagaaacaaacaaacaactcaggtgttcaggtgtagcgttctctagtatacagaacttagtatcctgagtctcaatgattaacatctcttggatggatcacaggcatctttggcttgacagatcctaaatgacattctgatctcaccctgctcctcttctaactccatcctcctccactctctcatgtttggtgaatggaatccaggctcaagtcagaaacctaaggtttgatttcattaattcatttctctcacagtcaatatccaatctagcaagtcctacagattctgcacttcattctctttctaattcatccactccttatcccaactaccacaaccctaaaccaggtggaaatcttgtattacctggactattgaaactgcttctcaattcatcttcctgcccctgtgtttcaacaaccttctcttccaacaatcttcatttacactgtggcattctgagatgaaaatctgatcatccctctcttgtgattaaatatttcgtggattatcattgttcttaagatagaggcaaaattcctttcaagagcacaaaggatgtttcattacctgaccaacacctgcctccacagcctcacctggccccacaatgactcttgcatcctcttttcagcaatgctggacttatacgtcataatttcttgcctccagcctttcatacttgctattcctcctacctagcacctatccccgctatgccctgtcttcatccggctcattctcacttatccttcaggtctattacatgtaacttgctcagctaaaccttccctgtgtctctgtaaaccaagtgagacctgcttctatgcttccgcagcatctcatactcatccaatagcactccatgctttgactacctgttgacagctgacttccttaccagactgtaaactctgtgcctgaaaggccatgtctgccttcataactgcagcaagacagttgcggcacttggcgtggtgcccagatattgctgatgttttctaaatagctgttggctgtctctcaggctggaacgtgcattcctccaacttaaaaggta

SEQ ID NO: 1244464 - DNA, 4001 bp, Homo sapiens
ccagccatcccattactgggtatatacccaaaggactataaatcatgctgctgtaaagacacatgcacatgtatgtttattgcagcactattcatgatagcaaagacttggaaccaacccaaatgtccaacaatgattgactggattaagaaaatgtggcacatatacaccatggaatactttgcagctgtaaaaaatgatgagttcatgtcccttgtagggacatggatgaaactggaaatcatcattctcagtaaactatcgcaaggacaaaaaaccaaacaccgcatattctcactcataggtgggaattgaacaatgagaacacatggacacaggaaggggaacatcacactctggggactgttgtggggtggggggaggggggagggatagctttaggagatatacctaatgctaaatgacgagttaatgggtgcagcacaccagcatggcacatgtatacatatgtaactaacctgcacattgtgcacatgtaccctaaaacttaaagtataataataataaaatttaaaaaagaaagaaaacaaagttaggagacaggctgatgtgaacacttgctcaggaaaatgagtaaaaaaaatttattcaaaatttgtagttttgtttagcaaagaaggggactgagatgtctgggtcttattattgacatgagaggacagaatatcatttaaagcagacctacagggttttttcaagtacacatgataaactggtggtttaacaatgaagacggaaattttaatttaaatattttaaatctttaatttaaagattttcttcacctgggattagcaaaaaggaaaatcttcctagcaggttactgagaacaccttacttcaactacatatcccccccacatctgttttacttactcagaaattatgtaatattacatttaaacaaaaagtttcatgtgcagaaaaaaagagatctgaaataatattgaaatattaatgtccatgtatctattagataaaattatataagactcccaagtattactgtcatagaaggaagggatttttccttttacaaatgaccctttccagggctcccttcatgtctctgttcctcaggctgtagatgaagggggtcagcataggggtcaccacagtgtacatcatagccatgacagtgtcctttagagtagaactattagctgatgggcataagtagagaccaataacggtcccatagaacagtgacaccacagagaggtgggagccacaagtagagaaggccttgcagatacccttagaagaagggaccttgaggatggaggagacaattcttgcataggacccaaggatgagtaggaatgggatgacaagaatgagccctcccatgataaatatcacccattcattaactcgagtgtcagagcaggccagcttcagcagagcagacatatcacagaaaaagtgggggatcacattgtctgcacaaaaacacaacctggccatgagtaaagtgtgtaacatggcatggaaggtggtcagcacccaggacagcgccaccacggagagacagagcatggggctcatgatggcggtgtagtgcaggaggaagcagatggcggtgtagtgcatggggaagcagatggccacatagcggtcataggccatggccacaaggaggaagctctctagatccgaaaaatacaagaagaagtacatttgggtcaggcagtctgcataggggatggatgggtcttggttctgcatgttctgcagcaatttgggcattgtgactgaggaaaagcagaggtcagagaaggacaagttgctgagaaacaaatacacaggcgtgtggagatgggagtccagtcgaatgaggacaatgatgaggaggttccccaggagggtggtaagatacatggccaagaacagggcatagcacaggttttgctgctctggttggatgggcaggcccaggagcaggaagtctgagatgctggtttgattttgtcccatcatgctctgtctccagtatctttaagagaatataatagggtccctcaaaaccgtgaataaaaataaatatattcctatgatacatggtcaacaggtgttcaatcactgatttcaccctcattttccctaacaacaatctctatattcagagatttctataattatttctataatcagaaatgtgccacatcacaaaatccacgctacttttcacactgatccatctcactttgcataacatgtagcaagattgactcctcctttctttctaaaacactcttatctattagcttccgtgcaatcacactggtttcctgacacatattggccattccttcttaacaactgtaaatggtttcttctctaacagtatcttatacgttgctgttttctgggaatttttcctaaattctgttctaattctacagatcaagccctgaaagagttcacctgtccccgtgacactgattaccatctgaacttcctgggtaaacctatcatcattagtactgcattagcagttgcttcctgattatctccctatggatcatgaccatcctcagcttaacagatcccagatgaaactcgttatctcaccctgccactcttccaatttgctcctccagtctctcatatctcagtaaaaggaatccaggctcaagtcagaaacctgggagttttctttcatttatttatttctctcaagatcaacatctaatcctagcaagttatatagattctgtacttcattctatttctaattcacccactgcttatcccagttgccacaatctggaacaggctgacatcttttcttgtctggactattggaatagtctcttacttcatctccctgctgctatgctcactagccttcaatccattcacactgtggcgttctttttttttttttttttttttttttgagatggagtctcgctctgtcacccaggctggagtgcagtggcgcaatctcagctcactgcaagctcctcctgctgggttcacgccattctcctgcctcagcctcccgagtagctgggactacaggcacccgccatcgcgcccggctaattttttgtatttttagtagagacggggtttcaccgtgttagccaggatgttcttgatctcctgacgtcgtgatctgcccgcctcagcctcccaaagtgctgggattacaggcctgagccaccgtgcccggccacacactgtggcattctaagataaaaatctgatcatcattctcctgctcagagtccttatggattctcattattcttaacatatacacaaaattcctttcaaggacacaaatcatatttcattatctgacccatgcctacctccacagcctcatctggtcccacaatgactcttgcatcagcattctccagcattctccagcaatgctagacttagaagtcataatttcttgcctccagacgttcacacttgctgttccttctgtgtaacatcttacctctgcttttttttttttttttttttttttttttttttttttttgagacagtctcgctcagccatccaggctggagtgcagtggcacgatcttggctcactgcaagctctgtctcccagcttcacgccattctcctgcctcagcctcccgagtagctgggactccaggcacccgccactacaccaggctaatttttttgtatttttagtagagatggggtttcaccatgttagccaggatggtctcgatctcctaacctcatgatccgcctgcctcagcctcccaaagtgctgggattacaggcgtaagccaccacgcccggcccctctgccttctcttacttggcatacccctgcttctcctgcaggtttactacatgtcactggctcagctcaatcactcagaccaggtgagacctgcttctaagtttccacagcatcttgtactcatccagcagcattcaatgaccttgattgcttgtttatagctgagtttcctaccaaattgtaaactccatacag

SEQ ID NO: 1244465 - DNA, 4001 bp, Homo sapiens
gttggcctgagttgaccttgggagaaatacggaagagtgtggttaactgtggacatcagttatgaactggtggcactgggctcgcatgctacggtaaacagctggaagttgattctgcaggcagtttcaagccactggacatttctcttagtgatataatggtaccctatgaagattaatctgattatggtgtacagagttgatggaaggcgggtagactgaggactgaagaccaactaggaggaggctttaatcattcaggcaggagagcataaagtgtccataaaaatcattcttttcccctaactttaagttgtaaccatttcagtgggattcagcacctatcaatggtaccaggcattacgccatgtggtaagcattggggctgcagagatgaaatgagtgtggaaaaaattgccctgaagaggaacctgaggttttcacatgaagtctaaggtggcaggaggattatgggtcttggaggcctggtaagacactgcagtgagtctgtctgaagatgccatctccatcaagcccttcctagacccagttcctcatcactgagcatgggagcatcacagatacgggcagtgcctgtggcagaaacactgtgggtggggatccgagtgatcaggatcacagtgatgctgggggaaggtcgtccttccctgaattttattcttggccctatacaacagcccagccagatattcccttatttcagtcatgagctgtcccatgttgtttaaaaagcattaactaataacattattaaatcatcaatattattaactatagtaaatataataaggcatgacattatattatacatctggatggctgtggttttagaacataattgtaagaacttcacctgtgacattggcctgatgatgggttatgatgcagtcctgtagcttagacatgaatatttcaggttcagatcgtaggtactggaacagaggtctctagattctctccatctttcattcttcactgcttactgtggtgaacgcaggtgcatggagacccccatattggatgtcaagtcactaccactaaggggaatgaattttccgaacccagattaactttctcagggaagactttatttcttggttcctcaaactgtagataaagggattcaacattggagttaccactgtgtacatcactgatgcaactgtgtccttctgggccgagtgggttgagggagaactgaaatcaacacaaaaagaagtcccaaagaagagagagaccacggagagatgagagctgcaggtggaaaaggctttccgcttcccctgagctgatgggatcttcaggatggtcgagaaaacgttcgtgtaagagataatcaggcaaagcacacaaatgagtcctgtgagacccccagtgatgaagatcaccagctcattggtgaaggggtctgtgcaggacagactcaggaggggattgatgtcacagaagaagtgtgggatctcatggtttgcgcagaaggacaggctgttcatcagaagtgtgtgtagaagggagtggagggcattcatgatccaggatgcagacacgaggaagatgcagagcccagggctcatgatcagaatgtaatgaagtgggtggcatatggccacgtagcagtcataggccatgaccgccaagaggaatgcctccagcatcacaaataacatgaaaaaatacaactgtagtagacaccctgagtaggagatggcctgactctggatctgtatgtttgccagcatcttagggactgtggtggacacaaagcaggcatctgcaagggagaggttggctagaaagaagtacatgggggtatggagttgagtgtcagtaatgatgactagaatgatgaggaggttgcctgccaccgtgaccaagtacatgaacaggaaggacccaaagaggggcttctgctcctccagctgctcagagaaccccaggaggaaacattctgagatgctggtcagatttttcccctccatttgtctgtaggaagaaagttgggttaattgggtgacgttggtaagccctggattgtgaactctgaaaattatgcaatattccagtgttgatcttctagtgtgaggttggatcataggaaatctccactatttgactctttgggacctgcaaaaatggccatttcatagggttcgactaaatatttgcaaattcctgtgcttggtgctatgagaaaccacagatttgtttgtaatgcaatgagaggcttttaaatttattccataagcattaagccaatatgtgtattttggggctgggctggaggggcttgctggctttgctctggtagtgttcatgtagaaactatgacatttatacaacccaagattttacaggtcaaatgagcccattgtaccaataattaaaaagacagctcctggaaaggggttttggaattgggaaaagcatggctaacatggaaatcattatcactgttatctacacagcgggtctggccagaaacctgagcgtcattattgacccacgtttctccctccctgcctacatccaaccaccaccaaagcctggcaattttaccttctcaatatggctacaatttactgacgtctctctgtttactggtcaccatcagtcccagctgcagctcatgtcattcagggcactgtgatttctcacttggatttgggcagttgatctccatgcccccaggtatgcccacctgccacctgctgttctaaatacacagagaataggcttgctaaaaatcaaattcgactcttgtctttctgcttgaaaaatccttcatacactcctcattactcccaggataaactctaaactgaacacggctgaatgtcctggatcttaccgtcatttattacagacatccccagttcctcatgaaactccctcctccactccacactttatgcactaatcatagtttcaattattttaaaggcccagatactccctcacctttaggctttctcaggctgaaatagtttttcccatcccatttatcagacgagctaagcttcaggtctcaccttagatgtcacctcttctgggaagtctttcccaactcatcctctcaccagaaactcaggttcgtgaccttcctaatgcagtgcctcccccatcacagcacgtgtcaccttggattctgagtgtctgtttatatgagtgtccctcattctgctgtgagcatcactgggagtaggcagagatggtgcctaattggctcagctttgaaatctagcattagccttgaggctggtacaacacagatgctcagtatgaatctatcatgtaaatacataaaccccagagaatggaaagagtgggaagaatggaaaggggctttgctatagaggtaatatcaggcataagaattagcctgaacctttattattattgttatgatttttgagatggagtctcactctgtcacccaggctggagtgcagtagcacgaactcagctcactgcagtctccacctgctgggctcaagtgattcccttgtctcagcctcctgagtagctgggattacaggccactgctaccacacctggctattttttttttttttttttttgtatttttagtagagatggggtttcatcacattggccaggctggacttgaactcctgacctcaggtgacccacctgcctcggcctcccaaagtgctgggattacaggcatgagccaccacacccagccaacctttttgttagtaggttcagtggtagctttgagttaatggagtcctggccataggaatatgtagggaaacactacggttacagagagataagtgttccaaacaaatgcattctttctaggtgaaattcttgggatggaacagtgtttcagctgagtgattaacccacggaatcagtttccctgtgccgcttttttttaccttcagagtttaatataacctatggatttgtaagccttagttacgtacactaaaattactacttactaggca

SEQ ID NO: 1244466 - DNA, 4001 bp, Homo sapiens
tgcatttggaaacagcagtggcacagcagagttgccaggaatgggcaatgagtcctaaatgggaagctgaaaagatacagcgaaatcatggctggtttaacttcaagcaagttgagctaatgctctgggtcagagccacactcccctactgagaagggacattcagggtgactcctcaccatatgacttgcatttatagttatggattatctcagcaaggaggtttggagactaagagtgagagttttggagaaattttcatattgagtagtcttggattttctgaaatatgtaaataatgcttagattataaattcttatcttttcaaaaaatttgaaacacatgggagaaaaagatgaggaaaattcatttttgtaacataagatatataatacatattaatggagttttagcatttggaaacaagtctgtgagctgcacacaggtatcaggtgctccagaattactagagaatacataatcatacagcttcccctctgtcccctgtctatgctatggggtccttgtttaatgggaatagaaagagctacttttttgtttttgtttctttttgttttatttttgcttttagagttctgatgggagaaataaaacaatcctaatctctagacctatgttttataaacagaccaagcacacctgaacttgagggaaaaatatgacttctggcggggagttttctggggtacttctggcaactaaggctgtaaccaaccaaagagtcattccttctggaacatgaacctgtcagcactcacagcttcctaggtttcacctctagccagaaaggagagaacacggtgcctgaagctgaatttgtctaaggggctggcttggcagatcctatacactcattgcttataattggacagggctgctttcagaaatgaaaactattattccctacaaaaagtccttcttatgcccatgaaacagaaacaggtgtgaaccatttttttcctagtttctggctctagaagacttttcctttagtacaagacacagggagaaagggtcaattgagacctcctcaagccagtgaccgcctccctgtgagcatcctccagatggcactctgcacatcagggtttctgaagctgtagatgattgggttcagcatgggattgatgacagtgttgaaaattccaacagctttatccttgtctgaaagcttggttgaacccagtcgcatatagttaaagatacctgaaccatagaatatggcaaccacagtgaggtgggagccacatgtggagaaggctttcttcctgccctctacagagcgaattcgcaggactgcagctgccacgtggatataggagatgacaatgagagccatgggggtacctgccattataaaacccacagcaaaaagcagcagctcattgagttgggtgctggagcaggagagctggaagagctgtgggaggtcacagtagaagtgattgatcacattggggccacagaagttgagcgtggacatggccacagtgtgggtcagtgcgttggtgaaagcacaagcccaggacgcagccaccaacatcctctggactgtctgactcatgcgggtgctgtaggtgaggggccggcagatggccaggaatcggtcataggccatggcggtcagcaggaagcagtccactccaacgaacagatggaagaagaagagctgggtaaggcaggccccacagggaactgcacgcttgcgggacaggagacgactcaacattgatggaacagtgacgctgatgcacccaacatccagcactgataggttccccaggaagaagtacatgggggtgtggagtttgggctccaccaagacagctgccaggatgctgaggttgcccctgaccgtgaccaggtaggcaaagaggaagagcacaaagacaactggctgcagccctggcgcctccagcaagcccagcaggatgaactcagcaatgactgttccattggccccagattctggctgcatgagttcctgcaaagaaacatccagggaggaaaagaatcactcctcccaataatttatttactcaagaaaaagaaacagacccccttctacttgcccggccctctgccacgttccctctgtacaagtaaggaattttgcgctccttaggccacactacacttgtttactctgtcgctacatttacctgaataactttatttgcaggcgtaagcacaggtaacattaccactctggacctccctcctccaacccgccccccagctgcaagaacctatttgtaaagattatgaaagacaaacccttgggaaaaataagcaaaaagtgtacttctggtttgaacatggccgagtaaatccaaaatgttctcttctcagaacttatctctttccaaaacaagcagaaaaataaacatacagattctatcttcaaagaaactagtaagtgtccacaaccccaatccataaactagattggatggattcaagaacagtaaagatcaaataggagagtgacaagaagcagagagaggaaatccatgactgtataagagttaaatgagtataattctcttaaaaaaaaaaaaagggtgggtagggggaggcaatcaacaaaaaacaaaaccaaagctcttgtttgcaataatgggtatatggtgtaaagtatggcaccataatcctctgtgaccctgaattggactcaagaagcagagaaaaggctaaatgaagacttaggtacacaggctatagataaagcataaaactggaggcaaaaggtagaaaaaaatacatcagttctaacagttctatttacctgtctgcattcattacacacaaataaaagctaaaataatttacctccaattctgaatcacaaggtaggttcctgctagtctgaaacatgtcttagacttgcaagatacaagcatcttgtgaatatctagtttggcaaaaactcatgtcatttaaggattaaaacaaacctgcacatcatataaacaaggattctacaagaaaaaagaggtaaataaacaagaaagacaaatggatgacaaaattcactccatcaaagaatgttgccaatgaacatatgaaaactgttacctggcaaagacatggaatcaacccaaatgcccatcaatgacagactggataaagaaaatgtggtacatatacaccacggaatactatgcagccatgaaaaagaatgagatcatgtcctttgcagggatgtggatgaagctggaagccattatcctcagcaaactaatgcaggaacaggaaaccaaacactgcatgccctcacttataagtgggagctgaacaatgagaatacatgtacacagacagggaaacaacacacactggggcctgtcatgggagggtggccagggcgagaacattagggaaaagagctaatgcatgctgggcttaatacctaggtgatggggtgataggtgcagcaaaccaccatggcacatgtttacctatgtgacaaacctgcatgtcctgcacatgtaccccagaacttaaaaaaataaaataataacaataaaaaagaaaattgttacccaacatttcggcctctctaaaaataaaataaaaaaaaaacttaaggaggcattttctggtataaaataagaaaacagagtaaaaatataagagctgagggaagggattgcaagaaagataagaaatatgagctggaagaagaaagaaaagatgttaaagaaatgtaaaattactataccaaaaaaaccaatattagaaacaatacatggaaaaaaattagacagatgcaggaacagtattttaaaagatgacaagatgcaatgagaaaagagagaaaatgacagatatgagaaaagacaaaggagatccaatctatgtacattcgagttaccaaaggaggaaatcaaaaaagtggaaaagaacaattatttaaaactcaattttaattaaaaaattacagaaacacttgactttacaattcaaaagtgtacac

SEQ ID NO: 1244467 - DNA, 4001 bp, Homo sapiens
gtgcagtggcgctatctcggctcactgcaagctccgccccccaggttcacgccattctcctgcctcagcctcccgagtagctgggactacaggcgcccaccactacaccggctaattttgtttttgtatttatagtagagaaggggtttcactatgttagtcaggatggtctcgatctcctgacctcgtgatccatccgcctcggcctcccaaagtgctgggattacaggcgtcagccaccctgcgcccagtcaacatccagcaggattcttttgtggtagcggagagaagaaaatgaaggtgaaaggcaaacaaatgaatgaaataatccattgcactaggcctatggttttggtttttttaaaaaactttttaacaagtttttaacaaaacaacaacaaaacaaaacaaagaaacaaacaaaaaattttcccctattctgatctgcagggaatctcatgtcctcaccagaaatattgcagaaatacttttggtcacttaggctgtgattgaccgactggacattctttgtagaatgctgcttgccaggcacacagaactacaaggctttaactctatccagaaagtaggcacagccaaaaacagggtaaaacttgcacagggcttgcttggcagaacctgacttcatattaacatctttgttcatctctatagaaactatcatcatgtggtatatatgatgcttatttactttgtctacttttatagcatgtgagttgcatgagtgcagagacttttgtccattttgtccaccaatgccttggaagactgtccagatcatagaggtactctaataagtatttgttgaatgaataaattatgtagggtttcctagtaggacaaatatgtaacaccgatcttcaagcatcaggagataggaaaaatagttgtggctgaatttttcctggttactgtcttcatgggaaattttcctcagtccagaaaaggcaggaaaggagggaccccattacctctcaggtcagtgatctcctccccaaaaatatttgccacagagcaccctgaacatcagggtttctgaggctgtagataagagggttcagcatagggttgataacagtgttgaaaactccaacccctttatccttgtctgaagcctcctctgaacccagtctcatgtagttgaagatacctcttccaaagaaaagacaaaccacggtgaggtgggagccacacgtggagaaggccttctttcggccctccactgaacggattcgtagaactgcagctgccacgtggctgtaggcagtgatgatgagaaccaaaggtgtgcctgccatgatgaaacccacagcaaagagcagcagctcattgagttgggtgctggagcaggagagctggaagagctgtgggaggtcacagtagaagtgattgacctcattggggccacagaagttgagcgtggacatggccacagtgtgggtcagtgcgttggtgaaggcacaagccaaggacgcagccaccaacatcctctggactgtctgactcatgcgggtgctgtaggtgaggggctggcagatggccaggagtcggtcataggccatggcggtcagcaggaagcagtccatcccagccagaaggtggaagaagaagagctgggagaggcaggcgtcataggaaattgtggacttgtgggacaagagacgacccaacattgcaggaacagtgacagtgatacatccgacatccagcactgacaggttccccaggaagaagtacatgggggcgtggagtttgggctccaccaagacggctgccaggatgctgaggttgcccccagttgtgaccagataggcaaagaggaggagcacaaagacaactggctgcatctcttctgtttgcactaggcccagtagaatgaactcagcaacagcggtcctattggtcccagcttctggctccatgagtttctgtaaggacatgtcccagcaggggaggtatcagttcactcagttcacttattcaacattaatattttaaaccatttatgttcaaagccccgtggcgagtccccaggccatccctcactcgttgacctcctccatcacctcaatgcctttaccttgctcttggttgacatgcccaatgacaccaccaccttgtcctcctcatcctctgctagctgaaaaggtcagaatacctggaacaacatgagaactatagttaataaagtgtattgcattcaggatttttgctgagtagattacagctgtcctcgccacaggggggaaatgggtaactatgtgagatgatgaatatgttaatttgtttcactatagtaaccattttactaactacaagtatctcataacatcatgttctgtaccttaaatatagacaaaaactttgttttaaaaaacatacaaggcttcctctatgaatatagttagatttagatgaagttttcctattgctctctgagggatcatcccaaactaataagcaggtttcaaaatagaaatccagagaaagtagaatgcatttaaaaacataacccaggctgggcgtggtggctcacgcctgtaatcccagcagtttgggaggccaaggcgggtgcatcatctgagatcaggagtttgagaccagcctgtccaacatggtgaaaccacatctctactacaaaaattagcttcgtgtggtggggggcacttgtaatcctagctactcagtaggctgaggcaggagaatcgcttgaacccgagacgtggaggttgcagtgagccaagactgcaccattgtactccagcctgggtgacagagcgaggctccatctcaaacaaaacaaaacaaaacaaaacaaaaacacctaggtttaaaggcttctagacataataaaggtcaagcaaagctgtagcaagaatcagagagaaggtattcatgattgtggatatcagaaagaccagccaagtacatttcttcaaggtgagggaccacactctgaagtatcaactcaacatttcttgttcaataaattgttaatgttattgttacttaagcccctacaatggactttgactaatgacttactgtaaaatgatgtttttctgtgtgtattatctgctattcctctctaaaaccaaagttgtggtcatagcctgtgggttggttgccgccaggtgcagttacattctgcattgcacagtcactgtccttcccttgtccttgacttaggcacggtaggttgaccaatggctctaatgatacatcctgaaatgacgaaggcatgtacttggaaaaccacgctgaagtcatttttcagattttttttttttttttgagacagagtcttgctctgtcacccaggctggagtgcagtggcgcgatctcggctcactgcaagctccgcctcctgggttcacgccattctcctgcctcagcctcctgaatagctgggactacaggcgcccaccaccacgcccggctaatttttttgtatttttagtagagacggggtttcaccgtgttagccaggatggtctcgatctcctgacctggtgatccgcccgcctcggcctcccaaagtgctgggattacaggcgtgaggcactgcgcccagcccatctttcagattttatatcctactccagatcaaaaaacatcaatgtctctattgcccatggaataagccaggccagaggttctttaaaagcaatgttactcccttgcatagaatagactggaatcagaggatgggaagcagctggaggggaacagtgatgattgcctgagctggggcagtgaaatgcagaggcaggaatgattaaggaggttccagaaatcagaaatgctgtagcagcagtatgactgatatgactgcctaggggtgtggtcaccaaaatgatgtttaaatcctttgttcataaaagtgggaattgagtgcacgggttggtggcacggtcttaactggtctcactaagatctggaaagcagaagaggcaggagtgaatgagaagccatccggg

SEQ ID NO: 1244468 - DNA, 4001 bp, Homo sapiens
aagttaaagttagaaggaggtgtcactcccagggactgcatttatgggtgtgtattttcaggctagaaggtttgggatagaaaagtaagactttggaggagaatgttgtattgggtattctacaataaaattctgaggacctagttggaacataaacgcttactgtttcaaaaagtatcatatgtgtcaggaagatgatttatcaaataagacagaaagataccgcaggggatggaaataggacattccctttttgatcttaaggtatatcacttatgtattaacatagtttttatttagtagctctttccttctctagaccccacctgttgcctgatcgtcctatgggattcccgtgtggtattaaagcgagggaactgattttatgggaggtgaaaggtgaacagtagcatgaaatgattcctggcactgggcccacggttcaaaatacctttccacactctgatctggagggagtctcacatccctctggaaggaaactttgcagtgatattcttggttacctaggctgggatgaagtggccctttcctgtaggacattgctgctcaggcataaagtgctgccaagatttcagctctaccgagaaagcgggcacagcccaaagcaaggtaccaacttgcccaggaggcctggttggcagaagctcacttcatgtcttcctgtcttaccagcttttttctatagagtgtatcaccatgtggtatactatatatgatgcttatttatttatttagcctacctttatagcatgtgatttgcttgagtgcagagacttttgtccattttgctcaccaatgccctagaagattgtttggatcatagaagtaatttaataaatatttgttgaatgaataaatgaatgaattatatagggtttccttgtaggccaaacacataacaccactcctcaggcatcaggagatagaaataatggttataaacaaggtttgttggttactatcttctcgggaaattttcctcggtccagaaaaggcaggaaaggaggtcatctctcaggtcagtgatcgcttccccacaagtagctgacacagagcgccctgaacatcagtatttctgaggctgtagataagtgggttcagcatggggttgatcacagtcatgaaaaccccaacccccttatccttgtctgaagattccactgaacccagcctcatgtagctgaagacacctgtcccatagaagatgcccaccacagtgaggtgggagccacatgtggagaaggccttctttctgccctcagcagagcggatttgcagcacagcagctaccacatgggcataggacacactgatgaagaccaagggtgccacagccatgaaggctgctgctacaaagagcagcagctcattgagttgggtgctggagcaggagagctggaagagctgtgggaggtcacagtagaagtgattgacctcattggggccacagaagttgagcgtggacatggccacagtgtgggtcagtgcgttggtgaaggcacaagcccaggacgcagccaccaacatcctctggactgtctgactcatgcgggtgctgtaggtgaggggctggcagatggccaggagtcggtcataggccatggcggtcagcaggaagcagtccatcccagccagaaggtggaagaagaagagctgggagaggcaggcgtcataggaaattgtggacttgtgggacaagagacgacccaacattgcaggaacagtgacagtgatacatccgacatccagcactgacaggttccccaggaagaagtacatgggggcgtggagtttgggctccaccaagacggctgccaggatgctgaggttgcccccagttgtgaccagataggcaaagaggaggagcacaaagacaactggctgcatctcttctgtttgcactaggcccagtagaatgaactcagcaacagcggtcctattggtcccagcttctggctccatgagtttctgtaaggacatgtcccagcaggggaggtatcagttcactcagttcacattaacattttaaaccatttatgttcaaagccccgtggcgagtccccaggccatccctcactcctccaacacctcaatgcctttaccttgctcttggttgagatgccgaatgccaccaccaccttgtccctctcatcctctgctagctgaaaaggtcagaatacttgggaaaataagctaagataaaagatctaatttataacatgaggattatagttaataaagtgtattgtattcaagatttttgctaaatgagtagattatagttgctcttgccggaagggggaaaatgggtaactgtgtgagatgatggatatgttaatttgtttcactatactaatcattttactgtctacgtgtatctcgtaacttcatgtggtgaaccttaaatatacgcaataaaatttgttaaaaaaaaggcaaaagacttcctttttgaatatagtgagattaagatagaattttccccgggcgcagtggctcatgcctgtaatcccagcactttgggaggccaaggcaggcggatcacgaggtcaggagattgagaccatcctggctaacacagcgaaaccccgtctctactaaaaatacaaaaaaaatcagccgggcttggtggcaggcgcctgtagtcccagctactcgggaggctgaggcaggagaatggcgtgaacctgggaggctgaggcgggagaatggtgtgaacccaggaggtggagcttgcagtgagccgagatcgcgccactgcactccagcctgggcgacagagtgagactccgtctcaaaaaaaaaaaaaaaaaaaaaagatagaattttcccatttttctctgagggatcaacccaaactaataagcagattacattttaataatttatttttaattgatgaataataattgtgtatatttatggggtacagtgtgatattgattggcatatgctttgtaaaatgattaaatcaaggtaattaacatagccatcccttcaacaactcatttttgtggtgagaatgttaaaatatatccttttatacaaactggatgacattatgctaagtgaaataaactagacacagaaagataaatatttgacaatttcacttacatgtggaatctaaaaagtcaatgtcatagaatcagagaccaataagcagacttcaaaatagaaaaattcatgagagtttcagagaaactagaaaatattgaaactgttgcctaggtttcaaggcttctggaaatagtgaagatcaagtgaaggtatgccaggaatcagagagaagatactcatgattctgaatgtcagaaagaccagcccagcacatttcttcaaagagagggaccacactatgaagtgtcaattcaacactccttgttcaattaattgctagtgttattattgttacttaaatccttacactggactttgactaacaagttaatttaaaattattttttctgtgtacattgtcagctactcccctctaaaaccaaagttgtaatcatgtcctgtgggttggttgctgccaggtgcagttagggttctacattgcacagacactggtcttctacttgtccttcattcaggcatggtagattgaccaatgactctaaggctatgtcttcaaatgaagaaggcatgtacttggaaagccatactgaattatgtcaaactctgaatcaaaaaaatatcaatgtctttattgactagagacaagtagggcttgagcttccttaagagcaatatcatacccttgtatctgaaatcagaagatgggaaggggttggagtctgataactctaacagaaagggaagcatgatgattgcctgaactggggcagtgaaattcagggccaggagcggttaagaaaatcatatctcagaaatcagagtgctgtagtagtatggttgatgtgactgctttgggggatggtcaccaaaatattctttaaaatcctttgtttataaaa

SEQ ID NO: 1244469 - DNA, 4001 bp, Homo sapiens
gagcgcatccacactgtagggcaggctggagaccttgacgcggcgctcctccgcggccgcctcggcgtccccaggccccggacctggcccgaccgccaccgctggccccttctcattggacgaaaacagaagccatgccttccctgccctacgtagctcccgacgcgcgactccgctagcaacccgcagcggcgactcaaactttttttgtgggggaggagggagggcgagataactttctaaattccacagtggggaatgaggcagggaggtggggagcagaaaagaatgtaactgtcccagagttaagatgaagcagttgaccattcatcagagatacttctctatagacgaagacctctctaggttttctcttgtggtcgcaggaaactcttgagtttcaaatcccattcctatttcttgcctctaaacttggagtcaagaagaaccaggttccagggcaagctctgccactcacttactgttcacctttgagcaagtcacttctctctgcgttttctcatttgtaaaactgtttaacaacaataataatatatctactgtcggtttcatgaaaagtaatgagataaaactgtggaagtgttaggccgggcgctgtggctcacgcctgtaatcccagcactttgggaggccaaggcgggtggatcacctaggtcaggagttcgagaccagcctggtcattgtagtgaaaccccatctctactaagaatacaaaaattagccgggcgtggtggtgggtgcctgtaatcccagctgcgcgggaggctgaggcaggagaatcattgaacccgggaggtggaggttgcagtgagcctagactgcaccactgcactccagcctgggtgacagagcaaggctccatctaaaaaaaaaaaaaaagaaaaaaagcgtggaagtgcttaacacagtacttgacacagcactaggtcctcaagaaatataagtgtaatctgatttgttatgctttataaagactttcctccatttttcatgtgggaaaataaaaatccagagaaatttgtcatttaaagtcaacttacttaaagtttactccctgcaaattactaggcacttgcctaatctcctcatggctgctttcatgtcctggtttctcagggtgtagatcatggggttgagcatgggggtcatgactgtgtagctgatggacacagccttgtccatgaggaatggggtgaagggccaggtatagatatagatacagggaatgaagatcatggacaccacgatgatgtgggtggtgcaggtggaagctgccttcctccttgcctttcccgagtgggacctcagcatcaccaggatgacagtataagagatcagaaggaggaggaaccagatgataactagcagcccactgttggagatcatgaggaactccaggagggaggtatcagtgcaggcaagtctcagtacttggggaacatcacagtagaagttatctaggatattggggccacagaagggcagtggaagtatcagagccagttggacaatggagtggacaaagccccccacccaggcggctactaccaggcccacacacaattgagtgttcatgatggtgacataccggaggggctgggagatggctatgtagcggtcataggccatgactgagagaaaaaagacagtcccacctcccaaaaggtggaagaagaagatctgggccatgcagccctggtaggagatcgtcttggtctcatggaggaagtccaccagcatctttggagaggtgactgtggaatagcagaggtctatgagagctagatttcggagcagaaaatacatgggtgtgtggagccggcagtcaaaagtcactgtgaccatgataaggaggtttcccacaatggtggtaacatagactaacaggaacagaaggaacaggaatttctggagctcttgggtctgtgaaaaccctaagaggacaaacattgatacctgtgtggtgttctgtggttccataggatcttcccccacgttcctacagagaaaccattgaaacaaacaaacaaacaaaaaaaatgaaaattcaatcattttccttggacagtcaggattgagttgattaagttgagttgttgagtgtcaatccgagatgtagcttaggaaagccctccacggggaggaagttccatatgttttcaagggttccagagacttacttccctgaccacgccctacagtatattacaagaatctgggtcttttttcccttcggccatgctgtcctcaaccacaggtttcatgtctgattctttttcatacctgctatgcccaacatagtgccttgtgaaccataggttccataaagctagttgaatcaatcagtgaataaataaacatatcagcaagtacctgtgaccacaaacaccatcaacctatgtgcataaatcttgataggatatacagttgagaataatgattttagataaacaaacagatgcttctttatggtgggaatttgagaggatgtttattgctggagaaagagaggtgtgcattagaagaaaattgttatgtacaaaatcagaggtaaatgtgaagaaaaataagcagataatcttggttgtagcgaagctgggatgattagtgtttctcaaatgtttccctgtaagtacttctgtagtagcatttgttgccatgggccatctgtgggggcaattcaaagaagcccaggacaaatgcactatctccttgaactctcatgttttaacttctaaaatttatgcgaattttctattatacacatatccctcgacaatctttgggagagcttttaaaatgtaactattatggtcttaaaactttgacaagaccaaagtgttgtttaaaaaaaaaaaaaaaaaaaagagggttggctggatgcagtggctcatgcctataatcccactactttgggaagccaaggcaagaggatcacttgaggccaggagtttgagaccagcctgggcaacatagctagacccctacctctataaaaaaaatttaaaaattacccaggtgtgatggcatgcagctgtaatccccagccatttgggaggctgaggtgggaggatcacttgaggccaggagtttgagacaagcctgggcaacatagtgagatcacatctctacaaaaattttaaaagttacctgggcatggtagtgcatacctgtagtctcagttattcaggaggctgaggtggaaggattgcttgagcccaggagatcaaggctgcagtgagctattatggccactgcactccagctgatcttatctctaaaaagaaaaagaaaattagagcatgaagggagacatgattctttagtaagtgaaagttttagaagacattagcttgaaaaataaactgagttcttggtgttaaaacccattcttttggattatacctttccacaagtattttctctaattgttcagaaaaatttgtcccaaggccccatcctgtacagacaatagaacataaaaaggtctattttccctgattcccacctggcacatgggtagggtagcagcaattacactgatgctgttacgtgggaattggatgaatatatttggaaagatctctataaacctctatggacaaatgtaacaggattatctcaaaacttatgagggatttcagtactcaaaatattgtcatattattcttcacataaaattcacatttatcctcagatatttgtgcaaaaatgatattccaggaagatgtgctgtgtttgttctgtggcttcaccaactcccagcctaggactgtttgaaaaatgtccccataggcaactgagaaccccggcaagctcttcagcaggaaatgatgtggtaaaacagggttagaatgggcttatcccagtgcaccagggcaggaagctgagacaggcaagggtagtacacacccttcctggagcattgtcgcagcaaccacaacagagggtaacacattttggtctctgattttgtgtcc

SEQ ID NO: 1244470 - DNA, 4001 bp, Homo sapiens
tgaatgaattagagccaaacatcaacatgttatgttagaaacataacatggagtgaaaaaagcaaatcccagaatattatgtacagtacaatatctttataaaactccaaagtagcaaaacaatatactgtttatgtaaaaaaagtgatgaaactattttatacaagcaatgaagtgataaacatgaaattcaacagagtgatttcttctggataggaatcaaggtgaacacaatggagaggacaatacaggtgaaggcaagttattggtaacttctggttcttgaatcgagtagtgtatacatgagcatttatacataatgacataagtttcataatgtgcatgcattgcccatgatcttttattcaaaatttgtatattatattaaaatgtaaatatagagagaaaaagcttgaatactcataataatttcatatttgaaaataaaatacaatcatttttaaaagcttggaagataacatatagttatatgatttacttgttgttttatcacaaaatttttttatttgaatctcataacaaacatagaatattttaggggcacatactaatttaagcaaattggtgagggagaaatcatgaggccaagaaaagctgggtggcttactcgaagtcatcagtttggtcaatgatgggtcagggcctctaatttagagcttaagactccaaattctgtgctgttcccaacaacccagactcacaccaaaaggaaatattgggaagagagctcaaaatacggaaaatagaaatgttcgcacaggggaaatgctgtcaacaggaaactgtccaccaagaaggtgaaaaggaaggtgtggttttcaggggccatgtgaacaattctcattgttgcgagtgtgttaaaactctttatcacaaaccttaaccaccaaagaggatactttcttttttcctaaaacacgaagttgcttagtttcaaaattcattccctgctatgatgaacctcaacacactatgaagagagcaaaggtagtagctccctctccacttcacaaagggaaaacaaagccaaagagaagaaacctaccattgtcactctcaaaccagccggtgtctccctaatcttctcactgctgcctgcatgtcctggttcctcagggtatagatcatggggttgagcatgggggtcatgactgtgtggccgatggacacaagcttgtccatagggaatggagtgaagggccgggcatagaggtaaatgcttggaacgaagatcatggaaaccacgatgatgtgggtggtgcaggtggaagctgccttccttcttgcctcccctggatgtgacctcagcatcaccaggatgaataagtaggacatcaggaggaggaagaaccagacgacatccagcagcccactgttggagatcttgaggaactccagcagtgaggtgtcagtgcaggcaagtctcagtacttggggaacatcacagtagaagttatccaaaatgttggggccacagaagggcagtgggagcatcagagccagctggacaatagagtggacaaagcctcccacccaggtggctaccaccagccccacccagagctgagtgttcatgacggtgacatagcggaggggccgggagatggcaatgaggcggtcaaaggccatcactgagaggaagaagaccatggcacctcccaaaaagtggaagaagaagatctgacccatgcagccctggtaagagatggttttcttctcagagaggaggtccactagcattttgggagcagtgactgaagagaaacagaggtctaggacagccaggtttcggagcagaaagtacatgggtgtgtggagctgggaatcagaggtcactgtgatgatgataaggatgtttcccataacagtggtgatgtagacaaacaggaacattagaaacaggaaacgctggagctcccgagtctgcgagagccccaggaagacaaagtctgatacccacgtgaggttccctgtttccatggtgttttctccatacacctgaagaaaatgaaccacagacacagatacatgaagtcactactttccctttcagggctcaggggctcagaaccaaggttttaggcccatatgatgagcatccttatgtgtagaccattatactaggtgctgtcttgtctctggatcgtttacaagtgggtgctggaatatacattcctgaaatcttaacgccatccagaagtatatacaacctgcctttcaaagattcatatagtggtgggaagacacttggagtcagatacatctgaagtcaaatttcaggtctttcatttcattgtgatttgaccatgagtaacttacttaatctttctgggcctcagttttcacgggaatttgtaaggtagaaataaaaatacctgctttgtagaattttctgaggacttaagtagaatgatagatataaagttcctaaaacagtgtatggaataatcaatggcaattactcacctgtgtgaattctcttaatctaaagatatcctctcttccactctgtaataagattctttgccaattatttttcacatgacatttaatacatcatcgtgttaatggattttccttgtctatattttccctccacaattcaactattaagtccaaagcctatatctggatctcacaatttatttgtgccctgcagtacccattcttaatgacagttaacttaaaaagctcttggtgttgactgctgcatgggtgaatagctatcaggtgcacaagttcagcacaaggaagacactggatgcagctggatgcctgagacatccagtagttcccctgccctccactgtgggcggccccttatgagtgaggcatatgtggtggtgctgagacaagagggagaaaagggagggagagtcattggattgagaaatagatgatgaatattgtatgaaggggactcagagagcttctgaatgaaacaggaattttacaagatgttactgaatccaagggtgggagacaaaggaagttgttgaaagaaaacaaatagaaatagacaaaggaataaagggagatgaaggaatagagcaagtgaaggtaaaggaagtggaaaagtgctggggaggtggagaaaacgggactaaagggacagaagaagatggaggagccgggagaggtggctcacgcctgtagtcccagaaatttgggaggcggaggcggatggatcacttgaagtcagaagtttgagaccagcctggccaacatggtgaaactccggatctgtactaaaaatacaaaaaaattagccgggcgtggtggcacacacctgtaatctcagctacttgggaggctgaggcaggagaatcgcttgaagctggttggaggctgcagtgagtggaggtcatgccactgcactccagcctgggtgacagagcgagactctgtctcaaaaaatcaaaaacaaaaaaaaaagaagaagaagatggagggtgacaggggagggggtcagtggtctcccccctccccctgccctgtctcaatctctcttaccctctcttacctggcctattgcaatctattatctacaatattataggtcattctaatcttattctgctccttcagtttacttccactccaggacaccttctttttttttttttttttttttttgtgacggagtctcgctgtcgcccaggctggagtggcgcgatctcggctcactcactgcaagctccgcctcccgggttcacgccattcttttacctcagcctcccgcgtagctggaactacaggcgcccaccacctcgcccggctaattttttttgtaacacggtttcactgtgttagcaggatggtctcgatctcctgacctcgtgatccgcccgcttccgcctcccaaagtgctgggattacaggcatgagccaccgcgcctggcctcactccaggacaccttctacacagctgtccatgagacccctctgactcagatgtgatcatattcctcattgttata

SEQ ID NO: 1244471 - DNA, 4001 bp, Homo sapiens
agactgagtcctcaggggccagttatttacttccaggataacaggagcaagtttcctcttctcagacagctccaagcttagagacctcagagaaaatgtgacccacaacacgccatcccaacaagcaaacacccgtgcgccagcctggggcgcattctgattgaagagatgctcctgggacccatcagcgcagcccactaggctggataattgagcctaacagaaattcaagtatctagaaagccagagctggctcagattgtttatcttcccagggccttggggcttcagttactctagcagcccctgggacagctgctacgcaaaagcctccacctgagaggggagggcggcatgtggctgacaagtgagggctctgaaggacttaactctgactaaggagagggaaagagcttcccaagtctgacctgaaactgccaccccatcacctctctgtaacccgcacctacaggggtgctggtatagaaagtccactaacccttcctagtatttgtccaggagtgccaaaagccttggggaatcccagatcacaggaccccatacgcctttctggctttcacagggcagccaacaaaacttgatgagcctaggaaaagcctagacctaggtcctagccaacaccctcagaagcttcttcctgaagcctaaacactaggtgccctgagagcaggaaaccaccagagacccctgaaaaagaagagatcaataaactaacaaaaagactggcaatgaggaaacactcttgagactttcgtgtgactatggatacatatcacttccattagtaaaacaaccaactggcccctaccctagatggggagaaacagagagaagaggctggcagaggtcgactaggtctacaggagttgagccgaaaacttctgctgccatagctggcaggtggctgcttagtgctgggccctgatgtggtttcataacctgcctcaaaccagagcctgcagcaactctgttgtgttaaccacttttttgctggtagctctttccccctccttcccgccccaccctcttggctccacatacaaatatccgggcccagccagtatgccagacactcaagccaaggctgagcaccaccagggcagccaccaggtgagcccttcccattccctcccccaggaaagagcagccctcacaacagcaaacctcctgtcttctggaagaggagcacaaaacatccaggcctggatggggaccccaacggggagtccggggcagcacgtcacaatgccatgtccattccgcccaccccccaagctgcaggaccacagctgataacctctcaactttggcccagccaccccgactgggggagggcggtaggagcggaaagcgagtgcccaggcgaacccgcactaagcacaggagaggaggagcgaagaggcggagtcctcactgttgttggggttttctgagtgagacctcgggtgcggggccggggggaggggtcccgctctgttccccagcctgggtcttcgcactcggaacccggtccggtccgggaccccacagccatctccacgcgttcacccagccctggaggcagccaaacgtttatccccgaagccgagccgctccccgcctcccacccctagccgaggcgctcctcccgacgttccacccccggcctcccgctcgcactttattccttggccacctccccagccgatgcaccccctcggctgatgcactccctccaccccccactccctctgcccccgtctctccagcccggggcgcctccccagcagcccccaccttctctcccgcccctcccgtagccctggggcctcttggttccttccgggctcaccgtgtggggccgaagatcaacggcccgggaacggttcccgggagcgggggccgctgctgctccagcagctgtaacaacccgcggctgcagcctccccgctggcagctccggccgaatcagcgctccgcgccggtccccgtacgtcaccgccccgcgccggcacgcccgacgccttctgggagttgtagtttcttccgctggctccgggccggccctcccgacgcctcctgggagttgtagtttttcctgggctccgttcccggcctcttcggggacgcacggttggaagttgtaccgtgacgtgatggtcagatcggatgatagaattttggtgcgtaacaattccaacttttgcttctgtgcccttcaagtgtattttatccgtgccccagttttgcagatgaggagactcggacttgtaagtaactttctgtaggtctttgctgggtcctagactggatcgaaacccaaatattctgaccccaactgcaggatttttccactgcacctggctgcctccgccctggccccagattggctcctccagaaacagactagcccggccctttgccctgctgggccctcctgggagagcgcttttcacaacattggctgggatgagggtctggagggcccggaacggagcctgccttctccttctcagtcacgcttggcccaggctgccccggaccgggccacatccttggccgccccgcacctgacgtgagaagaggctacgtatcatagattcctccatcagtagtaaggagcctgagtttctgtctcaggtcagcttgtgtggctttgaatgagaggctctggtctgcagttttcacatctgcatcgtctaaaggcaagggcacagactttactgcctggtagacatggggtaggccctcctttattggcagtgtgaccctgggcaaattacttgtcttaatctccaattccacacctgtgaaaccccacctccaaggttgtgggaacccaaaagaatgtatgtaaagcacctgttgcattgtaggaatctacttaatattactgtaggaggttgaactaaatggctcttgaggtctcctcggttactcccattctccatgtcaccaagaggtcttgtctgggtagtttcaactccttacccagcttctttctaagtccactctatgcagggcagggctggaatagcaaggtcagatgatgtcatggcatgccaacctgactctgaatggcagttcatggcaccctgaactgaaagtgagggaacaggaaggaaaaggctagcccagggaaactgcggagcactttactcggactacacctacctttccttccccagggggctgccaggaaacagttgtcacacagctggagtgggacccccagaggcacttagtggtcaccaggcaggtgggtatttgaaccacccagagcagaacaggcagcttcttcaatatttccagggccaatggccccaaaagggctcattccaagatcgaaataatcatctgagtctgaaatagctctgcctatgtcctgtggaagtttctcctggtttgtggaggtgcctttccttatagtcatctttctgcagacataagcaaacccagtgttgttcttttcacagaaacctccccagcattaaggcaagaaaggtgtctctgttttttccgaagtgtgcctgcttgactcctttgatttttctctgggattcttcatcctccatcaagttgatcgatccctctggatcttggtcagtttcctgacatctctatgaagttcagtgacccagactgagtccacgtctcaaataaggttctgactaatgcagagtctaacagaaagattactgaacatgtcatgcactattaataactcctgttatcgaggatttttttttcacaataggaatgaacagagttctgactcactctaggtttgtggtaaattgcagatcactttctgctttatttagcgggagtccctgttgtcatctttctccttctctcttggccctcataattatcatatcttccccaaacgttcttcagctgtgaatagccctaagcactattcagagtgagtgacagctctcttatttcgtgctgggggacatacaaacccttggacaaacacttgtcactgtgtgcca

SEQ ID NO: 1244472 - DNA, 4001 bp, Homo sapiens
tctgtgatgttgcccaggagtgacaggacccgggaggccgagaggaagggcatgagggagaaggcaaccacacaaattagcttttcttttccttctcatcatgcaaacaccattggactgcccagcagctgccccccattcccaccccgccccccatgtctggaccctccctttgcctgcccaccctaccttgtgccagcccttcagaggccacttcctcttcttgagcaggtgaccttcctgcctctcaggcatgacaccctctgtccccagcctgacccgaggctcctccaccacctcccacagctcagaggcctgcagtccaggacagagggaggggagcactggtgagacgtccgccttggcccctccctgtctggttccagcttggcccacccaccaccgctttcccactctctgacctgctgagcactgctgggctttgaggactgagcgctctcaggcaggaagggcgggtccctctcttggaagtccatggagaagggagaggccactccctgctggggatgtagagcagggagcagggtggaaggggaaggatgtcacctgctcctgacggggtccttgaagcaagagaaagacccccttaacgcaaactctgctatcaccttccccacctccagcccctcccacaccctctgagataagggctccccaacataccctctgctcacctgccaagcctctcccaagtctgcccctctgtcccgaccccacccattttcacctgatatggacactgccctgagagtgaactagcacacagcagacgggcaggtgcccagggaaaaccacaagacatatgcccagccccgccttgggcacatactctggggctccaagaaacattcagtgctttctttagaggcttccctgggagtgctcagaggtgaagcaagggagtgacagaagaggctccaagaagagacagaggggttcagagactggacaagcgagacctcctcaatccagctgcctctgccttcaggacccctccaccctgccaccgtagctcagagacttctctgccatgatcttgcagaaaactccccagcctcccaccaattaatctccatattatctagtgcttggagaaactgaggcctgagatagcccccattttcccatgtctcctcccaccaaacatgcccctaggatgccctttttggaccctcagtaccccctaaagcctcaccatcccctgtctaccctcacagtccttggggctctgagaagtgccacccacccagagagggcaggacattgggctaaaggagatacttcatgagagaagagggggcccaggacatgcccaggtctgcacaggtcctgcagcagtgcccacaggcacccttggcactggccctggccatcctggctccaccgggagatcaataatgcatgaggctctgcatgtgtgagacgggggaggggactggaggggcgaggctggtttgaggtgggggaagcagcccagatcttctaatggagctagcaagcacctgaggaactgaggcccagaggggacagggatgtggcaggaacgggtgcccaggaggttggggcagagggacccttgctgcaagaggctgacctgggaggaaactcctgcattcagccattgaaagttctcaaactcttccggtgttcaggtatctctgggcccttctcccggccctgtggggatcctggcccctcactgcttgtgggtagagggggaggctctatcggtaggcaggtgaagggtctaggtgagccaggtgggtgccccctctccacctctattcaggagcagacccaccagcttcaggtgggaggaagctcttctcaggaatgtcagctgctgccacgcagcccccttaccccagggtccatggacgccagtactccttggcccttgcgccgctctgcctctgagtcaccgtctccgagtcaccggctccctcctcaccgcgctgagcagtggcagcagctgctgcaggaaccaggaaggaaggagatgtcagagcctcccctctagccggatctccccacctccctctcccctgtcccctcctcccgccaagctccgggcagccgctcagctctgcccccctgctccccggaggactcagggctgagcagactgccctagcatcgatgtggcttgggagtgggggcacagtccctgctgggcatggttccagatagatcagaggactggggaactgttggctgtacgccagtggtgataaaggatttattcagactagcatggcagtgaccctgttagtacccaaggccaattcctaattaacccccgccccccgcctctcattttacatctgaaaatagactgcaaaatttggagccagcaaaagtatcaggttgatggtggagggacagatgccccctctgggaccataagagagtgccaagagcacagtcagcaggggcagtcaagccaggaaagggacagccagcagtccccacactgaggcccttcactggggtgatgccccactaggtcaggccccatggagatctgaaagtgcttgtgtgtatgaagacaccccacagcctgcagtctctgatcaggagcaggcctggggcagtcacagctgccgttaaaagggctgcaatgctggtcccctcccttccctttacccttctgctggagtactgtgcccagctgctcaattctaatgaaaaatcggctcttaacaaagatctaaaattcattcaaatgaatgtggcatagacctacagtttcaagcgcagctaagttttctggaaagaagtaggtggggcctcaggtgaaggatgtgattcaagtttcttctctgaccccaaaagtgacatgggccacttatcccttccacttcatcctcaccgagcttggtttacgtttcagggtctcacatatctctcgggaacacccactgtcttgcctttattcagagcctcagtgctgctccagccaccccaggaggagggtgttgttagcacctggcagggttctgggagggacaggagcactgggcagcactgaccagacaagctctggcatccaggagcctcaagggccttttaagccacttcccagtgattgaacatccctgggcatacagcacaggatgaggcactgggggaagctggtcctggcccaggccacaaaagagctgctgcaggtcatccctgccagacagtgcctgtccaagactaaggaagcggtggcattgcttcaagtccgagaaggaatgttgaacagccaccttccccgggtcacccctgcatccacccagaatgtgctccagtcaaggatgatggtggactctgagttaagcatcccgtctcctttattaggaatttctggttcatgaagacttgcatgaggcctcctaccctagagctctcagaattccccattaatagagaatcctagttttcccgcaggccttttgtccagaaccaccagagacacgttagctagtgggtacagctgtcagctgcctttaatagggcaagcatgcgcgggatgccatttgtgggaacaggtataggggaagaggattttcctaggaagggaagcaagagtgaggaaagtcagatgacagagaagcccctgagagtaagtttagagggaggacaaccgtgtaaaccacaaaataaaggaagtagaatatatttcattttattataaagcagtgctcccaaacttttcacagcgtacacctcgagggtggagaactaacatccaagcacacctggatggtggatgggacccacttctgggtaacctgatgaggaagctctagtgaagaaattcaggacgcggtcttcagagcagagggcttggttcaagtccctgttctgccacttactaactgcatgaccttgagcaagccacttaatttctctgctccttctctgtgaaatgggtacaatgtggtcagcagtaaaggaactaatacatgtacagcactcagcacaaagcctgg

SEQ ID NO: 1244473 - DNA, 4001 bp, Homo sapiens
aggagtgatgtttctggggagggcatcatccatggtgccattttggtcatgatagagggctgggggctgttctgatcccatctaagcccagtcctgtctcagctcaatcagaagatctttcaaagtattgtttatgcaacaacaactacaaagtgaatgtttgagaaatcccagttacaggctaccctactttccaaacaaatacagcacagagggaccaagctggcaggagcctgggctgacacagaagccccctacgggcacccaagaagggcaggccaggttctaggagacagggctggctggcacaactcacacctcctaggtgttaactactggcactgcttaggttgaaataacattgcagagctccaagtgggagctcacgttgggatgttacttcattatgaggcgtttccacattgatggactcctgtgatgctctctacagccctgtccctggtttacttaatagctcaggatacgaggcggatggagctcaggtctccgaccccttgttgggtccttcccaatggccaagtgttagctcctttcttccacacagcgacactcctccacccacctggatgatgacaaacacagcctggatgagggggtgcaggatcttgatggctgactggcactcaaagaaactggagtagtagccggtcttgaagacatccatgatgagggtgcagattccaaacagcaccagcccacctggaaaccaggggtgggtgggtggtggtggtggatcaaagaggcaggagagaaggcctgccgagctgaggacaggccctgaggatgggaggctagatgggtgggtggatgggtgagtgagtgcactgttggatggatcaatggggagggtgggaggacaggtggataggtggatagacagactgaaaggtgaatgggtggatggaagggtgagtgtatgactgagtgggtggatggatggacctgctaccaagcccccctctctttggggctgtgtggataccgcaaagggccctggctgagctctttcagtggctgccatcttctggttcctgctctccatcaaaggccctccctcagccagccttctctaatcttcagaccgggggcaaagaggtccccttccatccctctattcatccctcccccaggaccccttaccttcctctttttccctaactgcagcccacttcaccctccggtcctcctggtcctccctagggagcctctcgccctcgtatgtcaatctgcactctgcaactcctgcgagagccctagcctgcagctccctgttgtgcccaccctacctcgcccccacctcccctggcacctcggagccagatggggccagcgtgcgcgtcccggtagggtaccgcgcaggggcagcgcacggttcggaggaggtagaagaggatccagagcgttgccagcagcatcatcgcagtgagcagcgcgaacacgtcggtgtcgtacacggccaccttgttgaaggctccgccgctgatgagcgtgcaggcgaggagcagcacgttcaccgccagcagcaccgacagcaggcggccacccttcttccacacctccctggggcccgcacgcggcgccggggggctctccttggggccctgggccagctcctcggacatggcggaggcgactggagaaggctagagggatcactgtaggggaggagcggacaaaactccaggtcaaccctgacggctctccttcccccatctcatccctagacttggggactagggagttcctgacccgcagggttggggcttcgggtgctggaggaagcgctgggaaaggggaagagaaaatgcggaacctgcccctctcgctggatgggaagaaaggagaagcggcagcacccggttggacccctccaaggtccccactccccaagtccgactgccctccggcccggggcacccacctggctgggcttggagccggcgctgagctgggggtcaggggacggcgagcgtctcctctctcccacgccgagatggacaggcgctttatacccaggaggacagggtgatttacagctgcgggagtttggctccataaagctctcagtcccgctcacatgatccatctttctccaaggtgaatttagggaagagcccgctggagccagataaggcaagattcatatttaccctttgagaggcgaccccactccgtcaccccggtgcggccaggctcgggcgcggccccgcactgcggcacctagagggcaccccgcccctggtgcccaccgcgccctggcgcgcagcattccaggcgcccagagccccgagagctaagctcaagagacgtccaaaaagcctgcgggcaccctgacgccctccagccgcggcgcaccctgaatcctgtgctcctgtgctcctgcctgggatggcaaccccagttcccctctcccccacggtcctcgcagtgatccaagctcccctttcctctatcccaccgccctgcccgcccccgccgccggcccgcgctccgttggactccggggcttgggtgcgaagttccacgcggcacgcggagccgctgccagtcctccagcgccccctgctggagtgcggtcgagggactccgttcaggcggcggcggcctggcccgtcccactcgctgaccgaaccgcggtcggtcacggtgccccttcttaggtccactgtcctggggctcaggacggctcccccaccccgccctccggcacccctccccagctctcggttcgttccactgacaggtggagaaatacggagccacagcgccccaggctctagtgaggacagatctctgactgtccccggactgggcgtcacagtgcgcggccccggggtgggcacttttgaagaggaggacagggccttgcgtgggtcaccctcgtgtattgaggtgcatgcagggtgtttaggacccaggggaagaccgggggcggctccctggacagcgggagatttcgtcccccgccccctccgcccccgcccccgggtgagcgtttcagatgtcttggtagtcgcggctctggcgctccgcaccctccgtctgcggcagcgggggctggcggccccggcccctgcccggccccgtcctccaacctcatgcctcagccctaataccgccgccctcccctgcggggggcctttctccgtgtcccccgcccgccccgtccacttcgggcgccatgaacgaccagtaccaccgggcagcccgggatggctacctggagctcctcaaggaggccacccgaaaggagctgaatgcccccgacgaggatggcatgacccccactctctgggctgcctaccatggcaacctcgagtcgctgcgtctcattgtgagccgcgggtgagtacgccccacccagtgcccttgaggcccctgagaccaccccaaacttcctcgtccaccactcctctgagctgcctccttcccctgcagacaggcggacccttagaccctggcgtttgtgggagagacacatgttgaggggacccaagcggaggcatctgacacttgttaacacttgtgacctggatctggggctaggaggggagaaaccgggatttgggggttcctgattatggggggttgctgcagagtgaggggaaggtgggagagatcccctggctggggtccccctggaagcaagagtgaggggatagtgagactcggagagaaggttaggaagtctcgaggggccagcagtgggggctagaaagggaggggtctccactgcccactctccagccttgatccaaagggctctgccagccagcacccacgttctccggcaggctggtgtcacacagcgcttgccctcaacctgctcattttggggatttatggacactgtccagggcgccaaatgtcactgattcagccactccattaactctctccaagtccctcccccacagccgggcacagctaagcaatggtggaggctgtgatgtggtcaccctgaaggggcttctcttccc

SEQ ID NO: 1244474 - DNA, 4001 bp, Homo sapiens
ggctcccattaagtcctgaaactcctccaggacagagaccgggtcctgcttaacttggaccccccaaacctagtgcagatgtgacattcacccagtgattgcccactgactctggcatcttttgggaaattttcagcaccagagctgtggacagagacccttcccattaaactctttccgggctggctggggaggagactcccgatgatctttatctttccctcctaagctcccccacccaaattgagcaaggctggggctcaccgggatgtctccctgctccatatatcccaactgtaactgctctacttcaccttccccaaaacctgcaccctctcctccagcccccaagcagggtagattaatgatcaagtgctcagattccagcacttattacctctgtcatcttagactactgagactactacagagagctacttagactctgtgcctgagtgttgtcatctgcaaaactgatatacaactatggaatagtagctggtgcatagtagatgctcaataaagacttccggaacgaggctggctgcagtggctcacgcctgtaattccagcactttgggaggctgaggtgagcggatcccttgagcccaggagttggagaccagcctggggaacatggcaaaaccctgtctctacaaaaaataccaaacaattagccaggtgtagtggcatgcacctgtagtcccagctactcgggaggctgatgtgggaggattgcttcagcctgggaggctgaggctgcagtgagctgtgatcgccacagtgaactccagcctgagggacagagttagaccctgtctcaaaaaaaaaaaaaaaaaaagggtgggggggtgatgaatgccgaataggggctttgtcagaatgacatgatttaatacatgcacgaagcacgggcagagagtaatgccggcaatgcctggcacctggaaaactcagtgttggctatctctgcatttccttccagttcttttgaggtcctggagagctgggaagggtcgggattactggtgaaatttcaagggtgaattttattcagactggaggcctggaggggacactgggggacaaggttccaggttcccttcctctggggtctttgccctgacagtatcccccgtctcccaccctgaagtccagccctccaaaggccgctggcgtgagccttcaaaggagcgaatttggtcccgggctgggcagggggcaggagtgggcatttaggggtctcgggcagaaggctggggcaagggcacctggaactgacaagcagtactctgccgccccctggcacgcccctgggcgcgacgccagtccaagggagggccgggacactggactggtttgtgggtctcggctggattggcgatgaaagccgcggagccgtcgggcccggcgcccggcccagcagcgcagggccggctccgaggaggctgctgagtgcgggcgccctcgggatttccttccgagccattttagggactgcggggccggggcagccgcttcctgcgtgccccagaccgggcgtccagacagccccaaccaacctcacaccccaggcctccgcgctttctgctgtgtggacccggccgggaggagtcgcgccctgaggccctctgtgctccccgggtccacggaaaggagtaggggcgcggagcgcgggttgcggggcgggtggaggggccggcctcagattaaagggagttcacctctccacagtcaccccgctttcccgttccaatccctgcagcccctacttgtgaaccccccttttgggggggtgggtagtatgtgccagtgtctggggtgcgcaagctgggaaagttccgccggcgctccgggcttacctgaggccgggagaggcatcgccgtgggctaaccaccgactgcgggcgctgagcggatcgtccgtccaggtgagaccgatgcccgcgacgccctcccccagcgggactgcgcagccgccgctcgggctccgcggcccatcgatttttctgttgactttggaaatctcattaatccctcgttaattaccctcccgggggctcggacccagagggtgcagccaattgcgaggcagctggacaagcgggcggggctgagggctgtgcaggcgcgggcctgcagggtctccaactcgcagcccgccctcggatggggtggagaggggtgcagtgttcttaggtccgcagtaaagagcttgcggaattcaggcctcgttttcctttggtgatcaagctgggaatggacgccctccctccaggcctggagtcgctttttcctgtaccctacctagccccaggcctggaggccgcctagcaggaccctgtgtttcccttaagtcaaacctgaacttggtggggagagttggagcacagccccattctgacaggggaggaggcctcctcagctccacctgcggcctctgagaactactcacctccttctgctgacagggtccaggcacactttcctcaaagtcccctgagctcccagtgctgctgttcccatgatctcccccaaatgccatctgctccatgggtcccgcccagccctccctctcccagcccttcccctccctctgcctctgcatgctcaccaccacctttcactcttctaactgtggagcctccttcccatctctctgctgtcttccctcctaagcatctctataccctttgtagagtagaaaccctagggcttaggggaaactcctcggggacctcctggggcagggggaagtcaagtggtgaggatctgagactcccaactccttttaaattagaactgccttgtttatatcttttttgtttgtttgtttttgtttttgttttagacaggctggagtgcagtggcatgatctcggctcactgcaacctttgcctcctgggttcaagtgattctcctgcctcagcctcctgagtagctgggattacaggcgcacgccaccatgcccggctactttttgtattttttagtagaaacagagtttcgccatgttggccaggctggtctcgaactcctgacctcaagtgatctgcctgcctcggcctcccaaagtgctgggattacaagcgtgaggcactgcacacagcctatatctatgttataaacttgtgttcctgtaatattttatttgaagggaaaaatgttctgcttgaaaacaaagtttgaaaattattgttcttagcagaaaggctctggattttttgcaggtgtgtgaccttgggcaagtcactttacctctctgggcctcagcttccttctttgtaaaatgcagacattagactaggtcactgcttcctaaactttcttctgtcatgggacacacacaaagaaaatgattaggttgagtgctgtggctcatgcctgtaatcccagcactttgggaggctgaggggggaggatcacttgagcccaggagttcaagaccagactgggcaacacaatgagaccctcatctccacacacacacacacacacacacacacacacacaatttagccaggcgtggtggcagtagtagctgtagttccagctactcaggaggctgaagtgggggggtctcttgagtccaggaggttaaggttgcagtgatctatctgcactccagcctgggcaaaaaggtgagacactctctcaaaaaaaaaaaaaaaaaaagattatatgtatatgccacctggagataaagggaagaggaagatggcagtttgggaactccagttacccaccctgtagctagtctgtcatttggattttgctcacacactgcaaaacttgagacctgaaaatctccaggggcccttcccgctctgactcccaagatcctctcctgtgaccacctcagacgggacaacagagacaaacagtggggatgggggcaaatcacaggtttattggtttccagctccgggcagtacactggccaggccacagcaggggattagagatggaaccagagccggcacctccagatcttgttgggt

SEQ ID NO: 1244475 - DNA, 4001 bp, Homo sapiens
acgccccaaggggaaaaccagctggattgcttaggccttggctgtagtcactaaagaatggcatcaatctcagaaaccctcaagatggggtcaatttaggaagaagctgtttattctgtactgtctttggcctccacctaaggtctggcatcgacccacccttcaggctcatagttcagcgaggttagagcacttagggagaagcaggtaacacatccagggtttgagagaagaccagcacacaactctcagtgatctggatagaggaagactaaattactgtggttcaggcagccttgccaggtgatgtcttcccaaaacttctcagatgtatattcctccctgattgtgccacctaggcctccttcccttcagtttgggacttaaaacttccaccaataacgtgagtatgtgcacccatgcagcagcctgtccgaggactcacaactggagacacctccctgcttggcgctgcccagaaaactatgtagatggccaagaaaccgacttccattataaaatgtttttctgtgtgtaccaggaaaaagatgctcaaaatccaaatcaccactttattatgtggcagtcaccatggtgccagcctctgccttccccatgtcaccctcctaatccagggctctccaaccatattcatgtttgcgttttcacaagtcaatgtccattaaggccttgtgctccccttttcttcagtacagggcagggcccttataatttgggtctcaagaattgatagttgtctcttaactggttctggtgaggcgcactcacagcagtgagtggagggtcctgggagggcatggatgacggaggctgcccctagaggagctggatgtaggagcagagacatttcttgatctttcactctgcaaactggtccaagaacttgaggtaggcctgacgctggggtgcagctgctggaatgaagtggccaccagagtgggtgagggtgatggctccgggaaattggctggccagttgcacactctcctgagaggggatgactttgtcagtgtccccaaaaacatggagcgaaggcaatgacaagggcctttgcaggatggattccttgaacccaatgccccggggacagaaaccagacaccaagaggataaaccgtggcaaggggaagcggggatcgcctgcctggcccagggcacacacaagggctgctagcgcagccccttggctgaaaccaagaaggccgtcaaaaggccccagcctgttcagtgcctgtgccaccatccccagtgattcctccaggcccctgcagacggcgggctcttccaatgcggagaaaacgtcggcctcctgctctgaaaaccaccagcctcgaggctgctcctccggagggcaggaccctacagcgatatgaggaaaaaggatgggattagggcatgggaggctccaggaaggaaagaaatgagaaagggcaggagggttcgagatgacagagagaaaaagggaatcgaggcaaaagtctgggggaaatgagaggggggaaatgagtggattggcctgaacaggagacagcggaggaagacggtgaaggcggaagcctgggaggacaggctgcagtttgagcaaagagggtatgggtcgcgagaaatgaagggtgtggactgggtgggaggaatgcgggtggacgcagggtgggggatgctgaagggtgtcgagggggacgaaacaagatggaggaaactgagtgcgtttccggagcggggcttgtctcaccgaagtctgatctggcgccctcggggcccggggggtcggggaccgggtgcgggccgctgaggcacacgagctcggcgcgaccccgcagcgccttcctcagcgccccggtcttctcacggaagccccgctcgctctgccggaagcccgccaggcacaggacccgcaggggtcgctgcgcggccattatgcccggcaaggagcgacggaagcaccggaagcggtctttccccgagcggaagcacaatgcacggggcggaaccgaacgtcagcaccgccccgagggcgggcctcggagcgccaaggcgttcccatgacaacggcaaaaggcggggcgcacccagagcgggggctgatacctgaggcccgggagcgcgtcaaggagccagcggcgccaccttctcgtccctgcagctgcagtcctcgcaagccacggccgaagggggacgcgcggacccctcctgcacctgaggtcgcagactttggttagggtctcgctcctgcgaccctgcgtttccctccgctccgctcctgtgcgtttcccgtcgcggtcgcagggcggcggccagtgcccaggcgcggtctctcctccctcctggaagcccccgcctaccttcccccgcgcgggccggcccggggcgtggggacggcggtcctggccgtggttcaccgtccagggccccaaggagctgccagcgtagaagtccatcgggtagggctgctgccaggaaatgtccctcagagccacggccgcctaggggaggggagggagggacaataacatctgccagtgtttttctgcccctggattactgaattcagtcctcacgacggcctgtgaagggcacactgtcccctgccacagaagggaactgtgtggttcagggccttgcctaaggctacacagctaggaagtgactccgctggagaaatcgagacagactccggaatctacgaacataacgaagtgctgcccacccaccccactccactccagacctcacctttgagaaccacgtccaaagcccactctctcccagagcttggtgttacctcatagggtgtcagcagcggcttggggaaggctgtgccccagtcaatggagagacgtggacatgccacctgcacccacctgggaagggaagccaggtcagaccctaggaagggcctcctcgtcgcccaggcagcatgctgaagaacatgacagtgcccccagcacacccattcattaacaggctttatgaatcctaaagtaaagacagtgacccactgctgtttggaatactgtattgttgcgtgttttctcctgtttcctctgccgacaatgagctttccagggcagctcactggtgatagtatccccagaaccacatttagtacctggtacagggcaggtgtcagccaccgctcaaactcatctcacaaggacaaatgtgatgttgccattgcctctgagccccaaagtcccaaagcaggtatgacccagttagccctcccagggaggtctctgtaaacagtaaaattccatgaccatggaagcaattcctgttggctccagccttcaagacgagctgggcaagacccagcttctaagcttctttagccagtcatagccaggcagatactcacacatccacctcaggaagtaggctaagcttgctggggaagatctcagagagcagcagcctcacaaaggaaaggcccaaggctcggagtcgagattccaggtgctgttgggagagggaggcagggtgggggtcacctggtcaagcagccaaagctgaacctgtggcctactggttttcccagctgtgttcccagtcacttccctcctccagaggctgtcctgagcccactgacctccaggatcttaggactgccctggcggcccaaagtgcccagaataaggccccaggacttagctgagcgggcagtggctatggcttcttggcgagcagcctgcatgcgctggtggtcatagtgttctctggataggactttgctatatgggtcatacctggaaaagaagcagtcagggtcactgtggcagccactgtcaggaccagtattatgcacacagctcctgactcagccccgtgggctcctgaacctttaggccccacgcaggtaattaagaacagaggcaagagcggggactgtcattaggaagacctgtcccacagctggagcagacaagagtgggcggctttaagatctccgtgtaaaccccaggagacgggtaggcaacagca

SEQ ID NO: 1244476 - DNA, 4001 bp, Homo sapiens
cctcagctcactgcaacctctgcctcctgggttcctcagcttcctgagtagctgggattacaggcgcctgccaccacacctggctaatttttgtatttttagtaaagatgggatttcaccatgttggtcaggctggtctccatctcctgacctcatgatctgcccgcctcagcctcccaaagtgctgggattacaggtgtgagccaccacacccggctgggggtcttattttcaccacactcggctgggggtcttattttaccctcatggcagggtgatggctgcaagagctccggaggtgcataatgccgacctggacctgctcgctttgaagatgcaacacaagccttacggacaaccacacaaaagcctcctgttgaggccaaatcagcagccattctggttggcagacatactgccaaaaaaaccacccccaaaacaaaaacctcctgtgaaaccaccatagagaatttatttttttctcaggtgaagtcagtaactaattcttcctattcccgttggacacaaggagtctgtgagggggtgtgaaggaaggaggctgcggctgcgtcctggactccgtcctgcggtagggagtccagcagggatggctcagcctccgcacctggtgtgcagccggatctccatcctgaggaaggccttgaggttctcatcagccacgtgctcctccagggcagccagggcccgctccccaccgtcctggaagtgctgcagcagcctgtccgcgtactccacccacacgcagttggggcagccactcatgcagcagtttgtgggcggctggagctcaggtggcagcgatgccttgggcggcctggtgccgtccgcacctgcttgggagcccacctctacgtggtctgtcccgaattttctgcgcccatcaggggcttgcgctccgggatggtgcctttgaagaaagctgccacctccaggaagcctctggcagcagtccgggctggagaaccggcgagccccctgaggatgcagacaaacatgtgactctccaggaagctggtgaggcccggtctacccccagcagtgaggacatttcagctctcctgtcattgggcaactggctccatgtcctcagctttttcacttcctgtgactttagacatgttatttcacctctctagactcagtttccccactgtgcaatggaagtcatgggtatgacacggtgtgattcacaagaagtgccaggatcagggcctggcgccgggtgtgcactcaagcacatggtggggggtgggggaggcactcgacacctccagctaagatggctgctctgtggacaccagtatgcgagaggtgtaaccctgtaagctcctggccagcccagcacctctaccagtataaccaagccccaccacctctgagggaccaaccggaagaatcgcaccaccctttatccaagtttccctgtcacaaagcccaggcctctcaggcccctctcatcccagcgtgaatgtcctataggcagtcttccgtcgctgccctgctctatctacccaggatcacggactgacacgctaccaacttcacttatttaactagtcctgcgaggggcatcatccgctccatgtccacggccagtccccagagcccaggagggctcgcacacaggcgctcggcagatactgagaaacaggaaagtggccgttcaccgggctgcttcctctcccaaggctaagcggcccctccacagattccggggcggggactcggtaagagccgatggaggagaggagcgaggggtccttcggcggcggccagcgcgcgatcctcccggctccgtccccacatgcgggtggaggggccggggctcctcccggtacgtgcgggcccccggacagcggcctctcggacgtgcccttcggcgctgccaagacccgtcctggtacttgccgagccacggaccgcggcggctaccgcccggcctccctcgaccaccctccgcagcagcatcgcccgcggacgggatccggcaacccctgaccgtgagcggcgggcgctccggccaatcccggaccttcaggaagtcgcgccgctccagccagcgtgaggctgagcgcaggaagcggaagtgccgatcggtggggcggaaccatgcaggaaggcggaagtggcttcgctagggagcctcccggcgtggagatggcgggagctggtcgcggagcagcggtgtccagggtgcaggcgggtcctgggagtccccggcgagcgcgggggcggcagcaagtgcagccgctggggaagcagcgcccagccccgtggcccgggcttcgcaggtgactgcgctgccccgcgaggccgccacacttccccagagaaggggacgccttgaaggctccgcccgggaccccctagggagcgttcgctcggaccccttccccaggtcgggctcagtgccctcctctgtctgtgcccgcggcccacgctccgccaggatcggttgaatgaatggaggcgcgagcgagtccttggttttgcctttcccgcgtcccagtgtcccgtctttgtggttctggacgaggtcagggcggaaaggcctcctgggctttcggagtgcctttcggcctcgcgtcccgtgaggaaggggttcagggacagccactgagtgagaccgagaggaaagatccctgctccctggactgctggaccggctcgcaccacagaagccagatgtggcccctgtatagatagattctttttttttttttttttttgagacggagtctcactctgtcgcccaggctggagtgtggagtgcagtggcgcgatctcggctcactgcaagctccgcctcccgggttcacgccattctcctgcctcagcctcccgagtagctgggactacaggcgcccgccaccacgcccggcaaattttttgtatttttagtagagacggggtttcactgtgttagtcaggatggtctcgatctcctgacctcgtgatccgcccatctcggcctcccaaagtgcagggattacaggcgtgagccaccaagcccggccagcccgtgtagattctattgccagacccaactattgtttctcttactgattctgcttgtgctttacttgggacgggtctcacccccgtgttctttctcccagcaaagagaagaagaaagtgaactgcaagcccaagaaccaggacgaacaggagattcctttccggctccgggagattatgaggagccgccaagagatgaaaaacccgatcagtaacaagaagaggaagaaagcaggtgtgtgcaggcccatactgggcggcagtgaagctttgtgtgtctcaacccgcccaatcgcccaaatacttcagaacgtttcaggcagaggaaatatgccaagacccggtgctcagaaggtgggggagcgtggccaaagctaaagcagtggctggcagctggtggcgctgtggttccagacgaggcttggaaggaggctgtggggtgggcggggaggacccgttatggggcctcaggatccatgctaaggagcggcgtttttttctccccaaaagtagcgaagattcatcagagtttttagcagggcacggccaattcatgtttactctaagcaaaaaaagggtcaccgagcgatgatggagtgagggagagtggacctggcaactggcggggctactgccagggagaagccatgattcttgggacaagagtgctgaagcaatggtagagagaagtgggtggagtcaggagctgaaggaggaaattccatcaggcccctctgagaagtcttgccttcctcccccaagtctgggtagggtgtccacatgtccaccgctgcaacccagaggtaacactctgggcatgttgggaaacggagtccactgtgtgtatattttgcttatagacacatttctcttcccaaacgtggcactggttttacagcaaagctgttttataatttgtgtataaactgtaggcttcttgttgggggttatatggctgccaa

SEQ ID NO: 1244477 - DNA, 4001 bp, Homo sapiens
atcagtgcccagtagaaaggatccacagccccttgtgatggtgaggaaggagaaggcacagcagaggcctgggggtcaggagggctcagctgcaaccctgggtttgctgctgacttgctgtggacctggaaaccccactgcccctctctgggcctcagtttccctcacaagctcagacatcacagatgtcaaattagtttctgaacaagagagaggagaggtcaaggctggggtctggccctgggtccacctggccggctctgaggttctggggactggtgggacagaaggagggctcttttggacgccagaagtttccgggggactaggacttcatggtccttgtttgggccctgggtcagcctgccctggactccatttagcagttctggttcggaaccatggtaaaaatggggagggtagagctctcagaatcacacggcaaaggcaggcaggggctactgggcacccctaggaccccagcaggggctgagccccctccagtggccctggggcctccaggagacctctgcagagtcactgtgagtggacaagatgcaccacacacaggggacacacactggccacccagacacttggccacagggcagacatgggcacagccatatgtacacataagggtacccacatgtgggcactcagcaccagggacacacacccagacacatataggcacagagctccatatgcacactcacaagtgtgccagcctctgccaggcctgtcttggctcccgagacaaccatactgcaggagcgtcccacgctgcctctgattctgcactcccagcccggtgggacaggtccggagatgcccagaaaggaactatcatccctgggaccagaaccaatctctgtcctccgcctgacatgccaacatgaaggcaccaggtattcagaatgtgagagtttctctgctccgggggcctcaaacgtccctggatgtcccttgctcaggcagggaagctggcagcagagtctgtctctctctaacttgtcatatggggtgacgggtgtggggtatggcctctgtgtgtcagtggcggcctggtttggcaggcggtcagaggtcgaggactcagtggctgtggttggtggtgccctggccctgaacaccactaaccactcaaaggaaccataacactgagccggctcctcagaacccagagactctgcctcctgttcaccgaaggcccccgggcagggcttcccctccggcctcgtccccatctcaacagcgagttggcaggattttctattctcgcacagtggcttgccaggaaggccttcccctggatggagaggaagaggggctcgctggtgtcacgcaagggatgtcagagtctggaggacaggcccggggtaggggctggtgcaggcagcgggaggcgcccggactcacccgatgacgtagaccaggaccaccagctggatcagtcggaagataacgcccaccttcttattacgcaccagcaccatgcggggggtgtcatactcgaagaggaaggcggccagctcctcctggaaccgccgtgccatggtgggccggctggggctcagaactgagccccctgcacggcctctgctctcagggtgagccgggtgccaccacccacgtcgatggtagagcttctgggggcttcctggccccttaggaagagcagggcggtgcaggtggagccagaggacaggagccagaggtcagctggaggcacttgggttggagagagaatccctgggtgatcagagcagctcttggcccctggaaggcaacagactgcaggccagcctcgcccatggacaaataaattcccaaagatagatggggcggggctggtggggccacccaggcccagccccactgcccctcctggctctgcgtgggccttgttgggcctccggaaacaggagttgttggcaggaaaccacaggccacccgtcacaggggcaaagataaagctctcagtcgactcctcaagttatcctccccccaaaacctggcaagatggagctctggccagggcctgggggaagctggagtctcctcagattaggggactccccgcgactcccctccactgccaaaatgagacctccatccccagccccatccaccaccctccaccctcccccaccagggttggctgcttcgtccctgggggtctgcagcgagcaaggcagagaggaaggaggctctgagttccagcctggcctgtgcccggtcaacctcggtgctgagctggcatctctatcccccagctctcctctcccactgtctgtcctgccggggccaccatcagagggagagaggtggcaggtgcccagccaagaccagcaccacatccgtcaccagtgccatggggggcccaagaccagccgagagagcctgacctcggagatccctggctctgccacttcttggctgtgggggctgggtgtcaccttgcctctccgagcctgcttcctcatctgtaaattggggtaataagggctgttccttctaggtcgaggctcacaggggatgggtctcagcaacacgggacagagaactggaggccaccattgagtctggggcacagcacctctgcagtccctgccttcccttcccacccccagctcgggccctgaacacaggggtttggggtgggcagagggtcccacgttggctcctcagagctggaggcctccccagccccacccctcgttttgaagatgagaaaaccaagctcagagaagagaaatgagttgcccaagctcacccggggtggtactggaggttcaagctggaagcaggggcctccctggcgagcccccacggccctgtcgtcggagccgccccacccttaaggctgataaggagtcttcttgctggcgagccatgagctggaagtgctctgggcagggagccaggccctggggctgggaatcccggcagcctgtctgaatgggggtcacccacagagggctgcccatggccccttccagcacccaggtcagtctctccttgtcaagtagatcagcctcacccctcgcggagtttctgctaatccagtgggtgtcatgggcttttctaaagaaaatccagagatgctgggagccagaactgtggtggccacgtctccccttggcctgaccttgaccctagacagttcctttcccagctgcccctgtggccattggaatgggaggcaccaggacacagctgcttgtgatggggagtggggtgggtgctgagactgtgtgggccattctgggtcccttttcagccacccttctccctgatatgcgttctagagagtgggtggggtgggagggaacggagggaggaagggagggagggagggaaaaggaagggaagggaagggagggagagagggaggaggaaagggaagggaagggaggaaggagggaggaagggagggagggagaaggaagggaaggaagggagggaagggaagagagggaggggagggagggaggggagggagggagggaagggagggagggagggagggaaggagtaaaggaaagaaggaagggagggagggaggagaaaggaagggaaggggagggagggagggagggaaggaaaaaaggaaggagggagggaaggagggaggaaagaagaaggagggagggaaaaaagggagggaggaaggaagagggagggagggaggagagagggagggagggaaggaaggaagatcaggaagttcttcctctcacatcaccaccatgtcttcttcctcctcctcctcctcctcctcctcctcctcctcctcctcctccaaggagccacacttgctgacagagagattgacggatggactgacagacttgcttggacagattgatggactgacagagcacacacacgtgattcagttacagcctaggccctggccctggccctgagaaagtggactggcctggagcaccgtctcatttggggatcttatcatatccacagtgtaccccagg

SEQ ID NO: 1244478 - DNA, 4001 bp, Homo sapiens
catgttggccaggctggtctcgaactcctgacctcaggtgatccacccacctcggcttcccaaagggctgggattataggcatgagccacagcgcccggccgccaatttcctaattttcatacttgtacttagttaaatatgtcctgctttccctgccatgtgaggacacagcgagagggtggccatctgcaagccaaggagagagccccccctgagaccccgaaccatgctaccaccctcgtctcagatttccacatccaggactgcgagaattaaatttctattgttcaagcaaaagcaactccatttattcattcatgcgttcatttcacatctattccctaagcagttaagtgctgctggggccccaccctcagggcattcccggactgacagcgacatcaggcaaatgatcccccaaataagcccaataattacactgtgggaaggccagggaggaagggagagggagttactggaaagcccagatctgggggctgagtggatgctaagggagtggaggaggacgggcaggcctggctgagcaacagcacagcgcctacgaggccgctcaggtgggaggcggccaggggcctggggatgcagctcagagaacgcggactgctggacctccgagggagagccaggcgtcagggctgccctcccaggaggaagcaggaggaactccaccgcatttactgaacgagtggaatgaggcgcatccccattgtccagcgctgcttctcccctccacctgctcacccccgacccaccccggggtcagggctctgaaggcgcctggcagagcagcctccacaagttgcctctttggctttgtggcgccagctcctgccaggtggcatgaggatgggggaaggggatggccgagctgggtgcagagatagaggcctctgggcaggacccccagctggacaccagagaggctggccgcgggtggggcaagttgaccggaagggagctcaggaacatgccgggctgatgagtttctccagctctgagtaggcagtgacaccctgtgattataaataacctgccggcgcctgggtcagctgccaggccaaggcccagggaggctcctggggcgacagctgccacccagccccctggcatccctgcccccttcccatggccctaacacgtggggacccgactctgggagaagcagctgcagggaaagcctgataaatcgaggaaaccagaaggcccctgcccacctctcatcacctctagcgccagtgggggagtggagagccccctctctacaccctactcctacacccaaggacccaaagaggacccccacagcaagcaggctcacagacccccagctaccgggaaaaccgcgtgcacgcctgcgaattccaggaccctggagaaggacgcggcggctggcacccgccctgcccctcccccgccttcccaaaagtccgcggagaacttacacgaccaggtacgccaggatggaggcctgcagcagccggtacagcaggcccaccttcttgttcttggcgatgacatacttctcggtcttgtagtcgaacagcgacaggcagagccccttgcagcccgcctgccccatggcgcgctctcagccgggcttgcggaccgcccggcccacgtgcgctcatggggagcactcggtccctcggtccctgcgcgcccggcgcccgcctcggcccgtctgcgcccgctcagctgcagcccggggtgtccggcagggctgcggggcgcgggggcgggtcggggcggccttttattgacgcggttgagaaagcctcggctgggagctgggcggcggcgagcaccggaacctcagaccgcgaccttgccgctacctcttcttcctcctcctcctcctcctcccctgacacagtgacacccctgcaacctactccccagccaccggtctgggagcgcagccccccggatgcgcaggaccgccctgtgctgttgcccagctgaaagcagcgatcgcggaggagaggaagtgaaagggggaagggctcctttttattttattttaaatttatttattcatttatttttgagacggagcctcgctctgtcgccgaggctggagtgcagtggtgcgatctcagctcactgctacctccgcctcccgggttcaagcgattctcctgcctcagcctcccaagtagctgggactacaggcgtgataatttttgtatttttagtagagacggggtttcaccatgttggccaggctggtcttgaactcctgacctcaggtgatccgcccacctcggcctcccaaagtgctgggattacaggcgtgagccaccgcgcacggccgggaagagctccgtttaaagcaaaactcccctttctctcgcaaagaaatcccaaagggttcttcctattgaatagatggggaactgaggccaggggaggaaggaaggggacacaacaggtttctccattcacctcgcgccaggtctcctgccagggagatacattcttgctccgtgggcagggggtggttgtgggggggaagccgtggctcccccacaggctggaagagacaagacttgtcccacctgaggctgcctgtgtctgctgcgactaatgcgcgtttctactgcagcagctgctgcaggtttaaaagcccacactccggcggagtcggtggtcaggcaggtcccgagtgccggcagcatgaagacctccctcccacactcagggcggatggtgcgggggtggggggcagacggggtgggggcggggagacacaggcaacccaccctaggatcctaaaaatatgcctggagagtgcgcatgtaccaactgtttggaatggttcccaacgcacaagaaatagaactgatccatgcagctatgactgcaaccctctcagtatgtggaattcaacaggagtgggagtgggatgagggagggcctccgggggggcaggtttagaactcctgacagccaaagacgcagggccctgggtgagcgcggtgtggtgaggagctgcgcacgcttattttctgcatcctgcagtctgaccacaagcagtcctgctcctctccctacccctggctttcacacacaaagaggctcccttccctaagccacagactcggggaactggaaggtaccctgaaattcatcagtgtgattctaaagtaaaagccccaaggaaggtgtccagtttcaaagtgcatgggaatcatgtggaagaaaaaaaggcaaattcctaggccctgcccctcaaattttcattcacgaaatctaagatggggctgggaacctgtattttgctctcaaactgtcatttgggaaagcgtggatctttgcatcttttcatccatttcaactcaactgccatttcttcaaaaaggcctgttattattgcccacccaaagtagcccccagtcccagcccagccactttctatcccattatctcatcttattcccttagagcacctgtcactatccagtaggatctcgttgacttagtgactgtgtcccatgctaagaccagaagctcccggagagcagggaccatgcctttggacatctctgtatgtccctgtgcctgccacataatagttctagacatattattgaatgagtggacaaacctggccctgatttttttttttttcaacagggagggcatttcgattccaccctgccccagtcatgactgcgaattttaggggctgaagtcatcttggctctcctgccagcctcctcctcagccccctgctaacacagcactccaatgctcactaaagcagccgccaccgagtgacatcacccctaagaagatgcccgtcaccctgacagtgctgctccagggtaaggtatagaggggaggtggactttcagagtctcacaggagtcgcctgaattgcatctgccctggagaagagcttgcccatcaaccccagcacaggacaacatgagtgtcacagagatggtgccacattgagtctctccactccccaagg

SEQ ID NO: 1244479 - DNA, 4001 bp, Homo sapiens
gctaccgacaggctcgatgctgttactcagctgctctaagcctcagccctttgtctgggaaaagcccgcctcacagagaggatgcgaggagaaatcacgcaagcacgtgacgcggcagctggcacgctacacacgacagctagcaggtgtcaccccgagagctacagccatgctgctgctcctaggaacagggggcagcacaaacagcccatgtggccagaaaggcaccagtctccctctcctcgctggtcagtctccaaacagacctcagccagccgcccccaggatggcaccagacaagacaggttctccattcgaaggttcttccaggatgaaaactcctcacaagaccctcagggcacaagtggacagagaacccggcctgaggaacgggatccctccaagcctctggaacccggcctccccaccgctcagacagctgcccctgcccttccaagtcggcaggccagtccctctctaaagacagttcaagggcagtgccacagccacacctgtatattccttgggggaagccgtgtctccattcctgaagaacttgatggtgggatagccgcgcacgccgtactgctgggccaggtcagactcctccgtggcgtccaccttggccaacctgatctcggaaccttctgccttcagcttcccagcggctttggcatactcaggggccagagccttgcagtggccacaccaaggggcatctggaagcggaaatgagatgctagaaagcagccttgatccctaaagcagccttgatccctcagcagtgcttccctttttcctctggcatttcccttcataaaaaccttatctactcaccaagataacccctcctaacgcacaaggctgagctgatagcctggtgttcttgggcaatatcaggacagaggccgtgaacgacaaactaccaccaaccaacaccagcccccactctgctatgtcaccatcagcacagccagacaaacctttcaatggttgctgacttcttattccccacaggcaactaaggcaaggatctcccctagactttccctttaagactacagacaaaagtgaagaagtgaccgtggcggcctgtaccagcactagctgtgagtatgagatgcacatccgtgcacacagaccctgagttgcttagggtgagaataagacgatctgtcaatagagttagcagctgtgtcaggcacaaggttcccaccccagggacagagctcaaatccttatggacgtgaggaaggcttgggattctcctctgagacaccatcggaaggactgctgtggcaagctgaaggtggggtgggcaggagcggggcgccttccgggtcggcccccggggaggactcggcaaggctggacactggcttgctctgtttgctcacacaggtcgatcctgttcttctcgcactaacaggaagatcctgccgtgcgcagggcgggcatcgggacggccccccggctcccagcccggctctcacccccagggagcccctgacatggcccccaaggcgggcagcaagggagcccttcagttccgggcgcgccgggggtcccgaccccgggggctgccgggccgtgcctgcgtcccaagagcctggctcagcggccccgagccccgcccgcccgccaggcccggcgctcacagaactccaccagcaggtacttgtgggccgccagcgcctccgcgaagttgcttttccgcagcaccaggacgtggtcctcctcctcgggggcgtcggcgcgcaccagggcggccacggccaggcacagcagagcgcggcgcagcatgtcggacacggatcaggcggggcgcttcggttggcgccgccgggacagcgggggcgacgagagcgcgcgccggtcccggcctcgcctttataaatcctgggtccggggcgcgcctgcccccccgcccgcgcgcgctggccgcggcgcgcacgcgccgctggggcccgccttcgattggccggcggacttcgaggctcgtctttgccgctctcggattggacactcacaccaggcctggccccggattcggaaacgctcctgagtgctccctggccttcgttcgggattggccgaggacctcgcgctcgctgtctttcttagcctctcattggctcccgacaagaactttttctgccttggcttctaattggtggctttcgcctgcaccttccacgggtctggaatggctgcccctttcggtagcacggactctgcgcctcctgattggccaagggatgcgcgcactctgcgcgttccttcgtcgaacgtggcagtggggaggagttcccagtttaggggcggagctgcggctgcgcttccgaaacccctcgtgttgcattctgactggaccgcgtacccaactggcacgccccccggcccccggaccggaagttggggtgacgcaatttccggcgcgcgtgtcaagcgtgcggcggcggccgtggaaggtggggttggccgcctagggtcggcggtgggctcggtgtgggatagccggcccggtccgacgcgctccgcgaggtcacgcgagacactcaccgaggcatggcggcagggcctgggcatgggaatcgtgcgcacagtgcgaggaagcctcggaggggatacgagcacagggcgggtggttaggagaatggggctggagagacgggcgggaggggcgggacctgggccccggggacctgccggctcccaggccccaggaagacgctgctcatgcgtggagcggccgcaggaaaggtactccccgctaaggccttcagggagcggccctttgccctgtgcgatctcttccttcctttcccacgggttgccaaatcctgtgacgctgccccttctctggtgcttctcagatgctctggtcggctcaggagacctcgcagctgttacacagctgtggaaataccctgggcgctgcttcactccgaaggcagcagctgggtttgcctcccgactcgacccgccaccgaggctcctgagcacttgaaatatggccagtccacctgagacgggctgtgagtgcgcaatgcacatcaaacttctaagactgagtgtgcggggccgagtgcggtggctcacgcctgtaatcccagcactttggaaggccgaggcgggcggatcacgaggtcaggagttcgagaccagcctgatcaacatggtgaaaccccctcacctcccgtctctactaaaaatacaaaaattaacagggcctggtggcgcgcgcctgtaatcccagctactcgggaggctgaggcaagagaatcgcttgaacccaggaggcagaggttgcagtgagccgagatcgcgccattgcactccagcctgggcaacagagcgagactccatctcaaaaaaaaaaaaaaaaaagtgtgcgtgtaggggctggaggacagaaggtacagtatttcgttaataactttacattgactactacatgttgaaatattctgtatgcatatgttggattacataataatattgaggccaggtgctgtgtggctcactcctgtaatcccaccacttttggagaccgaggcaggaggatcccttcagcccaggagttcgagaccagcctgggcaacatagtgagactcccgtctctacaaaaaataaattaaaaaaattagccaggcacggtggtgtgcacctgtggtcccagctacttgggaggtggaggtgggagaatcatttgagcccaggaggctgaggctgcggtgagccatgatcccaccactgcactccagcctgggcgacagatcgacaccctatctcaaaaaatagtaaaaaaatgtcctttttttaaaatttttattttttatttttttgagacagaatctcactttgtcatccaagctggagtgcagtgggcgatctcggctcactccacctcccggattcaagcgattctcctgcctcagcctcccgagtagctgggattacaggcatgcaccaccatgcccagctaatttttgtatttt

SEQ ID NO: 1244480 - DNA, 4001 bp, Homo sapiens
aattattttgtgaaactgtgtcctaaaagacacccattagagattaaaagctagctaatgccttaaaaccaaatcagaattttttaagtaaaagcttttactatatattcaacatcactatgacacagtcaacaggaaattttcctgattatgagactggaccccgcagcaattaagccgccctgctgcagcaaaaaaaaaaaaaaaagcaaacactcctgtggcaaaaagggagggatgacattatcactggtatgaaaggcccaagcactgtctcctccgccctagcctcgaaaagaaattcacacaaaataacccacccccccaacaaaaacagaattgccaaaaatggcacaaattgtttgtttggcctttaaaaccttatgaaactccaagactgtgtgcttaaaggagagatgggaatatcagtaatatctctatttgtccggactgccacttaaggaaagagggaggggggaccttggcatgacatcgcccattgagaacgagaccacaaatctggtcctcctcttcaaaggcgtattttcttaaccaaaagactgatataaattgggcccaaaccccaaaagaaaatttcctgccctcttcccaaggagtttcttgctaagtcactgaagaaaggtagcataacatataaagctatggtaccttgctctctcctactaaatacggaaaacctcttcccctctactgctacgtttagaggtgcagagtcaaaatgtgtcgaccacctcaaaggcattttctcatgtgggaggctaaagagggtaaatatgcagaggcactgcgtttcccaaaggggcagggagatgagattagacgaaggggaatggcagggagcctcgaagctgaatgttaacagcatcaaaaggcaactcccgaccgaggagccggtggcagaaagaaaatcctgccagattcggtgggtggatgctgcggattgctcggtgggccgggctgcctctcctcggcgggtgctgaggctggaccgccgcaccgggggccagggagacggtgggccaccctccgctggtcaaccccatcttaaggaccagtcggggacggaatgcctggaaggccctatgagtgccccggcggcgcggggctgagccggtccccgagccgataactgagggtggggtggggactgcggtgctcgtctccgcggccggggagagcagggccgatccttttccccaagatcagagagctacctggtccccacgcccttccaacccaagaatacttttcttgctaagtcaccgagggaggagggcgatcccttcttggggagggccgcggggcgggggtcgcagaggcgccggcagcccccaaagccgggcccgggaggagaggagcgagggcagcgccctccccggacagtccccctcctccgggtctctcactcaacggccgtcgcggccgccattttgagagcgaggagagaagaagaaggaggaggcggcggcggaggcagggggaggggagaatgggagggaggggaccggcgcagccacatcgtcaggccgccgggtccggcctgcagccgcccgggcgcggtggaggagacagaggggagggcgcagacccgcgccgccttaccggagcgctgcaccgccgcctccgcagggcctcttccgtccttcactcccatccaccggcgggggagggggagggagaggggagggaggaaggagggagggagggaaggaggggggaggatggcgcgctgggcccgggcccggggagggggaggggaggggagcgggcgggctcctcagccgttccggggctcgagtccaagctcggcgctcgcggtttctctcgctcgcgcccgagcgctcccctccttctccttctcgctccctagactcccgtgtcgctgctcctccgctcgctcactcgctctcccggccgccggactccgccgccgccccgccgctccagctccgtctgtcacaggagctgccccaacgccctgacgtcaccgcgccgccgccgccgccgccgccgccgccccagacccgccaggaagagggaggggcgggcgccgggagcggaggaggggctgcggcgcatgcgccgggctgggccgggccggggccgcgctgccttctagcgggcgggcggctgagcggtgccacccggccggcgggcgagtctgcgtgcgaggtgctgcttctcacgctccgcacgcttctgttaaccttgggagaggctcttttttcccagcccctcgtctgacttgcggccccttctgaactctggctctgctcacctcgctgccctgcttttgcgctcatgcggccgaccgcggcgtcccgttggcaccgtgtgtggcgggccccgggaggcgcgagaggcagcggggcccggccacctaccgcccctttctgcctccggcctccgagatgatttcccagtttgggggggaatgagggaggggagtaggctggctggcttgggaggaggagctgttgaggttaaaaggcagatggaatgctgtcattgtcttgatttgtattatagattcttaattgggaggactcgcttttggatatgattcagctattcttctccttagtcacacacagacatcagagtctctccaggtctcgaaacggatgcccaaagaaaggcctggaactgtatccctataagggatgtctgtgtgtgtttgctaaattatggattgaaatattgatgacaagagtcgtcttggggatttgtagttaatttattccacacagatacctatgatttttcttttcttttccttttttttttttttttttttttgagacggagtctcgctgtgtcgcccaggctggagtgcagtggcgcgatctcggctcactgcaacctccgcctcccgagttcaagcgattctctgcatcagcctcccgagtagctgggagtacaggcacttgccaccacgcccagctaatttttgttttttgtttttgtttttgtttttgagatggagtctcgctctgtcgcccaggctggagtgcagtggtgcaatctccactcactgcaggctccgcctcccgggttcacgccattctcctgcctcagcctcccgagtagctgggaccacaggcgcccaccaccacgcccggctaatttttttggtatttttagtagagacggggtttcatcatgttggcccggatggtctcgatcccttgacctcgtgatccgcccgcctctgcctcccaaagtgctgggattacaggcgtgagccaccgtgctcagccgacccttgatttttaaaaagcgagatttggggttctgaataattcaatatgggctattattttaataacaggtttaaatgagattatcttatcattcatttgtattgtccaaggaagcttttttcttgaaacaggcttaagcttatgtgtactgattttattgcgtcactttatgtaggtaaatatatatatatatactgcatttgagaagcagcagagttaacgaaagagacaacttaggtgtaaatcctggaccccgcacttgccagaagcgcgacctggggcaaattaccatacctctctttggcctcagtttctcaataaaagacacctaataactaacccggcttttgtgagaattacagaggaggtgcagcctgtgtaaagtatcttagtttcgtggggacttataggtaactcatgtaaacattactgttgcttgataccaaaacaagtttcctttgttcaagaaaggttatctctgccaggcacaggttgctaacccctgtaatcccagcaatttgggaggccaaggcagggatggggaggttgggaggggggccgtggatcacctgagccaaggagttggagaccagcaggtgcaacatagtgaaacctcatctctacaaaaaaattttaaaaattagctaagtgtggtggcacatgcctgtagtcccagctactggggaggatgagatgggaggattgctcaagccctgg

SEQ ID NO: 1244481 - DNA, 4001 bp, Homo sapiens
acaaccctcccccaccctgcgccacacacacacacaatcacagccagaccagagccaggcccaccctcgctacatgcagaagccatccacatccaccccccacctagaagcacacagcctgacatccctgcctggaaacagaccctgcaaacacacactaaccttttgtacgaccctggtccacccagggtaaattataacataagtcttccagcaacaaaagcagttcagcttccaaagtccgctctggggaccagaggctggagggctgcagtgggcatgtgacctgcacaaagctgtaccctcttcctgttcgggctctctccattcccatgacaacagctccatcaaccaagatctctcaggcaaggccaggggcagcagagtcccccttcctgcccaacccccaagacttcaacttgaaccctacctagctacacatggtctggatcctggggttggtttcctgcttcattccaaagtcagttctaaagcctcaatcccccaacccccaaccaggggagcccgtgggaaaaccttcccaccaaaaagctgcaacagagctggctttatgctcccagtaataacaccttggaccagagtgaaggggggagggaggagagaaattaaagagtttcaggaacagaaactgccagaggtcccagaggaggaggcatcagaacagagcggggaggggacaaccaggagacagccctcccctcgagacagacctctggggagactgaggcagcatgggggacactgagggacaaagatctcgggaagcgctgggtaacacttccacaatattcactggcaaatccacccgcctccatgccgcctcctcccacctcaagccaaccggagcgattatgggcagacaggggcagtgggggagggcgaggggcagcccgggcccaccgtggagacaggcagggggtgtctgcttgcccgggggtcccacgccctcagagctagcagtaggagggcgtgcgcagggtggggtggctgggcgtcccaggggaaggggggccagtttagcagatccccctgcttccgctggcgatgggaaatattgcgataaatttccctccatccccattctacccccagcgcccgggcttccccaggagcccatgtccaaggatcagggaccccagttaccgggtggccgctcccaccttccctagagccaaactttctgcggggccccgggaggggtgttccggagggaggctctgctgaggtggttcggggagggggcggggcgccggcgccgggacggggagcggggaccggcggggggaggtgcccgagaggacccggaccccggcggggaagggcgccctcccccggcctcgcggccgccccaaagcacatccccttctgccggccccaagtccccgcgcgtccacggcgcccctgtgcccacgggagagcgacccccgcccagatggaaaagggggtagaccgggcagagcgagaggcggctttggctcgtggggagcggcgacccaacccagcgcgcatcccgcaagccctcccggctgccccggaccttccccctcgctacctcggaacagggtctgcccgggggctgctgcacaaagaggtggtggtcgagggagacgccaaatcgttaagacggggagcccgtttcggccatcttggaagagaggaaagggaaaaagggacagaaaaaagggagaaagaaaggcggacggggcaagctgggctagggactgacggggcgcggggggtgcgaaggcaggatcggctcagagcctccccctcccatcggggcttgcgaagaacggccggcccccatcccaatccccagagggttacaggccaggagagggaaaggcagggggagtccgctccgcttacctgggttcggggtccggtgggtctcggggagggggggatgggagggagggagggaagggaggggaggggggccgcagccgtgtcgctcgcccgggcggcgggaggggagaaacctacggtaagaaaggagtttgtgaaagcggcttggggtgggagggagaggggaggggaggggaccgaggggggaggggagggaccggagtgtgggggggagacaaaatggcttttttcctccagacaagagtaggtcccgcccaccactcacccacgtgacctcattccttcaggatgctggcagagacgggaagaggagggggaggctggcgcggccgctccccgccaccggctgccgggtccctagccaggacgagacccctcccttcccatgcggccgccccgaccccggaggatggattctcttatgttaccttccgcagttagcccccctcccttcaaaatatgggttccccccactgacactgtgatgcccatccctaactggggcgcctggaaaatggtgaaatggggactgggctgaaaggtggctcgtggtcctccacgccccggcctagaccaaagggcgcggggctccggcgggggacgcgacgccttcagccaggcgtccgagcgattttcattcactccaagtgacactcccttaaaattaataactgcatctgggagggcgagcgtgtcctccccactccccttgccccctcggcggcaggggcgctggccccgaaaagcggcgcaccaggatccagcctgggcgcctggcagggagcaatcgcgagaggggagtggaggtgcggggtgaggccgggtggggggcctcgccgcggggggatcgggtagctctggcggaggctgcgcccccggcgtgctcgggcagagaagaacggaggcccgctgaggatgggaactcaggctccgggtctgggacacaataatccggccgaaggcgagcggccacactggactaggaaacgaggcgccgggctgtaaggtgggcccgcgccttttctcctgcctggcgctgattcccgcatttttcgctcgcgccctgcgctgcgcgctgcctgtgcgcctccctgggcgcgcgggcgggagagtcgggcgagcgccaagacggctgggcccgactcccactggcgccccggctccacctggcgctggggctccggtccgcagtggctccggcaggagggagagaacgaggagggaggcttggaaacgccgggagtagcggtgaggccgacgccggggaagcgaatcgatactgcgttactggacgcccgtgggcctcatgaggatggtcgattccctcattcgttattcacgatttattagggatggcggccgcgtctgtccctccagagagctcgattatccatccggccagcagcgccattaagcgcactgacggtgggaggctcgagttagaaattaggataggaatcttcgcccagttttggagcgcctgcctcctcttccctcgttgctcgcagccaaggcagccgcgaagctgggggcctcgggtgaatgctttcgccctctggccggcgaccaggagacctgcgcacactggccgccgagtgaccccagctcgagcctgcagccacaccagcgggacgggggcggggaggaagaggaagggcggagagacttccttccagagggagtggtccgagaaccggcgggagaagggccaagggaagatccggtcacctgctccggagcctgcaggcggagaggcgagtagttcaccggccccggaggaaaggggaccctcccactgttcccaggcaaatgtgtcgccggcatcctgcactctgccggggaagacgcgcatccactcgctctgcagggaggggaacgcgggaaggactcccagtcagccgcccctctctggctacaagaccccgaacaagagaaacctgtaacaggggctctgcggagatctggatcccacccaccaaccacatgggcacctggggggctgcccctcggggcattatcagccagtgggaagggggttgacgttcctctgcggcccatgaatcctggagggctgcccgaggggccaccggggtccatccacttattcttcg

SEQ ID NO: 1244482 - DNA, 4001 bp, Homo sapiens
ttgatgtggctggtaagaaaaatggaatagcagagaagataaaagaattttgcctggctgggtgtggtggctcatccctgtaatcccagcactttgggaggctgagggctgaggcaggaggactgcttgagcccaggagttccaagaccaacctgggcaacatagcaaggcctcatctctaaaaaataaaaattaaaagaaagactttttctgaaaatgtatcaattttcaaactaaggtaccttttaaagttaccctaagaaattaattctgcctgttctagactgtgaacttcttgatcatcttgttaaacccaatggtcctagtacacagcaagcattcagagtttgttgagtgagtaatccatcaagatataacatctgtatacagaaaaaaagtaaatatggcagcttagccacttgcagtatctgctgtgttctggattatgtaaaggccagccctactaatttgtaagtattccaaatagcatgttttacagtcccactaactggagagggacggactgcatccaaagcaaatatatatgtatttagacaggaaatttcttcataatacctatattctccatttatttagagtagggtttcttgaccttggcaatattacaatttgggactggataattcttccccgggagaggtatggggtcactgtcctgtgcattgtagagttatttacagctatcaaattttcacacatatctgacagattggatttgaaccccctaacaaccctgcaatgagacaggcagagttttcattcctgcaatgagacaggcagagttttcattcctgtttaacaggtgagcaacttctaaatattgcaaacgtttgttttctgttttaaaatataaaaacactatatttgatgtaaacaaaaatgcaagtgcctaaaaaggcaaccacatgtttgacattcacaagatcatgaaccctccaatcccacctctgctattcacttatctgggccatttcaggagtgacttcacccttgaggcctgttgctttcacctatgaaacctggggtttaaccaggtgagcatgaggtatcctcctaactctaacactataatatcctggtcctgtattaggaaacttcagtttcacccacattacctgcaggcgacttttaacctacttgccatgctgcgactattacacaaagcaactgatgacaagccttggatgacaggcctcaggggcaatgccttccacctggatggctacctgattccaaagacttcaacaaccaatcccattcctcctacatctttactcctgcctgaagattcggactcaacttattaagagcaacttggaaggaaggggcaacaaccaaaagaaacgagtcactaaaacagtagggcccttctcggcaacccctgacaccaccctgcacatccagtccttgaaaagttctgtttcttttcctcctatatccaagccctaagataccgcccctcccccaccccagcccccatatgccactgacacgcattggagagtgaggatcaacgtcccttgcagacgtgtgcacgggcctaggaaccagctgacccacgtttcaactgtcattaacttctaactacatgccccgtcgggcctgacctgaggctgaactcctgtgaccttccaactcccctggatctgcacggcagtcacttggaggcaccgcccctgcgctagctccagagcttgagacagggtccgggcggagctccttcctgagccggagaagacgcgcccctgtcccttccgcgactgccgccccgcactccctgcggggaggtcgaccccggcgcattctaggccccgcggtcctccagcgggttggccgctaccttgtccagcagccggtagatgctgatgcccgaggtctccactaggagctgccagtcggccccggccagagcgggctgctggagctcggcgcaggcctcccagaactgctcctccgagaagcttccggcggccagctccatccttccgcagtccgggctcctccgcctggagggcaggccgcggacacccttagtgtgggcctgggggcggggtgaccgggctgccccggctgccccggctgccccagcgtcattggcaggaaactgaggagaaggcggggcctagactggaggagcggcctgagggtggggccctggaggggcgggcctagaaaagcgggcggggctgagcaaggagtgaggaggatagacaagaagtaaaaggagaaaaattggacttgatgtggggaaggaaggaagagctggagaagtaaggaggcttccagagggaagggaaaaaggaagggagacagtgatgtcacctcaaaaacagctcctcagtagcctatcccatactccctgctactcccataacctacagacctgtttgagtgtctctcatttacctttctgaataaagtagagaaagtctctttggtagacatgagaggagaggtgggcagagtagaaatgctggaaaaatcctaaggggtcaaatgccagaagtgtatttcaatataatttctcttctttctgctatacattgtaaaacattattctgagacgaggtccattggattccccagaagactctaggggttcataacaccaaaacagtttagaaacctaatccataatggatctacaaggttgttgccacccttgagggtagaaactgatctgaaaggtgtcgtactatccacctaggatttctgcaacttgcataatttagctcactgtgcaactcaaacatcttcttgttcctttgaagtcccttgagtaatactgtatttcccaccagcagactgtactacctgactttgaataaagtaggtcgtttgaacatcaaaacgatgtaacagccacgtgagtgccaataaactctggaaactcatgtttcctaatctgtaaaatgggtcaagaattgtgctaccagttacagctgaggaggtggttggacaaggaataattttccacagtgcccgtccaagtaaatgttcaataacaatttccacttgttttgcattactatattgaaatgcttttctttccttacttgaaagaaagttgatggcaaagtcttaatttatgtgattttccaatcaggcaaatgatcacatttggcagcttgcttagttagacacagcagagataaataattgctttcctcaagtcagtcctggttctgtttggctttataggtgtggaaagagggatgtgaaattttcctagactaaatgcacaaaagtttaggctagacatactttcccactgttttataactccttgtaaattttctatgtattgtaaatccatattttatttaaatggaaattcattgcttgaaaaaccaattgtgtaaaaactattggctatgaagtattttcaagtatcttcaaggaatccattataaaggtttgatttgataaagctttattactatatggcaatagactaatggagacaagcataagaacacaaacgacatcatgcaagatataaagcacgcacttcaaattgtatttattgtatgtgtttaaaagtgtgttgcctaataaactcaggagaaaaataaatatatccttgaatatgctgagatttacactcagttattttattacagttaatgaaagaataatgttaggaaatattttatggtatctctaaagtctaaaaacagctaggaaagggatccaggaaggcctgttcttgagaagttgccttaatagcctgtttcctttgtgaaaaaaaactctctgaaacaacttctggcaaaatggcaactaaagctcctggcttcaaacatggaaatgttggttaaaacgtgttgaaaatagttgtaaatacatggtttagctgaaaagtgaaaaaggatacttccaggtttcagaaagggaagagagaatgaaagccagcaacaccagctcctgaatattcttagaatggatgattggtcctctccccacctccccatgcagtg

SEQ ID NO: 1244483 - DNA, 4001 bp, Homo sapiens
ttgagcccaggagttccaagaccaacctgggcaacatagcaaggcctcatctctaaaaaataaaaattaaaagaaagactttttctgaaaatgtatcaattttcaaactaaggtaccttttaaagttaccctaagaaattaattctgcctgttctagactgtgaacttcttgatcatcttgttaaacccaatggtcctagtacacagcaagcattcagagtttgttgagtgagtaatccatcaagatataacatctgtatacagaaaaaaagtaaatatggcagcttagccacttgcagtatctgctgtgttctggattatgtaaaggccagccctactaatttgtaagtattccaaatagcatgttttacagtcccactaactggagagggacggactgcatccaaagcaaatatatatgtatttagacaggaaatttcttcataatacctatattctccatttatttagagtagggtttcttgaccttggcaatattacaatttgggactggataattcttccccgggagaggtatggggtcactgtcctgtgcattgtagagttatttacagctatcaaattttcacacatatctgacagattggatttgaaccccctaacaaccctgcaatgagacaggcagagttttcattcctgcaatgagacaggcagagttttcattcctgtttaacaggtgagcaacttctaaatattgcaaacgtttgttttctgttttaaaatataaaaacactatatttgatgtaaacaaaaatgcaagtgcctaaaaaggcaaccacatgtttgacattcacaagatcatgaaccctccaatcccacctctgctattcacttatctgggccatttcaggagtgacttcacccttgaggcctgttgctttcacctatgaaacctggggtttaaccaggtgagcatgaggtatcctcctaactctaacactataatatcctggtcctgtattaggaaacttcagtttcacccacattacctgcaggcgacttttaacctacttgccatgctgcgactattacacaaagcaactgatgacaagccttggatgacaggcctcaggggcaatgccttccacctggatggctacctgattccaaagacttcaacaaccaatcccattcctcctacatctttactcctgcctgaagattcggactcaacttattaagagcaacttggaaggaaggggcaacaaccaaaagaaacgagtcactaaaacagtagggcccttctcggcaacccctgacaccaccctgcacatccagtccttgaaaagttctgtttcttttcctcctatatccaagccctaagataccgcccctcccccaccccagcccccatatgccactgacacgcattggagagtgaggatcaacgtcccttgcagacgtgtgcacgggcctaggaaccagctgacccacgtttcaactgtcattaacttctaactacatgccccgtcgggcctgacctgaggctgaactcctgtgaccttccaactcccctggatctgcacggcagtcacttggaggcaccgcccctgcgctagctccagagcttgagacagggtccgggcggagctccttcctgagccggagaagacgcgcccctgtcccttccgcgactgccgccccgcactccctgcggggaggtcgaccccggcgcattctaggccccgcggtcctccagcgggttggccgctaccttgtccagcagccggtagatgctgatgcccgaggtctccactaggagctgccagtcggccccggccagagcgggctgctggagctcggcgcaggcctcccagaactgctcctccgagaagcttccggcggccagctccatccttccgcagtccgggctcctccgcctggagggcaggccgcggacacccttagtgtgggcctgggggcggggtgaccgggctgccccggctgccccggctgccccagcgtcattggcaggaaactgaggagaaggcggggcctagactggaggagcggcctgagggtggggccctggaggggcgggcctagaaaagcgggcggggctgagcaaggagtgaggaggatagacaagaagtaaaaggagaaaaattggacttgatgtggggaaggaaggaagagctggagaagtaaggaggcttccagagggaagggaaaaaggaagggagacagtgatgtcacctcaaaaacagctcctcagtagcctatcccatactccctgctactcccataacctacagacctgtttgagtgtctctcatttacctttctgaataaagtagagaaagtctctttggtagacatgagaggagaggtgggcagagtagaaatgctggaaaaatcctaaggggtcaaatgccagaagtgtatttcaatataatttctcttctttctgctatacattgtaaaacattattctgagacgaggtccattggattccccagaagactctaggggttcataacaccaaaacagtttagaaacctaatccataatggatctacaaggttgttgccacccttgagggtagaaactgatctgaaaggtgtcgtactatccacctaggatttctgcaacttgcataatttagctcactgtgcaactcaaacatcttcttgttcctttgaagtcccttgagtaatactgtatttcccaccagcagactgtactacctgactttgaataaagtaggtcgtttgaacatcaaaacgatgtaacagccacgtgagtgccaataaactctggaaactcatgtttcctaatctgtaaaatgggtcaagaattgtgctaccagttacagctgaggaggtggttggacaaggaataattttccacagtgcccgtccaagtaaatgttcaataacaatttccacttgttttgcattactatattgaaatgcttttctttccttacttgaaagaaagttgatggcaaagtcttaatttatgtgattttccaatcaggcaaatgatcacatttggcagcttgcttagttagacacagcagagataaataattgctttcctcaagtcagtcctggttctgtttggctttataggtgtggaaagagggatgtgaaattttcctagactaaatgcacaaaagtttaggctagacatactttcccactgttttataactccttgtaaattttctatgtattgtaaatccatattttatttaaatggaaattcattgcttgaaaaaccaattgtgtaaaaactattggctatgaagtattttcaagtatcttcaaggaatccattataaaggtttgatttgataaagctttattactatatggcaatagactaatggagacaagcataagaacacaaacgacatcatgcaagatataaagcacgcacttcaaattgtatttattgtatgtgtttaaaagtgtgttgcctaataaactcaggagaaaaataaatatatccttgaatatgctgagatttacactcagttattttattacagttaatgaaagaataatgttaggaaatattttatggtatctctaaagtctaaaaacagctaggaaagggatccaggaaggcctgttcttgagaagttgccttaatagcctgtttcctttgtgaaaaaaaactctctgaaacaacttctggcaaaatggcaactaaagctcctggcttcaaacatggaaatgttggttaaaacgtgttgaaaatagttgtaaatacatggtttagctgaaaagtgaaaaaggatacttccaggtttcagaaagggaagagagaatgaaagccagcaacaccagctcctgaatattcttagaatggatgattggtcctctccccacctccccatgcagtgtttcccagtggaggaacttccattagggaaatgtttgacctcactcatttgctcaactcctactctggagaagatgggtgatttaaatgcagccatgcattgcttaatgacagggatatattctga

SEQ ID NO: 1244484 - DNA, 4001 bp, Homo sapiens
ggggggccgcgggtgggcgaggccatctgtgcttaccatcggtgtgcacgcctacgatgaggtagtcacccatggcccgtgcctggcgcagctggttggagtggccgtaatgcaccatgtcatagctgtggagacagagagagtgggtggtccctgtgccaagggtggggaccaggtgtccctgtgggttaggggcagagctttgctcctctgaggactccttaggaagcgctctgagaagctgctgctgggagccctgggactgggattcggaggatgtaggtgctcagctctccaccccactggctcctgggcctgacggtgggacccctgtgccagatctagaaagggtggcaggggcagagatgtcaaggcctggctgggtctagaggactggtgggtgcaggacagactggagcccactgaaagctgcagggccacgtgtcctatcccctcaccaaatatcaactgccctgggcagtcactttaaaataagccgatgttaactcttggggtagggttggatcctagactaccttgagacaagcaaacagtccctggggctaacccaaaacaaatccaaccacaaaataaaaccctgggaatcactggccctgaaaatcctgtctctcctcccttacggcctcaagctcagcaggcttaacgctaagggtgaacagccactgccttgccacctggctcgagagttttcattcacaaatctaggtctgctaacacgtgaactctcaagcccaaagctacacagccctgccaccaactgggcctcgctgccctggcttcttcgccacttctttacagcagcggcccatcccctcaagtggacaaagctgtccctgcctctccagggagaggtgtgaccctggcagcccacacagtgcacagagttgctccactgcacaccactgcttcctcccagcacccctgccacagtgcgcggagcccggcagacatgctgggtaaaatctggcgggcccatgtacccactggacaggctggaggggaggagggggcagaggctgggccaggggagcacagtctggaatggggctggggcctggtcagggcaaggtcaaagtccactgacacaaagccacattccttttcccagaggtgactcggacacagaagacaaggccctgcttgctctcctgggaagggctaatcagatagaggcgcttgcttcctggattccatccggcaggcacgtgaaagggtcagaggtagcaaattatcagtaacggtcgtcttcctttcacttgttgacaacccgaaacttttcttaaaacaatgccctctgactggccagggaagaccgatcgcattctagccccgcggaggaggacccgggagcccgcgggcttcaccgcgggtcccggacaggcaggtcgcacccgatgcccacctacagggacgctcgcccggaggccaggggaacccctggaccggagccgggcaagctggttgctggtggttacggagaagcagggaggccgtggctccagatctcagcgcggtggctgcaccggagaggtcggcgtgaccgggcggggcctccgccagaggtagacggggtcgcccacggcagggcgcggagcctctgcagcccgaccctcccggcaggcgagccccgcagcctgccagccccggcccatgccggacgaggacgccacccagaacgcgggcccggtccccgggcaacggctggcgcggcgccccggaaggaagccggccccggcgcccccgcggcccgccccggccccgcgctcaccagccatcgcaccacaccctcacggcgcgcctgccccccgggcccggctgctctgcgccgcctgcagccccgcgcccgttccggatcatggccccgcagcggcggcgcggacagcctggcagctcccggcgactccgagcgccgccgcccgccccgccaggcgcacgctcagcggccgtcacgcgggcctcacccgctgcgcacggccaatggcgtgcgccgctcggcccgagccccgcccccgcctcccccgccccgcctcccgccctccgccccgagccccaccccccgaaggccgcgccccaccgcacctccgcgcacggccaatggcgtgagcccctgacagagtcccgccccctccaaacgcacagccaatggcgtgtgccgcgctttccgagccccgccccccgacccacacctggcctctccgcaccgcccacacctggcgctcggctggcggggcagtgcggcgtggggaccgtcccaccgccgccacctccgggaacctccacggggcgctgtcccaaccaggggagttttttttcttattttttggcacaataatctacagttgtcccctgtccaaccaagggagttttaagccacgaccgagctgccaggcggcagacctgagcccggggagcccgcgccgaccactcggggacaccggaagccagtgcagaaacgtttaatagaaataaaaaggtctgcatagagccgaggctcggagccacccctctgccgcacatccagtacagagaggattctataaagttcacactttttcattaagtagtagtagaaatacggtgaggccctgagactggcctggtgagcgaggaaaggccgctgggcgcttccactctgcaggccggggctgaaataacccgagttccgttctcacagaaaggtgcggctgccacctcttgacacagaggccggatgggcaggtgtcctcgatggccaggccgtatcagggtacaaccgcagcagtgcaaggggcttcctcaaggacaaatggctaaaaatgtcacggtgaaaatgtcatccccaaagagttcgttctccctagacccgtgggggcaacccagccttcaccgtgacactggccatctgcaaagtgccaactgttcttcatcgagcacgtgattacgtcactttcttcctttttgtgcgttttgtgcagcccctgccaaaccagccccctaggatgggggccgagctaagcggtgcaccccggtccccaggcggggcctcctctctgcttctgcacagcgacttccgactgtggctgccttcttcaccagcacgcaggggagtcgccagtgagaaaatgggatcctgccacctgccaaaaagggaaagcggcatcaggcgggcctgggagcctctcgcagtcacacctgccccagctcgggaaagctgtctgcggtccctgccttcccatccccttccctcccgtgtcaactgcggcggggctctggttggcggcagcttcattgttaccaagctgcagaacggatgtgggagaggtcacctcttaggtggtgactcaaaggtcggcacccacactagctcggtctcctcaaaactccgtgtccttgtccaccactgagcggcgtgcacacacagggtggggcagcagtggccccagggctgcctccgtctccagggatgagtcactagcaactctgggccccaccttccacttgtaccgctggggcaggtggaccagaccctctcccccttcccagctgactagggaggcgtggcctacagacgaccccgtgaagaaagcatgtgtctgacggagatgcagaaccacagatcataacttaagatacagatacgcactgataaggaaaatgagctaagttaatgtaaaaaaaaaatacagtacacgatagcccacatcacagaacaccacacacataacatacaagaagtgccaggcccagaaggtgaagggatccttaatttcttgaaccctttgattaaaagaagttattgatttcccctataagaccctgaaaattcacagagaaagagagtgtaaactttttactcaatacatacaccaagtctaaattatcacaaattctgtattaaggcacagtttgtttaagctttcccaaagtacgccaactcccaaaaccaagcacacagattctgtctgaccagagctgccgagtgctcgtcccctccagatgct

SEQ ID NO: 1244485 - DNA, 4001 bp, Homo sapiens
cttctgacgagcaggtgctcagcccctgaaggcttgggagcctcgctggcagtggtggggagcaggtgccccttctctttagctgggacaggaaatgcaagatgggaaaggcattaggccatcctcagctggggctgggctgggtgagcctacagtgccctcccctacagctgtgccctggcaaggtggccccaggcctgcaggctttcagtcaacagtcgcaacccacaggagggctggggggccgcgggtgggcgaggccatctgtgcttaccatcggtgtgcacgcctacgatgaggtagtcacccatggcccgtgcctggcgcagctggttggagtggccgtaatgcaccatgtcatagctgtggagacagagagagtgggtggtccctgtgccaagggtggggaccaggtgtccctgtgggttaggggcagagctttgctcctctgaggactccttaggaagcgctctgagaagctgctgctgggagccctgggactgggattcggaggatgtaggtgctcagctctccaccccactggctcctgggcctgacggtgggacccctgtgccagatctagaaagggtggcaggggcagagatgtcaaggcctggctgggtctagaggactggtgggtgcaggacagactggagcccactgaaagctgcagggccacgtgtcctatcccctcaccaaatatcaactgccctgggcagtcactttaaaataagccgatgttaactcttggggtagggttggatcctagactaccttgagacaagcaaacagtccctggggctaacccaaaacaaatccaaccacaaaataaaaccctgggaatcactggccctgaaaatcctgtctctcctcccttacggcctcaagctcagcaggcttaacgctaagggtgaacagccactgccttgccacctggctcgagagttttcattcacaaatctaggtctgctaacacgtgaactctcaagcccaaagctacacagccctgccaccaactgggcctcgctgccctggcttcttcgccacttctttacagcagcggcccatcccctcaagtggacaaagctgtccctgcctctccagggagaggtgtgaccctggcagcccacacagtgcacagagttgctccactgcacaccactgcttcctcccagcacccctgccacagtgcgcggagcccggcagacatgctgggtaaaatctggcgggcccatgtacccactggacaggctggaggggaggagggggcagaggctgggccaggggagcacagtctggaatggggctggggcctggtcagggcaaggtcaaagtccactgacacaaagccacattccttttcccagaggtgactcggacacagaagacaaggccctgcttgctctcctgggaagggctaatcagatagaggcgcttgcttcctggattccatccggcaggcacgtgaaagggtcagaggtagcaaattatcagtaacggtcgtcttcctttcacttgttgacaacccgaaacttttcttaaaacaatgccctctgactggccagggaagaccgatcgcattctagccccgcggaggaggacccgggagcccgcgggcttcaccgcgggtcccggacaggcaggtcgcacccgatgcccacctacagggacgctcgcccggaggccaggggaacccctggaccggagccgggcaagctggttgctggtggttacggagaagcagggaggccgtggctccagatctcagcgcggtggctgcaccggagaggtcggcgtgaccgggcggggcctccgccagaggtagacggggtcgcccacggcagggcgcggagcctctgcagcccgaccctcccggcaggcgagccccgcagcctgccagccccggcccatgccggacgaggacgccacccagaacgcgggcccggtccccgggcaacggctggcgcggcgccccggaaggaagccggccccggcgcccccgcggcccgccccggccccgcgctcaccagccatcgcaccacaccctcacggcgcgcctgccccccgggcccggctgctctgcgccgcctgcagccccgcgcccgttccggatcatggccccgcagcggcggcgcggacagcctggcagctcccggcgactccgagcgccgccgcccgccccgccaggcgcacgctcagcggccgtcacgcgggcctcacccgctgcgcacggccaatggcgtgcgccgctcggcccgagccccgcccccgcctcccccgccccgcctcccgccctccgccccgagccccaccccccgaaggccgcgccccaccgcacctccgcgcacggccaatggcgtgagcccctgacagagtcccgccccctccaaacgcacagccaatggcgtgtgccgcgctttccgagccccgccccccgacccacacctggcctctccgcaccgcccacacctggcgctcggctggcggggcagtgcggcgtggggaccgtcccaccgccgccacctccgggaacctccacggggcgctgtcccaaccaggggagttttttttcttattttttggcacaataatctacagttgtcccctgtccaaccaagggagttttaagccacgaccgagctgccaggcggcagacctgagcccggggagcccgcgccgaccactcggggacaccggaagccagtgcagaaacgtttaatagaaataaaaaggtctgcatagagccgaggctcggagccacccctctgccgcacatccagtacagagaggattctataaagttcacactttttcattaagtagtagtagaaatacggtgaggccctgagactggcctggtgagcgaggaaaggccgctgggcgcttccactctgcaggccggggctgaaataacccgagttccgttctcacagaaaggtgcggctgccacctcttgacacagaggccggatgggcaggtgtcctcgatggccaggccgtatcagggtacaaccgcagcagtgcaaggggcttcctcaaggacaaatggctaaaaatgtcacggtgaaaatgtcatccccaaagagttcgttctccctagacccgtgggggcaacccagccttcaccgtgacactggccatctgcaaagtgccaactgttcttcatcgagcacgtgattacgtcactttcttcctttttgtgcgttttgtgcagcccctgccaaaccagccccctaggatgggggccgagctaagcggtgcaccccggtccccaggcggggcctcctctctgcttctgcacagcgacttccgactgtggctgccttcttcaccagcacgcaggggagtcgccagtgagaaaatgggatcctgccacctgccaaaaagggaaagcggcatcaggcgggcctgggagcctctcgcagtcacacctgccccagctcgggaaagctgtctgcggtccctgccttcccatccccttccctcccgtgtcaactgcggcggggctctggttggcggcagcttcattgttaccaagctgcagaacggatgtgggagaggtcacctcttaggtggtgactcaaaggtcggcacccacactagctcggtctcctcaaaactccgtgtccttgtccaccactgagcggcgtgcacacacagggtggggcagcagtggccccagggctgcctccgtctccagggatgagtcactagcaactctgggccccaccttccacttgtaccgctggggcaggtggaccagaccctctcccccttcccagctgactagggaggcgtggcctacagacgaccccgtgaagaaagcatgtgtctgacggagatgcagaaccacagatcataacttaagatacagatacgcactgataaggaaaatgagctaagttaatgtaaaaaaaaaatacagtacacgatagcccacatcacagaacaccacacacataacatacaagaagtgccaggcccagaaggtgaagggatcct

SEQ ID NO: 1244486 - DNA, 4001 bp, Homo sapiens
ttcaccatcttggtcaggctggtctcaaactcctgaccttgtgatccacccgcctcggcctcccaaagtgcagggattacaggcgtgagccaccgcgcccggcctaaaaaagttttaatacctgccaaagtagccccctaggatcctattccagagctgtggctggaatctcaccttttttttttttttagacggagtctcgctctgttgcccaggctagagtgcagtggcacgatctcagctcactgcaagctccacctcctgggttcacgtcattctcctgcctcagcctccccagtagctgggactacaggcgcccgacaccacgcccggctaatttatttttttttttgtattttttagtagagatggagtttcaccatgttagccaggatggtctcgatctcctgacctcgtgatccacccaccttggcctcccaaagtgctgggattacaggcgtgagccactgcgcccggccaacccctctgattcttattgatgggtttattgctttctgcctcttgtctgtgctttgcagttggggtgctgtcagttcccttcacccactcacggaggcatccctgagcccctcagcaccatgacgggcaccccgcagtgctgatggagaatgacccacaaaatggggggcagggtccccaggcacggcgcccctgggaaaggggcctgtctcagagacttggtgctgagctgtgaagccctgcgttccccaaccccacttcatagagggacaagctggggcttggggacggagggtgccgggcatgtgttccccctgctgggggaatcaccaggccctctctgtgtctggagtcagctcggggagcagggtcacccgcctggcgtggcgtggcgtggctgaagggcctcggccgctctggacgagatcagtgtccctgcactgctgcacagggtggcctctcctcctcctctccctacagcctctccccagatgccctaagccccagtgacctgggccaagggcagttcagcttcccctaagcctattaacagcagaggggaattcctaatctcccatcgagctgctgtcagctgcacatgctgccggaaagttctggaaggaggcacatgacacagacaggaggggctgcttgcccgcactggatgccccagggaccacctcttggggtcccctttcctgcccctggtctttttggctgggattcctgactccagccctgggctactaccagctgtttgccgagcttcaggcgtgagagtgatcagaaagcaagggcaggtggcccattttggggacgcgggctctgcaaggggtgctgggcacctgggattggggtggaccctgccatggcaccttccctcactaaggttcagcctctgtccccgggactgggaccagcaccagcctgtgcaaaaccagcactcaggagcccggtggtcccagctgctcagatcccatggcacccaatcctcatatcctagatagcacaggccccgtccagctgcttctccagccctgggacatgggctgtcctgggcagctctgggccctgatggagctccaaccatcagatgccatccatgtggaaaccgctgcctgcgctgccctggcccgacccagcctgtgactggcgtccactcaggtcagctgagcccacgtggcctgaggttcccagaccatcactggcctggggatggtggaagcactggttaccatgggggagcagaggaggaggttggctgggagtcccctctgaataacagggtggcgggtaggcatctgcagacccagacctcagccacggtggtaaaagcctgtcagctccctctgccccttgggtgatgagcagacccccactgactcactgggggaagtggctgccaggaaagacagcggggttggccactactcaccaagtgcagggcgggtctcagggggctgtgctgtgagtgctgggcctccctccgcagggtgccagccccggcctttatctcgctgcttcatgagctgattaggcgtctcagtgccaccctaatgagattgttgggccccgagggggggcacaaccaccaaggttcaggggatggagaggaggggctcaggtgctgtcaagggctccaaggaaggacacccagcagatggggccgggacagggagagaagtgtgaccctgaacagccaggctcctgcagctgcccatcttccagatggaagcaaccacagtgtctgctgtcttgggcctccctactgcctttcctgaccctgcctgatctctgaagggcccaccttcatggtccccaaaaccctctgcagcctggccctcacccgctgctgtggcctcacatctcacccctcccaccccagggcctttgcacctgctgctcctgaaaccaaacaaggacccccccccgcccttaggggcctgtgggtcttcccaagcacagaagcaaggacaatgttgagttccttcaagggcaagccaggcccccagccagcccagagaaggaaatgagcagccgatccacaggaaggtcacaagaaggtcacaggagcttagaacaacagatggaagccagagtcccgagagtctccacagaagcaaaccatgccatcttagcaggtgctcctcagttgttttccagaaacagggactcccaccaaaggggcgtgctggcacacagacctcacatgagcgggagctgaggactggcctctgaccacccttctcttacctaaatttcttcctgaggggcctggaggaggctatgcccatcctgaggggcctggaggaggccatgcccacaacccagagctaacattctttcctgcggatcccaaagttttagacaaagattcgcttctgcaccaaatcagaaaacctttgaatccacctatgacccgtggtccctggcttcaagatctccttgctatttatggcaaaaccagtgtacaacctccatgtactgatttatgacttgcctgtgacctctgcctctgcacctttaaaaacccataactcaggcctggtgtggtggctcatgcctgtaatcccagcactttgggaggctgaggcaggtggatcacaaggtcaggagatcgagaccatccttgctaacatggtgaaaccccgactctactaaaaatacaaaaaaattagccgggcgtggtggcatgtacctgtaatcccagctacttgggaggctgaggcaggagaatggcgtgaacccgggaggcggagcttgcagtgagccgagatcgcgccaccgcactagagcctgggcgacagagcgagattctgtttcaaatgaataaataaataaataaataaataaataaaaacccataactcggccgggagcagtggctctcaaacagcgctttgggaggctgaggcaggaggatcacttgaggccaggagttcaagaccagcctggacaacatagtgagacccccccatctctacaaaaaatagaaaaaattagctaggtgcagtggctcacttcttattttattatttcatttttgagactgagtctcgctctgttgcccaggctggagtgcagtggcctgatctcggctcactgcaacctctgcctcctgagttcaagtgattctcctgcctcggcctcctgagtagctgggattacaggctcccaccaccacgcccagctaatttttaatatttttagtagagacagggtttcaccatgttagccaggatggtctcaatctcctgacctcgtgatctgcccactttggcctcccgaagtgctgggattacaggtgtgagccaccgtgcctggccacagtggctcacttctatagacccagctacttgggaggctgaggcaggaggatcccttgagcctaggagctcgaggctgcagtgagccatggtcaaaccactccagcctgggggacagagagagaccctatctctgaagaaatatgaaaattttgaaaaattaaaaataaaacctggacgggcatggtggctcac

SEQ ID NO: 1244487 - DNA, 4001 bp, Homo sapiens
tgaaggtctcagtttcccccatagtactacaagttgaccaaactctactgtgagcccctcacagctgtgatgtttctgtaattagggtgcagtttgtggggacagctgctgggggctaggggtgggcccaggaggctttcctacatgggggaggctcaagactcaggcagggcaggggtgcaggcagacaagtcctgaggaacaggtgccttatgtctcggctgccacctctctgttcccgtcccatcattgacgcagctgcaacccaagctaggcactatcaactcaactcttgagagactgccccccacccccagtccccagctggcaccatggaaataccacatagacagacagggcccacacaatgcccatttcagctgccacgttggcacagcctccctcctgccccagggccacccccaggttgctggtagtgggcgatcctgacctagcagccctggggcagccaagggaggtataggcggcttgactccacatcacggtgcctggggcccctgcccagctggggagaggctgccaggccggaacagatttgatcttcaagtgtccttgcccactggggcagctagggtccagctccttctgtgggtggatgtctaccagtcagggcactgtctcccaatggcatcttctgaaagagcccccttccccaactgcccctggcttaatctcaccctctgcccaggggtgtctgacccttcatgcccagtccaggtctctctacagatggctgcacctctaaaccctgcctcctcactcccaccagcagacccccggtttcctctggtgggaggaggggcccctactcctccagtcatgaggacaactcccattaaccctttcgcgtctggataccaccctactcccttcctgcagtaacatcacagcttcactgccccttactcttcaagacccttcatgaggcccacgaagaaacctcgggaccgtccttgtaaatgccccccattcccatcagcagccccgtcgagaggccccggccggttcctgcttccccattaactctttcctgcctgtacctttccaaacaacccttctctgtcactcggggcctttcttctcctccgtccccctagcccccggctgcccctcccagcgccccgccggcctccgctgccagccgcctcccgcccactccgtaccgaagtccagaaactgcttcatggacagcggggacggggagaacttgctgaagtgctctatgtacttgggcgcccctgccagggacgcattcttcagcagcgcccacacccagcgcatggctgcggcggccgcgactttggttgtggtccccgcgcgggcagcgctcgcgcacctttcggcccagcgacgcggttcggccgcctcctccctacccttgccctggcgggcattccaacgcccagccaatcggctcgtcatggcgcctcgacgtcgccaatggccactcacaaacaactccgggcgaaccaatagccttccgccccggcacgtggcttcccccgggcccgcccccttaacccacgctttgccggggcggcctgttgttttggggaggccgcgccgagttcccacctcccctgtgttcactcctccctttcctccgcggggcgaagcccgggttaaccccttccttcccagagccccgccagccctttcgcttcctcttccacgcctgcctttcccttgctaccccctcgcatctccttcacctgcaggctccttttaacccttcctttccagagttgtctaggtagctttcaaccaatcccttttctccaactcaaaggtacctgtttcacctgtcatgatcgttacctatcctcccttaacgggtcttggggattcccagtccggatgacagtgacccagactgcgaatatttgcaaaattcggaaccagggtgcaagcctatacgaatccgtcctgtatatatgcagcccacccgcttccacaaagatccaagcggctcaggaaaaggcggagtttgcttttccaactgaaaaacatccagagtaaaaaccatcactactagtggcggtggaggcagcagctatcgtccatgccagttaacactttcattttattatacagctcatctgaccgaacataaagccttggacatctagcgcgaccacctgagaaagccacctccttcgcaccgggcttccttagagcaagatcccaggaggtgaagtgtctctgggaggcccggagcccgtccttcatcagcggcccagcttctcttggagaaaatgtgacgcgccctcttgtggccgaatgtggtatctcccatcgtgggtttagggcccgacccgccactttgatgctttctttgctcggtgacattagcctaatacgtgttaggctttatgctgggaacagggaacacagacaggatcaagaaatggcctttttcctcgatgatttcatttctaagtttcagagatagctacataagtaaataattagctataactgaatgtgattgtaatacagacctcacagagcaaagcttcacatatggaagggcctcttagctggatgaataataagctatatgccaggcactgtttacaggcattatctcatttaattctctattttattattcttagcctcatttcatagataagaaaaccgagactcagggatcattctcaactgcaaatctgaccttattacttccttgctcacagcctttcaatgggctattttttttttttttttttttttttttgagattgagtctccctctgtcgtccaagctggagtgcagtggcacaaccttggctcactgcaaacttctcctcccaggttcaagcgattctcctgtctcagctttccaagtagctgggataacaggcatgtactaccatgcctggctaatttttgtaattttagtagagacagggtttcaccatgttggccaggctggtcttgaattcctgacctcaagtgatctgcccgcctcaacctcccaaagtgcagggattacaggtatgaggcactgtgctaggccatcaatggctctcttcttcttactggagcctttccagttgtcacaagtcgattgacttttgcttaattctccagactcctctctctacattcccccatgcagctcccagccatacctgtctgctgccttgaaccagcctctaatctctaagccactgcaaatgcatctcttctgtctggatcattctttcttcccaccttcacctgcccattcttcaggtctcagctgcttagtcatcccttcctcctggaagccttccttgatcctgccaagctgggttataggctcccttcaagggctccttagatctcctggtcttagcaaatattcgcagtctgggtcactgtcatccagactgggaatccacaagaccccttaagagaggacaaggaaagatcaggacatgtgaaacaggtacctcgtcgaggaaagggattggctgaaagctacctggacaaatccaggaaggaggggttaaaaggagctgatggtagctcttatcaattgagtgaaaattgtttgccaactgatctgttttcccgctagactttaagctccgtgagggcagggcaggggttgtatctgtcttattcactgccctatctctagcatcaggcagtactcagcacctagtagggaggacagggtgaaaaagaagacagggcaagcagaggagcacaccacagagatattccagagaaccaccaaacatccactgggctagcaattaggacgtgattgatgatgctggtgagtgcagttttcaagtgcacagaataatatatagaatattatgtacaaaaaaacctggccctcactttgggaggctgaggtaggaggattgcttgagcccaggagttcgagaccagcctgggcagcatagcaagatcttgtccctacaaaaaatataaaattagctgagtgtggtggcatgtacctatagtcccagctacttggg

SEQ ID NO: 1244488 - DNA, 4001 bp, Homo sapiens
ttggggctttggtgtctcctgtctgtccccaccccaccctcaaagctgctaaaagcttggagatgccatccctgagcccagggacactggcgatggagtgggaggtgcagggactgagccaggggtctcaccagctctgcaccagctgcacggagggtgtgctcagcactcggtcgggaagcaggttgatctctttcatgatgttggccaggcgcacaggcagctcctgcctgaggaaggtgaaggaggttttctcacaggcattgctggatcctggcaggagaaagaggggtgagccacagagccacagactatgaaagccaaaggatgtctcggccaggtcagctaaacccttcattaacagggggctcagagagcaagtgacctgcccggggcacacagcaaggctccccatcccctgcagggctcaaacacctacaccccatgcctaacacttcaggaggtgtcatcctctcctcatccccagctgaaccctgcttgcctttaaccacagtggacagggccactcctgggcccatttggagctgcctctggcctcagtcacctcacttctctttccttccctcccagcacactcactttgaggggctgattccaggggacaaaggagcctgggaaacccatccctacctaggactgggctctggctgaggggggctatggctagaccaccactgcaggctcccagtgttgtctctggccagcccacctcacccagcctggcctgaatgcccatgtggggctgctgtgtcttaatgcccatccatggggcaaacgggcctgagaacaggagtccaaatgcctcggtccttgtctggtgtcaagatggaaagggtgggggaccgaatatggccttggcccagggtcaggggccctgggttccagtccatcaggctctgcttccaactctgtcacccaggccatgccatcatccttttgaaggtctcagtttcccccatagtactacaagttgaccaaactctactgtgagcccctcacagctgtgatgtttctgtaattagggtgcagtttgtggggacagctgctgggggctaggggtgggcccaggaggctttcctacatgggggaggctcaagactcaggcagggcaggggtgcaggcagacaagtcctgaggaacaggtgccttatgtctcggctgccacctctctgttcccgtcccatcattgacgcagctgcaacccaagctaggcactatcaactcaactcttgagagactgccccccacccccagtccccagctggcaccatggaaataccacatagacagacagggcccacacaatgcccatttcagctgccacgttggcacagcctccctcctgccccagggccacccccaggttgctggtagtgggcgatcctgacctagcagccctggggcagccaagggaggtataggcggcttgactccacatcacggtgcctggggcccctgcccagctggggagaggctgccaggccggaacagatttgatcttcaagtgtccttgcccactggggcagctagggtccagctccttctgtgggtggatgtctaccagtcagggcactgtctcccaatggcatcttctgaaagagcccccttccccaactgcccctggcttaatctcaccctctgcccaggggtgtctgacccttcatgcccagtccaggtctctctacagatggctgcacctctaaaccctgcctcctcactcccaccagcagacccccggtttcctctggtgggaggaggggcccctactcctccagtcatgaggacaactcccattaaccctttcgcgtctggataccaccctactcccttcctgcagtaacatcacagcttcactgccccttactcttcaagacccttcatgaggcccacgaagaaacctcgggaccgtccttgtaaatgccccccattcccatcagcagccccgtcgagaggccccggccggttcctgcttccccattaactctttcctgcctgtacctttccaaacaacccttctctgtcactcggggcctttcttctcctccgtccccctagcccccggctgcccctcccagcgccccgccggcctccgctgccagccgcctcccgcccactccgtaccgaagtccagaaactgcttcatggacagcggggacggggagaacttgctgaagtgctctatgtacttgggcgcccctgccagggacgcattcttcagcagcgcccacacccagcgcatggctgcggcggccgcgactttggttgtggtccccgcgcgggcagcgctcgcgcacctttcggcccagcgacgcggttcggccgcctcctccctacccttgccctggcgggcattccaacgcccagccaatcggctcgtcatggcgcctcgacgtcgccaatggccactcacaaacaactccgggcgaaccaatagccttccgccccggcacgtggcttcccccgggcccgcccccttaacccacgctttgccggggcggcctgttgttttggggaggccgcgccgagttcccacctcccctgtgttcactcctccctttcctccgcggggcgaagcccgggttaaccccttccttcccagagccccgccagccctttcgcttcctcttccacgcctgcctttcccttgctaccccctcgcatctccttcacctgcaggctccttttaacccttcctttccagagttgtctaggtagctttcaaccaatcccttttctccaactcaaaggtacctgtttcacctgtcatgatcgttacctatcctcccttaacgggtcttggggattcccagtccggatgacagtgacccagactgcgaatatttgcaaaattcggaaccagggtgcaagcctatacgaatccgtcctgtatatatgcagcccacccgcttccacaaagatccaagcggctcaggaaaaggcggagtttgcttttccaactgaaaaacatccagagtaaaaaccatcactactagtggcggtggaggcagcagctatcgtccatgccagttaacactttcattttattatacagctcatctgaccgaacataaagccttggacatctagcgcgaccacctgagaaagccacctccttcgcaccgggcttccttagagcaagatcccaggaggtgaagtgtctctgggaggcccggagcccgtccttcatcagcggcccagcttctcttggagaaaatgtgacgcgccctcttgtggccgaatgtggtatctcccatcgtgggtttagggcccgacccgccactttgatgctttctttgctcggtgacattagcctaatacgtgttaggctttatgctgggaacagggaacacagacaggatcaagaaatggcctttttcctcgatgatttcatttctaagtttcagagatagctacataagtaaataattagctataactgaatgtgattgtaatacagacctcacagagcaaagcttcacatatggaagggcctcttagctggatgaataataagctatatgccaggcactgtttacaggcattatctcatttaattctctattttattattcttagcctcatttcatagataagaaaaccgagactcagggatcattctcaactgcaaatctgaccttattacttccttgctcacagcctttcaatgggctattttttttttttttttttttttttttgagattgagtctccctctgtcgtccaagctggagtgcagtggcacaaccttggctcactgcaaacttctcctcccaggttcaagcgattctcctgtctcagctttccaagtagctgggataacaggcatgtactaccatgcctggctaatttttgtaattttagtagagacagggtttcaccatgttggccaggctggtcttgaattcctgacctcaagtgatctgcccgcctcaacctcccaaagtgcagggattacaggtatgaggcactgtgctaggcc

SEQ ID NO: 1244489 - DNA, 4001 bp, Homo sapiens
gcagggctcaaacacctacaccccatgcctaacacttcaggaggtgtcatcctctcctcatccccagctgaaccctgcttgcctttaaccacagtggacagggccactcctgggcccatttggagctgcctctggcctcagtcacctcacttctctttccttccctcccagcacactcactttgaggggctgattccaggggacaaaggagcctgggaaacccatccctacctaggactgggctctggctgaggggggctatggctagaccaccactgcaggctcccagtgttgtctctggccagcccacctcacccagcctggcctgaatgcccatgtggggctgctgtgtcttaatgcccatccatggggcaaacgggcctgagaacaggagtccaaatgcctcggtccttgtctggtgtcaagatggaaagggtgggggaccgaatatggccttggcccagggtcaggggccctgggttccagtccatcaggctctgcttccaactctgtcacccaggccatgccatcatccttttgaaggtctcagtttcccccatagtactacaagttgaccaaactctactgtgagcccctcacagctgtgatgtttctgtaattagggtgcagtttgtggggacagctgctgggggctaggggtgggcccaggaggctttcctacatgggggaggctcaagactcaggcagggcaggggtgcaggcagacaagtcctgaggaacaggtgccttatgtctcggctgccacctctctgttcccgtcccatcattgacgcagctgcaacccaagctaggcactatcaactcaactcttgagagactgccccccacccccagtccccagctggcaccatggaaataccacatagacagacagggcccacacaatgcccatttcagctgccacgttggcacagcctccctcctgccccagggccacccccaggttgctggtagtgggcgatcctgacctagcagccctggggcagccaagggaggtataggcggcttgactccacatcacggtgcctggggcccctgcccagctggggagaggctgccaggccggaacagatttgatcttcaagtgtccttgcccactggggcagctagggtccagctccttctgtgggtggatgtctaccagtcagggcactgtctcccaatggcatcttctgaaagagcccccttccccaactgcccctggcttaatctcaccctctgcccaggggtgtctgacccttcatgcccagtccaggtctctctacagatggctgcacctctaaaccctgcctcctcactcccaccagcagacccccggtttcctctggtgggaggaggggcccctactcctccagtcatgaggacaactcccattaaccctttcgcgtctggataccaccctactcccttcctgcagtaacatcacagcttcactgccccttactcttcaagacccttcatgaggcccacgaagaaacctcgggaccgtccttgtaaatgccccccattcccatcagcagccccgtcgagaggccccggccggttcctgcttccccattaactctttcctgcctgtacctttccaaacaacccttctctgtcactcggggcctttcttctcctccgtccccctagcccccggctgcccctcccagcgccccgccggcctccgctgccagccgcctcccgcccactccgtaccgaagtccagaaactgcttcatggacagcggggacggggagaacttgctgaagtgctctatgtacttgggcgcccctgccagggacgcattcttcagcagcgcccacacccagcgcatggctgcggcggccgcgactttggttgtggtccccgcgcgggcagcgctcgcgcacctttcggcccagcgacgcggttcggccgcctcctccctacccttgccctggcgggcattccaacgcccagccaatcggctcgtcatggcgcctcgacgtcgccaatggccactcacaaacaactccgggcgaaccaatagccttccgccccggcacgtggcttcccccgggcccgcccccttaacccacgctttgccggggcggcctgttgttttggggaggccgcgccgagttcccacctcccctgtgttcactcctccctttcctccgcggggcgaagcccgggttaaccccttccttcccagagccccgccagccctttcgcttcctcttccacgcctgcctttcccttgctaccccctcgcatctccttcacctgcaggctccttttaacccttcctttccagagttgtctaggtagctttcaaccaatcccttttctccaactcaaaggtacctgtttcacctgtcatgatcgttacctatcctcccttaacgggtcttggggattcccagtccggatgacagtgacccagactgcgaatatttgcaaaattcggaaccagggtgcaagcctatacgaatccgtcctgtatatatgcagcccacccgcttccacaaagatccaagcggctcaggaaaaggcggagtttgcttttccaactgaaaaacatccagagtaaaaaccatcactactagtggcggtggaggcagcagctatcgtccatgccagttaacactttcattttattatacagctcatctgaccgaacataaagccttggacatctagcgcgaccacctgagaaagccacctccttcgcaccgggcttccttagagcaagatcccaggaggtgaagtgtctctgggaggcccggagcccgtccttcatcagcggcccagcttctcttggagaaaatgtgacgcgccctcttgtggccgaatgtggtatctcccatcgtgggtttagggcccgacccgccactttgatgctttctttgctcggtgacattagcctaatacgtgttaggctttatgctgggaacagggaacacagacaggatcaagaaatggcctttttcctcgatgatttcatttctaagtttcagagatagctacataagtaaataattagctataactgaatgtgattgtaatacagacctcacagagcaaagcttcacatatggaagggcctcttagctggatgaataataagctatatgccaggcactgtttacaggcattatctcatttaattctctattttattattcttagcctcatttcatagataagaaaaccgagactcagggatcattctcaactgcaaatctgaccttattacttccttgctcacagcctttcaatgggctattttttttttttttttttttttttttgagattgagtctccctctgtcgtccaagctggagtgcagtggcacaaccttggctcactgcaaacttctcctcccaggttcaagcgattctcctgtctcagctttccaagtagctgggataacaggcatgtactaccatgcctggctaatttttgtaattttagtagagacagggtttcaccatgttggccaggctggtcttgaattcctgacctcaagtgatctgcccgcctcaacctcccaaagtgcagggattacaggtatgaggcactgtgctaggccatcaatggctctcttcttcttactggagcctttccagttgtcacaagtcgattgacttttgcttaattctccagactcctctctctacattcccccatgcagctcccagccatacctgtctgctgccttgaaccagcctctaatctctaagccactgcaaatgcatctcttctgtctggatcattctttcttcccaccttcacctgcccattcttcaggtctcagctgcttagtcatcccttcctcctggaagccttccttgatcctgccaagctgggttataggctcccttcaagggctccttagatctcctggtcttagcaaatattcgcagtctgggtcactgtcatccagactgggaatccacaagaccccttaagagaggacaaggaaagatcaggacatgtgaaacaggtacct

SEQ ID NO: 1244490 - DNA, 4001 bp, Homo sapiens
gctggttttgaactcctggcttcaagtgattcgaccaccttggcctcccaaagtgctgggattacaggtgtgagccaacgcggctggtaaaatcggttatttctgaggcttggtgacaccatcagtccagcaggataattatgaagattatggatatcctgcctccgtgggttgccatggggatcaaatgcccaaggaagcacctacagttgagcagagaagcctggcagaggggctttgccagtggccaactagccctccccagcctggggccactgctccgaggcttgactcaccagctagccttgcccatggacttcacctccaaagagctgtgcaatttgcctgcaacccagtcacctccattctttgctgattgcagtgacttctgacaaggaaatagtgttctgtgggctctccctctattcacagccccgggacactactgagccccctcattcatgtggtcccagaagaagcagaacaaaaccctctcatctcaagacaaaggttcaaaattagctgtaaagtggaagataaaccaggcttcaaagataggcagcaccccacttccctttgtacaagcacaaaatattacagatatacttgtagcctcacaggtgaatggaaaatgagctccagtgtgtgatttttatcatttaggagtaaaaaaagtagcaacaatttaaactaggatctgtcttcatatgtctaacaaatcaattatatctcatttgcaaataaaaacagttggggataggttacaatattcaaataagccattatggtaaaacaacaaaaaactaattatggaattgctcattaaaataaaaaaatcacctccccatcccaaaaaacagcaatgcactgaaatctagaaaatgtgaggccgggcgcggtggctcacacctgtaatcccagcactttgggaggtggaggccagcggatcacctgaggtcaggagtttgagaccagcctggccaacatggtgaaaccctgtctctactaaaaatacaaaaattagccgggcctggtggcatgcgcctctaattccagctacttaggaggctgagacaggagaatcccttgaacccaggaggcggagtttgcagagagccgggattgcaccactgcactccagcctgggtaacagagactctgtctcaaaaaaaaaaggaaaaaaaaaagaaaatgtgtgctacttataattgtgttttttgccatcttttaaaaaagtaatggcaaaaaccacaattactttgcaacaacctaatatatttttagactagtcaagagtagtcgtgagaacagagaaaagaacatggagtttgatctgtaactgactaaacaattcatcaagataacccactactttcagaccagccaaggaaacgtgtgctacttctaaaacacactgaccagaacttggcttagatctaagcctttctaaaaatgcccacatgggataaactttagttctcaattggattcttttccttaattgttagaagtatcaaaccccagcaatttaatgtgcgttttaggcatcacagaagagaaaggaggaagccaggtagaaacatctgttacagtggaaacatcagacttacagttttcttgaccctcaaggcttgaacctgcaagaaacataagaaacatgttgattccagaagcttcgatgctcatggagttaaagtgatgtggaaacagagtaaacactcacagagcagaagggtcagcaggactccaagccacatcgtggccccttgggcccacctcggctgcatcctgagagtgaagactgcaggcacagttagttctgccttcgggccatgactcgctcagcagaaggcactgcccacaagtcaccgttgagaaacccgccctgtgaaaagcagaaattgctctggtcacttctcccggcgcctgcagagagaccggctgtggcgctggtcaggtaatggcagccatggctggaaaccgggaacaatggggcctgggctggcctgatatctcctcaggaaatgaccggccttcctgaggggccaccgaacgcggccgctttgtttagtttctttagggaaaaaacaaggcacaagtgacatttgccttggcgttcttgaccctccctctgtctcgcctgggtttgggggcccttctcatggcactgtgaggggattcctccctgcctccagcctccacccaccacccaaagggctgctctcccaggacatccagaaagatctctctgcttttccagtcctccccttcccccatcaaagagggcttttgccacacagcataagtctgggccccctgcctttcttgggctgacttttccccaaaattgcaggtttgtcaaagagacctgctgctggggcaggctgagcttggaatgcagcggaactgaggcgagagaatagcagaggaagtagggggcaaagagcacccttgggcgtaggctagcttaagcaatagcaaaagcaaaagatgtaagatagaagaagaacatacaaaataagggagtaagcagtaagaatagaattaacggctgggcgtggtggctcacgcctgtaatcccagcactttgggaggccaaggcgggcggatcatgaggttaggggtttgagaccagcctgaccaacatggtgaaactccacctctactaaaaaaaaaaatacaaaaattagccaggcatggtggagaacccctgtaatcccagctactcaggaggctgaggcaggagaattgcttgaacccaggaggcagaggttgcagtgagctgagatcacaccattgtactccagcctgggcaacagagtgagactccatctcaaaaaaaaaaaaaaaaagaatagaattaacttcttccatggcgataaggagtgacatgttaaccaaatatcgtaccctttagaagatggcttcaaatctaaaaatacactattcctactcctttaagcctcaaaatacgttattcctactccttttaaaagataccttgtagctttaagattgacctttggggccgggagtcgtggctcatgccggtaatcccagcactttgagaggctgaggtaggaggattgcctgaggtcaggagtttcagaccagcctggccaacatggtgaaaccctgtctccaataaaaatacaaaaattagccaggcacggtggcacacgcctataatcccagctacccaagaggctgaggcagtagaatcgcttgaacccgggaggcggaggttgcagtgagccgagatcgaaccactgcactccagcctggggtgacagagcaagactttgtctcaaaaaaaaaaaaaagattggcctttagacttttcattgggtaatagatattttgatggtagaaaatactagaatctggcagagcgcgatggctcatgcctgtaatcccagcactttgggaggccaaggcgggaggatgacttgaggtcaggagttgaagaccaacctggccaacagggagaaacccgtctctactaaaaatacaaaaattagccttagccgggcatgaaggccggcacctgtaatcccagctacttaggaggctgaggcagaagaactcagaaggcggaggttgcagtgagccgagatggcaccactgcactctagcctaggcgacagaagtgaaactccatctcaaaaaaaaaaaaaagagaaagaaactactagaatctgatcctttgcatcagtttctaaaaatctaacttgttacagtcatagagtcaaacgttatgggatgctttggaaaagaagcaaaccatgtggatattaataacacatcaaaatctctcagactgtcttaatattttatggtgtttctttatagtctgtaatttaaaacatcaatcaaatattgccacaaaaagtaatataatagataagggagtaagcagtaagttgggacatggtaagagaagtaagttggaaggacttccagtagctatttggtcgcaaaaaataaaagtaaagatgggc

SEQ ID NO: 1244491 - DNA, 4001 bp, Homo sapiens
gaggctgggaaatggaggttgcagtgagccaagatcatgccactgcactccaacctgggtgacagagtaagaccttgtctcaaaaataataataattctgggactattgtgagataaagaaaacagaaaaaccccactgtaatataactgactgatgaaaaccacataaattagaagaggggaatttagagacaagagaaaatacataatcagctccagcctctgatattgggctgagatagcagagatatagttttgtcaccctcaattatgcagagtaatgttaaagacaaacagatagggttatctgtgataaatctggggctaaggttattgacccacccagcaaattgtgacaaccatcttcctggaaggtagcatagagctaggaaggtcccaggaatgaagggtggacacagaagatctcgtgtttatgggtcttgaaggatgggtagaatttgggggaggtttagtgggagagaagggaagataggagattgttataaggagcagctattatgggctagaaatatgccttcttagaatcagtgccttcacccggacaagatggtgggggttcaagctagaatgggagcaatgagaaagatggaaaagagtggacagatctgaaaactactcaaaggataaaatcaacaggacttgacagattgcttatggaggtgtatgaagaagagtttagaattacttgagtgtctagcttgcagaactgaatggttatcagattccattcttatagaagtccaaaggctcctaacccggcctaaaacgctctgcatgacccgaccactgcctacccatctcaccagtctcatctgtacccactctcttcccctccacatctgagccccaggaacgatgcccttctttccagttccttcctaccacagggtcttcccacatgagctctcctctgactgaacagcccctcccatattttttccctacccaacccctattcatccttagggtctcagcttaaacgccggtttctttggaaaaatctctgccagtcttcagataaggttagagacccctgatattcaattctcatcttgtttcgcagcattttgtgtatcgccaccacgtctgtaaccggagcgcctagtacagtatctgaccctcaataagagctcggtaaatgtttattgttgaatgcgtcattcagtcagtcgaaacaatccccgaaacagatattgccagaggaaaaagagacttttagattatacaactagtgagtgaccgggcctggaacctaatcgattcctgtgtgccgaccaatagcctaacaacagaaaaataaggcccatttttcccctggagaaactcatggccgataaaggagaaatacgtgcatcccgtccggactgatacctggatcccctttctgcccgcagctctccttccttcaacctccctatcgcacttgcactgcaccgtaatcccggcgcacaggtgccgcgccatcctccccacagggccgcgggcacgcgggccacggactcacctgggccccgcccaccgacccatgcagccgcaataggcacatgagcccgggcaaatgtggggccgagcggtttgggggatgcaccggagcaacggcagaccccgttcgaggttgcagcaaaccagaaacactctccagcagcagcaggcggagccgcgggcccgagctcactgccgagagacccccggtcccgccaggaaccccagccgcggagcccgcagagggcccactcagaacggctgccgccatcttcccccgggttccagtggtggcgtggcgcgatgacgcaaacacaccgcgacggccgcctactggggagggggcgtggggagggggctgcggtcttgcgcactgagtgaaggcaggctggactcgcgggctcaagctgggaaggagcatgcgcggagagagcagcctgggcgccgaggcagcggggtgctcggttcccggagtgatggcggatgaggctgcctgtgagcgtgtccgaggcggtcctgtgatgttaaaggtacacgtggtccggacaaaaggcgccaaagtcggaacgatttccatttagcggacggagtcttgggacatcttcgctgtaggaatcaataactctcattttttttttttgagacggagtctcgctctgtggcccaggctggagtgcagtggcgcgatctcggctcaccgcaacctccaccttccaggttcaagcgatttccctgcctcagcctcccgagtagatgggattacagtcgcgcgccaccacgcccggctaattttttttgtatttttgtagagatggggtttcaccatgttggccaggatggtcttgaactcctgacctcaggtgttccgcccgccttggcctcccaaagtgctgagattacaggcatgagccaccgcaccctgcctaggaatcagtaacgtgtgtgtgtgtgtacgcgcgccaaagatttatttcttcatttcttgcatttcaagtactcttcgatgtcatccttggcctgagactccttgccatagtccttaactactacacaactgcaaccaaccactttacggggtttcccctctctgtcgatttttacagagccctacccattctcctagtttcttgttgtcatcaaccttaattaggttgatttggtgttcagcacaaaggcctccaccaacttgacatacatagtaggctcatcatagttggatgcaagcacacaaagatgggcttggcgtttgtctaaggctttggcagcttcgcgaattccacgtgctaggtcatggtggatgagagcggtcttcagcacctcttgtgaagcagtattaacatccattacccctccagcagcaatgccttcctcggccgtggcggtgggttacaagtgaagctgaatcttgaaggtacccaagcctccgcctccgcgcaactcggcagcggcagggaaagagaaggaatcaataactctctaggtaacttgaaatcacagacatttttaactacatttgcaacttcagaaatgatacaagacgtgcgccttgcaaaagccaattcaaacagtacagaaaggcataaagtaaaaagaaaaactgctcctcccccgcaaagccctgccccagtagcgtgtatactttcctaatattagtctatgcacaagcacataaatgaatattttacaagattggggtctgcgtgtggcttgttttcactcatggccttctttatgctgttttttaaactgtggtatgaatgaaatgggtgcaccatgatttaataattctattgctgaattaatgcttaaaggctgctccagctttttgctaatgcaaactgtagtgaacacgctaatacctctatgtttatgtttgtgtacttttgtgattgttagattcaaatccaagagtcatcatttttctttttttgaggagtctctctgtcgcccaggctagagtgcaatggcacgatctcggctcactgcaacctccgcctcccaagttcaagtgattctcctacctcagcctcccaagtagctggaagtacaggcacccaccaccatgcccagctaatttttgtatttttagtagagacggggcttcaccatgttggccaggctggtctcaaactcctgacctcaagtgatctgccggcctcagcctcccaaagtcctgggattacaggtgtgagccaccccacctggcccgtttttcctcttattgcctcctatccaatccttcaagtcctggcattcaaggcctccaaaatacattaacccaatagcgttaatttttctccatctccactgccgctccggtccaaattaccattcactctcacctagtctattacaaagccttcgttgctctctgcttccctcttagcaccctgtagtcccttcacacagcaaccaaagtggtcttttcaaatgtaaacaagttgttgtcactcctagcttcaacccctctgtggcttccaaatgtgatgagaatgaaa

SEQ ID NO: 1244492 - DNA, 4001 bp, Homo sapiens
ttgattgaggagggagtagagctaccacataagcaaatatgtaatgttgtatgttgtatgtttctttctttctttctttaagaaaaatcccttggcaacaggaagcttaactgcaccaacaaggacagcagaagaaaagcagaatgttagtcaacaagggtcaccctgacccgaaccccagccccagctctctccagctgcacagccctggggagaaaggagaaagagcagagaagcccacccctcacacacccggttagtctcccctgcccactggcaggccctggggcaggcccctagatgggtctgcaaagggacactgcccccttgcattctgcccccccttctacatggctcccccacccacccttctacacggtggcttctgagggcagcccctggaggtgatcatgaccccccatcttgatctgaggattaacagatacaggttcacctggtgaaaatgcaggagctgtaggggtaggacccatcactcatctgactgcatgttgtaattcaatggacagtttactaaagtaatagtcttcttcctgtcctctgctgagcacccatctggccaacggtcctgcgctccctcagggccagcggcccatctcctcctgtgcctcctggagggcttcgcaactgcctccctcctctggggaatcttgccccactgactgacctttcggctctcagatcccaggtccctccctcgcagatacggcaacaggctctcttgggatttcaatcccgccttcccatcagctactcttcaaaacactaactggtattagctccttcagagaactctctggctttccaggcctacaatctccctccctagaatgaaagctcagtgacagaagtgcccttaaacttctgagtgacacgaggccctcagccggccctgaatcaatactggctggatcagtgagtgaataaatgcacatgtgagtaaggaatgaagggagcgaaagaactggattagaagctgcttggggcagagatgtgccttacaggcttcatgaagagtgggtgatgaaaaaggtaaatggagcatctaagaggaagctttgatagaagggagaatgcaagagaggttggaaattggaatccattggaattgggagcctggggagatgccaggacaggcactctctggcctaggactctgcagagggcagcctcagcaggcaagccaggcccccagcttctggggccggtcgcacccattatggccccgaaacggctgggtggtggtctgcagcctgcccagggccggctgggagacaggcagggtccccaccactctcttgcctctgggcaaaagctggcctcctgaccctgggggatggacgggagcaggggccacacaacacactcccaaacatataatcggcctccttcaccctcgcccacgctcagtcacacacagcctcggtcatacacactcacactcactctccggcacactctcagagcatcacataatttcagtgagacacaatcccaaagactaacacggacaacctctgagtctcacacaatctcagggccacacacaggcacacaatcagacgagctcaggaacgcccccgtctctgacacacgcaatctgaggtttacacgcgcgcgcacacgcacacacacagacaccagccggcgctcccgcacgcggctcccccacccccgccacgccacgcccccattgcctgggaactggcggccccgccccgcagcgtttgaggcgccgcaagccttcacgcccctcgggccttgcagatccctctcccagtttccgcggcggtccggtgcggtcagtacctgtctaaaatcaatattgccgaggcctccgcagcagtcaggccctgccaccgagctgttcgttacctcggctcccgggttcccagatctcttcatccgggggccgcctcaggaggcaccacgcgggccccgctgcagccacgcgcccccggaaccggacctatagagccgggtaagtgccgccagtcggggcgctttcccggtgacccccaacatattccggccttctgggaaatgtagttccccgtcaccgcgaagtgcctctttatctgggggctcgcgacagcgtctagaggagccgagaactacaagtcccagtgtgtttcgccgcagagcctgccggttccgctgcagctacgtagcagtatccccttggatccggcctcccgcccagtgcctttggtcgccggctgccgcacccgagcctgtaactgacctggcgtccctgcccttgcctggcggcggtggggctagaggccgggggccgcgggtcgtagctataagcagcttcccgcgcagcctcctgcggacttggacttggcccgggtcacacacgcccagggccccacacgcccagggccccacgccctcttctgaaattcgctttactctgggggcggtgcgcgacgagcactgcctagagcttcccgcccccgcggcgcccaggctctttagctcggccaaagacccctcctccactcattttttccttcattcattctctcattcactctcgagtattttctgaaccagactgtgcgctgagggtacggtagggaacaacacagagtcccccgccctcgcttcctcctgactgagataaaagacaaaatgtgaataaagggttataatatggatgagtactgtggtggaaaaaacggggtgggtcaaatggtacggaaggatgctgtcttagaatgtgcaggggaggtgccagatgtgccaagtgtgagggcagggcaaacaaggcaagacgaatggtatgtacaaaggcctggagacaggacgggcacctaaggaacagagaaaagaccggtgagctgtggagtagtgatggagggggtcaaatggagaagagtttagacgatcgggtcccagaagaaccccttttgtaggccgggtgtggtggctcatgcctgtaatcccagcactttgggaggccgaggtgggcggatcaccagaggtcggcagttcgagaccagcgtgactaacacggtgaaaccccgtctctattaaaaatacaaaaaatagccgggtgtggtgcgcgcacctgtaatcccagctactcaggaggctgaggcaggagaatcgcttgaacccaggaggtggaggttgcagtgagcggagatggtgccattgcatgccagcctgcgcgacagagcgagactccctctcaaaaaagaaaaaagcccttttgtagccaggtgttatgtaatatggggaaatagactgagaggttccaagatttgctcagtcacccagactgctgggggcccagacaggacttctgcagtcagctgcttcctgctccagatggcccgtttctctccaccttggcccacagcacctaccagtgttgagcatttactgagcagccactgtgtgctgctttagaggtagtcccaatcttcacaacatcgctaggatggggcaggccaaccgaggagacaggaaagacactggctttggagcatgcactatctctgtgactgagcccaccttcattttcctcaaaagtaaaagggaaatacatgttggtaaaactcatcacccaggaactggcctgtgggaagtgctcagtaggcattggcccccggcagggctggggacacaggctcagggctggttctctgacttaccactgttactaatgagtgtcgggaccctttccctgctcagtgtccaggcagagctgctagaggcagagccatttctgaaggagccccccgcagcgggagggcttctagcaagtctttcccctccgcctaccacacatccacttcactgatgttccagtcttctgacctaactggtcactcctgttttgttaagcccagaaaacaaatttttgtgcgtttgctttatctgagaacaaagtaaggcaaccgtaagaggtcacaccagaactgatgcagtccgatcctctactccagcctacccaacctgggccaccc

SEQ ID NO: 1244493 - DNA, 4001 bp, Homo sapiens
gtcccactgcactccagcctgggtgacagaacgagactccgtctcaaaaaaaaaacaaaaacaaaaaacacgcatccaattccaaggccctgtcccttgacagcctggtggggggagggtggaaagctggctcagggaagagtcgtggctttggtcatgcctggcacttacgaagtgcaccaagagtgagttatctccctgcatgtgcacagcagaccctatgagtgggccagcggccagttttcacccatccctcccactccccattccccattcagcccccagccaaaacctggcctcaccctacccctcccttgcctcattcccattaccaatcctcccgtggcccatctgttattccgcctcttacacaaccacctaatccactccctcctccaaccctggctttgccggttgctccccagggcacagcaaaggacctcagtggcctcctgcctttggacttcccccagagccctccccatggacccttacctatggaccagcatgctgttagccaagccaaagaggagaaagggcagagtgtgagtcacagagcagagccccgctcagctaggggaaaggggaaagcaggaaaggcctagggacactgagcctggggccaggaagggacagagggcattttccagggccaggaaaaacacttcccatatcactggcgccccttcaactctacagctaagagaggtgcatcttcctgagtgtaaatgatctctctactacttccccactgggccctgggggaaatgctgcctctcataaggaattcaactcgatgttagtcaccttagctgagctccactaaggaggccctcactctaggggatctaagaaaacacaggacctgtcagtgagcgcagacctatctctggccatactctcagccaccctaaaagtaaagccttgttgttagcctactttccagataaaagagcaaagcctccagaccccaggcagtgaggagcagagccagcctgagcaaggccagccctaccagacagaaagccccataaaaatgggacaaggataaaagtgagtgcttctgggtcttgaaacccaaggaaactgggaaagtgagcaagaaatatgcttttttcaccttctgtgggagccaagatgaaggacggaaactgagcactgaaagattaagcaactaacactgggggaacccagcagcagctgacatccacctgagtctcccaattagggctgaactggtcaaagctggaacgtatccaccccctcccccctctccctcctgtgcccaggtcccaatggcctcaggtcagcctgtctcaggagggtggtggtgtccatccggtcacttcagtcaccttgaggaggatttatgttgcccggagaagcacctgcttcgctggaaagaatgactaatggttcagagtggaattctaggcagcagagggaagcccctcccagctccccgatccccactcagagacatgatagtccctttctcatagctgtcatttccaaaacccccctcaggagggtggacctccctcctgaaactggattggcaaaaaagaaccaaaaatccaggtcagacgtgagcagagtaggagagtcctgggtcccacatccaggctctgcctccgggtgtcagagtctcccttgatggcctccccttcacacctgtgaccaaagggcggtctcccatccactcccagccccaacctccttcatacaacagaggtcccggctttctgctacccagtaattctaatggaacccccactccaaggctccaggttgcagaggcctcggaatctgactaaaggaaaggagctacccaccacggccaggaggtctgctgagctgcaggaatagctcgagtcccacaggtcaccgacgaatagcctcagctgttaacaccccaaagcatgggtaaggaagaggctttatggtaatttactccattgaggggtgcagggttctcgggagcagcgctctgtggtcagggaatgatctgcagtgggtcaacatgtcacattgtgacacatggacaaacagcaggcctggacaggcaaagtcacatcgattccaggccacacaccacacacaacaaagggcaggggaatgggtgggggctgctggagaggggacaggtcctcctgggatccatcacccctgcagaatctgcctgcagcgctgcagcccccactgcccccagagctgccctcatgccctggcaccataagctgactcgggtaacgtttatttagggcaactttgggttagagccctgtgcctggcacaaagacataaggatgagtgtgccagagtctttttcctctaagtttattctctgggccgggcgcgatggctcacccccgtaatcccagcactttgggaggcctaggcaggcggatcacaaggccaggagtcagagatcagcctggccaatatggtgaaaccccgtttctactaaaaatacaaaaattagctggacatggtggtgcacgactgtagtcccagctactggggaggctgaggcagaagaatcacttgaacctgggaggcagaggttgcagtgagccgagatcatgccactgcactccagcctggatgacagagcgagactccatctcaaaaaaaaaaaaaaagaagaagtttattctctggccgtgcccagtggctcacgcctgtaatcccagcattctgggaggccaaagcaggcagatcacctgatggtcaggagttcgagaccagcctggacaacatggtgacactccgtctctactaaaaatacaaaaatagccagacgtggtggcaggcacctgtaatcccagctactggagaggctgaagcaggagaatcgcttcaacccaggaagtggagattgcagtgagccgagatcacgccactgcactccagcctgggcaacaagagtgaaacttcatctcaaaaaataaaataaaataaaaatattttttaaaaagtttattctctggtagaagaggagaagccatttcatattaagccagccccctaaccctgtttttccacataagaggccacctggctcagaggactctggcctttggcagccactgtctgagctgggagcttcaccacccaccgtgagggaccatggcaagcctcccatgaccaatctaagcccaggtttcccttgagtggaatgggggtgatgagacaggccacctgaggttaccttctgcacagaagcaagaacagatgtaaaagtacagggcccactcagggccgaggctggcggcccctctactctgtctgcttaatgtcaactaatacaggtccctctctcaccattcactctctggagggaccctcctgggaagaccccgatgctggaatctgaggtcaggcaagccctgggcagcaaaaaccacctcatggcaggaggggtggaagttagaatgtcacaatgcgactgtggtctctagatcccacagtaaaacgaaatggcaggcagctgctccagttccctagatccataactcctttcaggagggtgaaatgtcattcattcttcaattaacaagtgtgacctgcaccaaactcaaaaggcactgacagctcacgtgctccagcaggggtgggtgtggggcccacgggtaagacggtgcttctcaaggccctgctcgcctccacgctgggctgcctcttctcactcctctgctggttgtgagcttcaccccattttcttttttctttcctttttttttgagatggagtctcactctatcacccaggctggagtacagtggcgcgatctctgctcactgcaagctccacctcccgggttcacgccattctcctgcctcagcctcctaagtagctgggactacaggcgcccgccaccatgcccagctatttttttgtatttttagtagagacagggtttcaccgtgttagccaggatggtctcgatctcctgacctcatgatccgcctgcctcggcctcccaaagtgccgaggga

SEQ ID NO: 1244494 - DNA, 4001 bp, Homo sapiens
cctcatatctctggcatgctgggtgtgtgcaaaggtgaaaggagagaggaagcatgcaggccaggcagtgggaggaaacgccaggatggccaggcacttcggctgcagccctggctccagaggcccatgtcaggaggctggggccagctggggacggtgtggctgagagtacaggtgctccccagcccagccaaggcttctcaggagaaaggggtgtccgggaggcctgtgtttggctacaccaagctcgccagtctcactcccacctctggacctcccctcgaagcccctcccttgtgggccgccagagcatccatcctcggagtgtgtccagcatgttcaggacagcaggaacagggcattctttggaatgcactgtctttgacatgagcaggctggcccccacccacttctctcaccagatggagaaaaatctcaagtcataaactaaatgaaaaacatgtcctgttctgccctgggatcaagggttcaccttaaatgaaaactgtctggaacaatgtgctgctgacgctgatcttggccttactctgcagattagcctcgggggtgatcacaggacgctcagggctctgcatcagcaagcccaacccccgctgagccccaggaccacccactcccccagcaggatccccgggaagcagcccagaagcaccccccagagacagccttgggagagcgggccaggaaccccaagagcttcaccccacagtctgggaggtgtgggaggcatctcagaaaggctgcagaaggaactgacggccctcccctcccacactttcctcgaagggcccagagcccacttcccatgcagtccacccacccctcggtgctggtgcccgggcacccaaacatcccctggcacccatcacgagctggtgccacgctggtggcttcctttcaactcatgccggcttgctcctgccacccagctcgcctaggtccggaatgcgcaggccgttttgcaggaagcctcatgtgggaaaaataaccatgtttgtggaacacacgaggggtgggagattcacaagcaagtggctttactgtgtgacatggcagagagggaagagagcccctacttcctgggcaacccacttcatgcatgagaaggccaccagactgccaggcacatgtgaccaatggcagccccaccatggcagcgttctcctgcaggttcttgtgagggtaggagggccacccctacagtcctggaccatcctgacgccagcctgggcagcccaatggctgctggatccccaaggcaagacggcaggaagcgcctagtactccacaccagccagcgacagacacgggagggaagagcagagctgtctgtctgtctggccagccagcagcaaccaccgcgatcccctgcatgtggggctcaccaagcagtgagatactcccgtctggacagtgtcaggcacatcacttaccacattccagtagagcggattgaaggtgatggtgatgacggcagccacaaagctgggatccagggggtccacgtagcccagcagccgggtcataacgcagaagtctgcctgcagggacagagctagcatcagcaccacccagacacagcagggcctgtgagcccccaggagtcggagaaaaagttaccctctgggaacacactgggaggcctgggaacatccaagtccggcaaaggttactacagtgtagtctcataaaagggaagataaaaagctgaaacctaatgagctgtgtcatgtcctgggagggcggccgcagaaatgtgcctggatgccagatgaggaaatcagcacctctgaagaggggtgcctggcaccctgaagggaggtgacaccaaccctggtgtgaccgagaccctcctggatgagggttctcagaggccccagaggaaacccaagcagctgagataaatgtgaagagatgctcaacctaccaggaatcaggtaaaagcaaattaaaacaatagtggtgtgcctctcctcgcccacactcgacaggggacaatcttgagtgcacacgagggtgtgagtggggcggggtaaactgaaaaagtgtgtgcccacatcccggccacgccacccgcatacggggggcacgtggacactgcccccgccccgccatcatcttgcatgaaaacgtcaggaacaatgacaaacaacttaggtgtccagcaaccaaagaaatgaagaaaaaaaaaaaaaacccacggcccattcctacagcagctaaactacagcagttaaaagcactaggtcggccgggcgcggtggctcatgcctgtaatcccagcactttgggaggccgaggcgggcggatcacgaggtcaggagatcaagaccatcctggctaacacggtgaaaccccatctctactaaaaatacaaaaaattagccgggcatggtggcgggcgcctgtagtcccagctactcaggagactgaggcaggagaatggcatgaacctgggaggcggagcttgcagtgagcagagatcgcgccactgcactccagcctgggcaacagagtgagactccgtctcaaaaaaaaaaaaaaaaaagcacgaggtctacacacagcactgtgaaacgttctgaaacacacggctgagtagaagagcaggctgcatgattcagcacctagacagaaatttctagaaaacaacataaaatatagtatcaaatattcagattttacaattttttttttttttgagacagagtctccctctgccacccaggctggaatgcagtggcgcgttcatagctcactgcaaccttgaactcctgggctcactttgggaggccaaggtgggagaatcacttgaggccaggagtttgagaccagtctaggcaacatagtgagaccctgtctctacaaaaatgtaaaaactagctgggcgtagttccagttacttgggaggccaaggcaagaggatcgcttgagcccaggtgttcgaggctgtagtgagctgtgatcgtgccacttgcactccagcctgggcaaccctgtctcaaaaaataaacaattaattaatttaaaaataaattaaaataaaaaactttttctaaaatgcactgaaaaatattatggtgtctctccacatgcaactcaaaattttttaaaaatactaaattataaaataagtgtaaagttgtgctcgcttcagcagcacatatactaaaattggaacaatacagagaagattagtatggcccctgcacaagggtgacacatacaaattcatgaagcgttccacatttttggacacaaggaggggaacatcacaccgaggcctgtcagggggcggggggctaggggaaggatagcattaggaggaatacctaaggtagatgatgggttgatggatgcagcaaaccaccatggcaaatgtatacctatgtacaaacctccatgttctgcacatgtaccccagaacttaaagtataataataaaaatttttttaaaaaattaaaaacaaaaaataaaaaaaataagtgtaaagtccatcagagctgtgatctttcccataatggtgtgttttgttctattgcatttggaaatacagtaaattccttcaaagagcgctttgatctcccacattttggggaagcggtggggaggagatggtgcttctgcccagggtcagccagccctggggggcaagcgcagcctccactccaatccttgcttccccaaacgacagtctcctgacataactctgcctgctaccaggtcacttgcagggtgtgaccatgggatgtccctcagacgtctatcagtataaagccatcttctgctatggcctgccatccttcccacgtgtggcctccccacctgatcagcctgcatccctgaggtgcaaacaatcatctcactgtagggccaagggcagggctaagcagatgttaaatgctctaggccgggcgtggtggctcatgcctataatcccagcactttgggaggccgaggtgggcggatcacctgaggt

SEQ ID NO: 1244495 - DNA, 4001 bp, Homo sapiens
tgctgctctcagtggtctccagcagggctgagtccttgccgttgcctgaggaggagctgtgtgagctccgctgagatgcgcctctagactcatgcccgttggactcattgccacttgaaccattgctgttggcatcggtgtcatcggccaggctggggcctgggcaaggccggtgctgtgggggcccaggggatgggacgcccccaggacaaaatgattccccaggcctggggtcccctcccccatcagccccttctagggggccactcatgtctgggccatggggagaacagaacagagaaggcagagaggccaccacggatgcacgagggggcctggaggcttggctgagggagtgaggtggaagatctaagtctctgagggttgagaagttcgatcacagccagtacctggagagggagaccaggaagcagggcttgcagaaagctggtttaactccagagcacctgctggcttcactcagaccttccccctgcctggcctcctgcaggactgatgggagtggaacccaggcctggggcttccaatggggagtcaggatgtctcctgtacccttagggggactgccagcgggagaaggttctccggggccttccttcacatcccctgccaccatggcctgagcagtcaatgagaaccacggctgtagacaaaaacctggacacttcccattcccaagttcccattaggtgtccactctgcctgggcctccaaggcctcggagcaggaggtgagctggtcgcctcctatatttaggcctccaggctaattttatccgggggcggtgccacccccgctgcacatgcgcgccgacgtgcgcggccccaccacgcgcttccgccgccgccacggtcgccagggaaaccgacgtcagctgctgagctcagcggttgctggagggaccacaggagggcgggaggagcgacccctcccccatttcccggcggaagtgggggaacggcccactctcacactggtgggcgcggccgggggggtcacgcatcccttacatatccccagtcccaggatggctcggtggccgtaagaagtgggacggcctattaggatcccagggttggtcctggcttccccaggacgaagcacaacggccactgccctcggcgcaaaagcccctcaacctgactctcgcctggatcccagtcattctggtcaagacaacacaacctttccttctttagcccctgcgctgcttccccaccacaaggaccgaagccggcaacctgccatcgtcaaggacccgaggatcctctctcttcagtcccctacttttctggccagacccccccaccaaccccaagccttgggcagaagacacacaacagccaacagatctttcttcccctactccccgtccaaccacacccctactactgagcattttctgagcgccaggggaaaagggaaggttgtggccaacagcaggaaccagcgctgggaacgggatgttctagtccgaagtgggctgacatcacaggcggcgcagggccagggactggagaacagagacacggggagcgctgaaagcctaatagggtcctggtaccggggcaaacctggggcccctcgagtaacgagcaagaagaccggggcatgcccgctgagagtcggctgtggggccgggaaagctgggacggggaggtggggacaagctggaggtaagatgagtgggtcaggagtgcagactcccggtgcaagatttcgaggaggacttcggtccttgggggcagggagagggtgggtagcggtaaggacgacagtgtgccctctgcctgggccgaaagtagcccatcagattggaagtggcagcggtccggctcagggacggagatcggccccaggatggccgcagagatgcctacctggtcgcaggagtgtcctccgcacgcctgcccgccgccgctccagcccgcagccgagtggaagctccaccgggcgggcggggaggcgggttgcataatgccgggcactgccccctcattggcctcttgccgacggagccgcaggccccgcccccgattggctggggatctcttcccggcgcctgattggctagtggtctccactaaggtcagggctgtgtcacacacacgggcgcacgtggacctgggtgctggtgctgggctgaagagccccagacaccgcccagccaatgggcgcaggacgcttgcacattgaataatggaagggaggagagagggagatacgctgcgcctctttagggaaaaagcccggcccggggtaggtgctcaagacttgtctacttcctgaacgcactagccttgcagaacacaacatcttggcatcttcgcctttccaagggtgaggaaaaggaatggcgctgcaagttaggccacgctggatgagatgggtggtccttgagaggaggggagagacagaaacctgcctgggcctctcctgggttcctttcccaaccttgttccctcccaaccttcgttctacataatgaagccctttaaccgaagcacttcctctgacacttcaaatcctgggagaggacagttaagggtccacgtgtgaccggtgggtgagtgggtggaggaaggatgcggacaatggaaggggcaaccagagccaatagtggctgtgaagggaaacaatggcaggtgcttctatggccactcagagacaaggtctccgggcagcctacgtggtgtctagtactttcctccagaggacgcagccacccacagttaaagctgccccaaaagtgggggccaggaagccaggactacagagggaccaaggggatggcccagagaagaggccagctggggccctagacagagaaatgtggggtggcaagggcttcatatttccactgcttggaaaagagaaagccaaactccaggggcccagacggaacgtcatctgtctcattcactgtagtctccagagcccaggacaggacctgacacatggcaagtgatcgataaacatgatttttttttttttaaacaaggataggttggggaggtgggaaaagagtgtcaacaggagaaagggggctgggaattctgattctctaaaagagatgagtagtcctagaaagagaacaggggcacgatttgcaggcaataaaatgttagtctgggctcaggagagctgcagttacacagccccctccatccaggaccgtgatgagtagttcctcgcagggctccctggaaacgtgggtagtagatgaacaggcctccaagcagctgctgacataatcattgtgggggcactcccctcactgtcacgtggcctaagctttcctgaacaatgagggaagggtgaaggggagggctctgtggaaaagctgagacaagatcgtgttataaattaacccagaaaaatcgaaacaggaaaacaaaagattcaggagcctggaggccgggcgcggtggcctgtaatcccagcactttgggaggcccaggcaggcggatcacctgaggtagcgagttcgagaccagcctgaccaacatggagaaaccccgtctctattaaaaaaaaaaaaaaagattcaggagcttggattctcagtctcctctccctgaaaatgatcctctccaccccaactcatactgtggctttggccttatctcgtttgcagatacctcttccctggaaacatggtttttctcccccttcagggatttaggtgtgatctcccctaacccaggcagtccttgatctcccgcctccatctccctgtcttttgcatagacaaaaggctccagccctccagcagcccccgcttgctcccaagactcttgttgtcctgcttcaccgtccccacagtaaccaggccctgctgccgtcaatggaggcgagggggcgggagacagcagtgacgtcaaagcggaagaagggggcggggcgaagctgcctcggaatgtggggcagggaggctggagagactggagaggcagcggtttgggaggcggccagcccga

SEQ ID NO: 1244496 - DNA, 4001 bp, Homo sapiens
acagagcacagtctttagaattgtattggtttggtttgaatcccagctctgccaccttctatgtacctacgtgactttggcaaggtacttaactgcttgggtttagtttcctcaactgtgagctaatacatttacttcattgggttgtgttgaggattgagataatgtacgtaaagcaagcacctagcacagggcctgggacatagcaagtatgcactaaagtatacctagaatgatgaaggttaccaggatgacagtccttgttttatggacacaaggaatagcttttctatgactctatgaaatgccacaaagttaacagggaggtgaattttacaaaactgggatacgattttcgaatttactaactaaagatcttttggaaatgttaaggccttacctcctggctggttgctgcatcatgctggccttagctggtttgtgctccagagcttgtatatcctgaactgtcagtcgacctagctgaactccagccagcctcagcagtggtgagtgatgctgagcttttcctaggatgtatcgaagttgttgtacaagaaaccatccttcccaggccatgttcacaaatgggtaggctgccaggaaagctctgtaaaatcgtttccagcgggaagaagggggatgaatagaatattcatcctcttctctcaggctagaaaccagcttctccagcttcactttcagatagggaagaagaaccaggaacataatagatttccaaagctgctgctttgggagaccagcactagccaatctctgagacttgtgagtgtcccccattacaattctctttaagccgtaaaagttttcagaaaatgaggcactggttctagacagataatgttgctggagcagaagatctagcagagtaaagatttcatcaaaccacctccacaagaagccatagtgggtgggatttgattctgcaagaacctaaagcaaaataaagcaataagtgaaattcattccattacacaagttctacacctatttacattcccccttttcctctaaagtctacacaatttgttttaaataagtcactgttggaccctgaaatgctgggtattcagtacaggtctctacacataacagagactcagtaactcttaagtcatgggatacaagttatttgcaaattggctatttcaaacgctaggctaccaaataagcacaaattattcgtttgttttttacccagttgtccctaaaacctttccaagaattaataccttaccttgaccacatgctgaagagcgggtctcactgctgtcattaaactgtcctgtgctaccacctcaaagatggatggctggtcatcggccacagaagcagctgtgaagtgagccccgtgctcagccatagtttcctgcgtgtactggctttcacttttcccacaaactctctcgtgagcatgaactttttcgggaggaagagtatcagatgggtgctcagtcttaaaggtaaactttctgcatgatatctgaaactcgaaactcaatcttatgggcaaaaatgaactgggaaaaaaagacctggaggccgagggtagtctcaagaaggttaagaacaaagttaactcggacgtgggtggaagtagtatgtggcgagggggtaacttgtcaaatgctgcacgtcagggcagagcgtgactgtgggggacaggtatgggggaaggaacgcaatcctctggagctgcgaaccagaaacgccccctcctccccaatcgtgagagctcaaaagccagccgactctgaggattcagtcgtgccactgtgagcccgggacacaagggctgactccagctgttggctttgagtatccccgcccgcgcccgtccttgctcgctgaccccaggcgaggcgcaaacaacccacgacgccacgtttgaagggaggtctccgctttatgacagaagccgcacccggaaatgaaaccaccaggacctctgggatgcctggcggaagagaggcgctctagttccgaatgcggtccggaaaccagaactagagaactctatgacccacctgagcttccgctcccgccccgctgaaacagaagagggcccttgtgggctggttttggctagtttggtttacttttcgtagctgggtctgcatggtagcctcgctggaaagctacagctctgaacctctctctgcgaggtctttttgacaagctgtttggggcaccgcgcagacgtctggcgccgggagccagagctcgggcccgttgctgagccctgtgttcctgcaggcgatgaagctaggggcggtgggaggaagggaatctggaggtggaaaggactttgctgtacgcgtgcggcagggatggtggttaatttatatgtcttagccttccagaaatgatttaaagcgacatagcaggagataggagccttagatttattgccgccaattataaggaaagatgattggattgagaaaggttcatgcttgttcctcagtacttgagacggttaattttcatccaagctggtagtttaacgtcttccaggttttggctatattcaagcataactgcatgcacttgctatactggatgaaaatggtctccatccttgaacacagttgtatatgtcaccaccagcgatatgaatacagtactaacgcagagggagctttatgaattgtaactagcatgcactggggacacttgacagaaagtttcctttcatgccgtttttataccaaaatgaatgtgatttaccttaaggtttgtaaagtgcttttatgttatgtacagctttgtctcgctgaagttggctgacacagccttattgaatttggatgagagttccacctctcctcccttcctctgggaagtgccacctctgggctaaatagctgggaatagaaggtattgtttactgccctagaggcccttatgttataaaaataattggtttgcataatgagaaccctcaaaaacaaggtttggatttagttattccaataggagagaaaaccttacaaattgtccttaattatagttataaaaagtgttttttactctaccaaaagacattatattgatatatgatttttaccttacagagttttaagactagacatagtttatccatatgaagcacctggatacatattaggtgcttgtttaatagtaactgttatgtacaagcttttcttaagtgaatagcaaaaatacaaagttgagaggtagcatcaactaaatcaagcaggaaattaaacatttttgtcacttagggatctttggttacaagcaacagaaacaaacaggctaatttaaactaaaacggaatttattagaagtgtatggagtagctcacaaaataagtaaagccagccctgaaagaacaggaacttaacaatactattgggactgcctaacaggaattagaagttcttatccaggcaacgttgttgcagtgaacgagcttccaccaatttctgtttgtgactctgctcgtgatacaaattttgactgacctctcttggttcaagttccctctccaccctgtctttcactcttagccaggggaaggcaggatgtcttgattgatagtcccatggaagtactccaaaagttaactaaacgtatggcataagaacgcctataatcccagcactttgggaggccgaggcgggtggatcacctgaggtcaagaggtcatgaccagcctgaccaacatggagaaacccagtctgtactagaaatacaaaaaattagctgggtgtggtggcacatacctgtaatcccagctactcgggaggctgaggcaggagaatcgcttgaaccctggaagcggaggttgtggtgagccgagattgcaccattgcactccagcctgggtaactgagcgagactccatctccagaaaaaagaaaagaaaaaggaaaggtagggcctggtatggtggctcatacctgtaatcccagcactttgggaggctgagacgggtggatcacgaagtcagg

SEQ ID NO: 1244497 - DNA, 4001 bp, Homo sapiens
gggtctcactctgttgccaggctggagtacagtggcacgatctcggctcactgcaacctctgccttgcgggttcacgcgattctcctgcctcggtctcccgagtagctgagactacaggtgcacaccaccatgaccagctaatttttgtatttttagtagagatggggtttcaccatgttcgccaggatggtctcaatctcttgaactcgtgatccacccacctcagcctcccaaagtgctgggattataggcgtgagcgactgcgccaggcagacctcatctttcaaattaaaaaaaataaaaaaaaaaaaagactcccacagtggaaccaagtgagcatgagaatcagtttcttcatctccctgtttcatgacctcaccctgcactcttcaatcaatgattttcacacttcatcctaatcctattccaaactcttttttaaaaaccctagccccaaagtactctgggagatggatttgaggtttcctcctgtctccttgttcagcagccctatgattaaacctctttctctgctgcaacctggtgtcttggtgtattgacctccagtgtgcatcaggcaacagaactattacagttaatacttttagcctaacattcaaaggccctccccatctatcccaaactacctatccaatttctggtcccactgcctctcagcgggaccctggctttactcaccaaactctgctgttcccctagtcttgccactcagtaaacactaccatcatccaatttgttgctcaagacaaaaacacagaagtcatccttaattctctttccctcagactctctaaatccaatccaccaggaaatctatttccaatcatgtctcaaatctctcatctcttcatctctactacctcactctagttcaagtaagccaccaccatcactcacctggaccaatgcattaacctcctgaccactgcataaccacaattcatttgtcacacatcagcataaagtggattatggcttcccattacacatggtataaattccaactcagcatcctggtttaccaagtctggccactctctggcctacctttccaaccctatctcacaccattctctttttcacccacaatgcaccaaccacacattagcttcttttttatttctctaacttgccaagctcagtcctggaaggcatttttttcaccctgacatatgcatggctagctcttgttatttagatttctggtgattcgccttcgtggaaaaggcttcactagccactcaagtagttactatcagatggccggccctattttaatttcctgtaaagcgcttatcactattggatgtttttatttttcgctctatattccccactagaaaaaaaatctctacgtgggcatgggatgttgctgcttcgtttccattgaattaccaaggcttagaacaataccagggcttgaaacgcaaaaaaattctaaaacttgtggaatgacttaatgaactcttgattctcaccactcttcagcccctccccaactttcaggacagtcttcctgaaggcattttgtttattaagccacttgatttccgtctatcattcccagtaaaatataagcttcaagagctcagagacagggtttgcgtgcatgagggctgtattccatgaccagcatggtgcctgatataaagtaggcggccggcagtctttctgttagctgaatccatgaatgggacaatggggctaaatttacatgggggtcggccatgcctggggtctgcggaacgcacgcaagataggacgaatggacgcctccactaaagcaaatacgcgggcaccaagtagacacagctcggcccggtggggatactgaagccgccagaccaagcttgggctagatgacgaaacgctgcacctggaggaggatccaggtccgcacgcggtaactatactcacgtggaagatgcactcgcggccacagagcacctcgaatcgtcgcgcgcgtttgttacgtcatccgcgtgcgccgcgggcagagactggacctgccagcgccggggcgactacgccccgcccacttttccccagccacccggccgaattctaggttcttggtggggagaggtttatccccaggtggtttctcccacaaatctgtcttgaactgacgtttgtgaaaatacattcagttccccgtccccgcggggacagttaagtaatgacatcagttagttaaggccataaagcaagcatgtgaaagttgtgctttggtggcattacgaggaagcccttctctgcttggcaagatcagggagactgaaagatgcttagaagtcatccaccaggcgggctgtgtttgagttcctgagctctgctaccccatccatctgaaggcctgcgggatgccggacaggatgtcacttaggagggagacggaggctgggcgcggtggctcccgcctgtaatccgagcactttgggagcccgaggcgggcagatcgcttgagcccaggagttcgagaccagtctgggcaacatggcgaaaccatgtcgctacagaaaaatacaaaaattagccgggtgtggcggtgcaagcctgcgatcccagctacttggtgggctgaggtgggaggatcgcttgagcccgggaggtcgaggctgcagtgaaccgagatggcgccgctgcactccagcctgggcgatagagcgagacctcgtctcaaaaaaatcagagagggccaggggctgtgtttcacgcctgtaatcccagcactttgggaggctgaggcgggtggatcacctgaggtcaggagtttgagaccagcctggccacatggtgaaaccccgtctctactaaaaatacaaaaaaaaaaaaaaaaaaaaaaattagccgggcgtggtggtggcaggtgcctgtaatcctagctactcaggaggctgaggccggaaaatcccttgaacctgggaggcgggggttgcagtgagccgagatcgcgccactgcactccagcctgggcgacagaaccaggcttcgtcttaaaaaaaaaaaaatcagagaaaagagacaggggtgtcgggagttgggatggtgcaccgaggcgcctcgcggagtctctaggaagcgagggggtgagcagcgagaaggagctggaggtggcgaggaaacccgctcaccggtgacgtcaccgagcgcccccccacccccatccccacccccaagcgagcacctgcccctcccgggggcggagctccggcgcatcatggcggctggccgggcccaggtcccttcctccgtgagtgctgctattacgtctcttgttccttttttcttgtttgtcacagatactctttctcttcctatttcctctgccttgtctctctgggctcgctggccgcgtccggcccatgggtgagggggttgtgagtcggtccgctcctacctcttactggttctgcgaatgtttattccctcattcacgcggcgcccgctgtgagccttaaactggtctccgttcactctctagggtttaatcctggtgggaaaccaggagcaggttaatgggggaactatggggctgtgggttcctggagaagacccttgacggagctgtaggggaaaagggcaaccataataagtaaaagcgtctgagacccgaagtgcgtgtagaaggcaaaaagcgccgaaaggggctgggtgtggtggctcacgcttgtaatccagcactgtgggaggcggaggcgggcggattacttgaggtcaggagttcgagaccagcctgaccaacatggtgaaacctcatctctactaaaaatacaaaaattagccgggcgtggtggcgcgcacctgtaattccagctactcagaaggttgaggcaggagaatcgcttgaaccgggtagacggaggctgcagtgagctgagattgtgccacagcactccagcctgggcaacagagcgagactctgtcaaaaaaaaaaaaaaaaaaaaaaaagcgccggaaggggtttcaggacggaagc

SEQ ID NO: 1244498 - DNA, 4001 bp, Homo sapiens
tgttaatggggaaagtaaacccaggaaataaagggagtcagtgaggtaagtgaggagcctttggatgctcagaactctccttcaggaaaagcagaagcggagaggggaagggaggggggcgggcgaggcaagagaagcaactttgcccttatttggtcaaaggttctgcaggagctgttagggcccggacgcctgggtctccaagtaacctagagtttagctccaggtatctctgctctgagatgaggaagcagacccctgggggctttccgggaaagttggaaaacttttgaaggtggacaggggccagacccggcaggccagctctcgggtctaggtaccccgggaacctttcccccctccccctttcaccccaagcccccacatccggtcccctcccgcccggaaacccccttccccccccttttgaacttccgctccccctccccacttccgggcagtgtggacagggagatggtggtgggagcagcggtagtaaaccaatatactttcgcttatgctgtctcagaacttctcacaaagttcccctgctccaggccccgccggatggcgggaagggagggcgaggggacttccgggattggcctcgcaggaatgttgaatccaacgtgctgagctgggggggcgtgtggtggcctcgccctctctaacggagttaggaggggccagaagcccacagagggtgggcaagggaccaagaccacgcgcctggggctcccttccgcaccaggagaaacaatggtagagggacgcgggctggcagccggacggggagctgggggtccaaggatccccgggtcccctctcaatcccaatccccagtaaaaactgaggcgcgtccccgccccgccctgggagaggcggaagtgggccgccgcaccgggcgccgcgcccctccccgccctgtgccccggatgtaacgccccgtcgcggaaagcggggtagcgggcgggatgggcgccgccgcctggggcataggacctacgggcaactgagggacccactcacgtgcagccgccattcgcgccgcttccagggcaagcacccagtcagggcctctcgctgcgcgccctagaccgcgcccgcccccacccaagtccctccctcagggtccaaaccggagcagtgccccggaccgcgcaggcctcgcagtaccgtgatgttgacgaacgttttcccggggacggcggcccagacggagggcgagtccttgtagcccacgatggccgcgtcctgacaggtcccgtccgccatgaggttgtcgatgtaggcgttccacccggccatggcgctgctactggggctgctctcggcgctgctgctggggccgcggactgggctcgagctgcctcggctggcgggcggggggaggcggagagctcggggcacgcgctgccgtccggaccgcggctccgctcgctgtgcagcagccctcgcaccgccacttcctgctcctccccccccccgccccgctagatttttatttgcaaaggacggtaggggcggggcctactccccattccctccctcccccactcgccagcccagacaccgaactttgcaaatgcaattttaaaaatccctccccctattgcaaaatttgcagagttcgatggaaagcaatgcagaaggatggggggtggcgggagagaggtgaagggtagggtttgctccaatttgcactgaatataaaccagactttggtatcggggcagggagtgagccagaagaaggaaggaaggagaaagcaggaggaattagcaagctgcaaatttagcaaattaaggagagttcggggagcccagggttaaacgggatgactcctccttcccccacctccgccgaagggaaggaccggcgggcggcggcgcgtgtgcccgcgcctgcgcctgcgccggggccgggagtgcatggggcggtcggggccggagccggctgcacgggagcgcgcccggcccgacccgtgtggaccctgcgggaaaggaaggcgggctggggacgtgtctcccgcctggcggaaggggcgggggcgaagccgtgcgcgctgccgcctcaccacccttgattttacttattcaagtaataagaaagcaaagaagagtttggccaaatcctctagtcgctctcatagctgaaggcacccaccggggccacttctgtccccagcgtcttctcgggtcgtgcaggttgggttcaccagggcccattctcagtctagaggattgtcccttctctggatcggctctagcccagggcctcaccccacatcccagccccgcccgccccaggcaggcaatgtctggatcaccggccgtgccccttggcctgtgtctgcagaggtcacagagcgcggacacccgcggggcttaacaggcggggctatttttcgaggcggaagaatactcaagttgcaagagtggcaactttttcaagaaggggaaagtcccacttcgggccctttgggtttcttcgcagtcagatgtgcgctcacagccacctggggagggcgggacgggcgggacggccgtgcggcggccgcggtgaaaccgcctcctccgacccgccgccgagggctgggcggcttccggagcctgggctaggggcaaggggtcaccgagcgcggcccgggcggaaagggggttggttttctctctcctcccgagcgcggcgcgcatccctggcgtccacgccgaatcccacagtccccgacgcccctcgagtccgtgttcctcgacagccgcgcggctgagtcactggcgggctcgggcggggccgcacccgggcacgtggcggcgctccccgcccgccatctcctgacccctggcccaccgcacccctaccccagggtggaaaaatcccgggaggagcggcctgagatgagggggcggggcgagaggggagactggacgggtggcggggcaggtggcctggggtgggggctgggaggccgcgcgggccggcggggcggggagcaggggtggggagagggcggcgggggtgagtcaccgggcgcgcgctgccccggcgccgacgggaagggcctccgagtcgggccgaggcgccgtgtgtcccccgccggtcggctggtatggctgcagaggagctcggggcagaccccgcactggccccagagccggcaaagtggagatctctaccgagggcagagacctacctccccgcagtgctacaagtggggcgccggaagagccccaggcgtgcagaagctcacaaaaggccacccgtcctcggtccattcatttttgttcactgttgattcagccccattcattgatgggctggggccgtgcgctgagcgcccacagtcgatggggaaaggggctctgaccgacagtccccacgccgggcgacaagtgctgtcccagcgttatcagtcgggcgccttgccagccgaaagggcctgtctaaattcgtttcctgtcccctaactcatcccggcgctggctggcctggagagggtaggatggggcggcgccgagaatggccgttatgaggaccctaagaggtgagaccctctcgccttctggggtggggggtcccgtcctttcccccactgaggacagaggcccgcccagcgatctgagcatgtgtggacgtcaatcttgcagcccctcttccaggccccctccccagccttgcagggctcaggttacccctggcctttcctaaaggtcactcattcctcttgacgtttgcaaaaggggaatgtaatcctggggtggggggagacccctcatctgtagcccctcccttgctcctcccaaagggtggaattagaacagggactgttattgggagacagaaagtgggggatagtagttgacctttggtaagggggcaggtgcccagggccagaggcttctgcttcaggctgtagtgggcacttggctgccagcccagtgtgaaggggggaggatggagagaaagagaggcggggctggctggggaccgagtggctcagg

SEQ ID NO: 1244499 - DNA, 4001 bp, Homo sapiens
gagagcatgaatggggtccaagcgcaaatgtaggccaagagggcctgtaagttggagagaaccaggagaaatctcaaaattctagcttcccctttgaatgaatgagagatgatgagatgtacacataggggaaggtgtatgtacgtatgtatgcatattttagtgagcaattagagatattcgtcttttttttgtttgtttttttgagacagttttgtttttgttgcccaggctggagtgcaatggtgcgatctcggttcactgcaacctccgcctcctgggttcaagcgattctcctgcctcaggctcccgagtagctgggattacaggcatgcaccaccacacccaactaattttgtatttttagtagagatggggtttctccatgttggtcagggtggtcttgaactcccaacctcaggttatctgcctgcctctgccacctaaagtgcggggattgcaggcacgagccaccgcacccggcattttttttttttttttttttttgagacagggtctcgctctttcatccaggctggagtgcagtggggagagcatggctcaccacagccttgacctcctgggctcaaacgatcctcccacctcagcctcccaagtagcgagaccacaatgtctggctaattcttttattttttgtagagaaggcatcttgtcatgttgcctaggctagtcttgaactccagggctcagatgatctttctaccttggcagacatttcctctccttttgctcaagtccatcaagatgttggcatctgatgaactcatctatggaaacctgggtttatatttgtccttcctgaatataggatttgctcttactctcctggaaggagttcttgctatcttactcccttcctatgaaaatgaagcccaaattcttcaacctgacttttgaggctccaaattgcctttccaaccgtattggtcactactcctgttcatgtaccctgctccctgagtaaataaagctcctggatgtgcccacatctgcccagggcatccattctctctgttccctctgtctggaatgcaaagtggtataatagtaaagaggacaagcttgtggtcaaacaggccagaactggaaactccactttactacatactggctgtgtgaccttgggcagggcatttaatctctctaatccccatctgtaaaactgggattagagaaactatctcaaagggtgtgataaaaattacttgacatattgtgacacctgtcacacagtgagtgctcaatacgttggttctttgcccactatggtccaaatcgaatgtaccagtccaaagtccctccttcaaacaaaacgttccaagatgatccctgcccccacgtcttcaaagccggaactgacaccttcctatcccaaatgcttcctaatcaaagagtctttcaggggctcaaatcattctctgccttgcacttgaaaaggctcatgtccccgtggggactgtgagtcccaatgggcgggaccctggtctgatttctgtgccattcctagacattgtggcccgaatgtatttaataaatacccttttgactgaacaaataagtaaatgaaagcttctgggaaagtaagagaggctggtaaggctctcatcaccttaggggcttcactcacattcataagagacctcgtggggaaactaaggttcagggattgcagaggcgtattgggggcgcagggggcgggagcaagacaaatgggcggggcttaccgtgggggtggggcttacctgctagactcatgtagattggctggcgggagcggaagtgattcagagcgcccccagagcagttctgctcttcgcactgcagtacgcagtcgcggtacaccggctcacggtcgccctgggagccgctcgccagcgccgctgccccagctagcaggaccaaccgcgccgccaggccggccatcctttctccctggctcgccgccgggggaggagcttaggagtatgaagcttccacttccggagtaaccggaagttcctgtgttctttattctactctccgctgaagtccacacagtttaaattaaagttcccggatttttgtgggcgcctgccccgcccctcgtccccctgctgtgtccatatatcgaggcgatagggttaagggaaggcggacgcctgatgggttaatgagcaaactgaagtgttttccatgatcttttttgaggtagggctgtttactgtcaccacccctgtcggattttacttcctaaacgtacctgtaactatccacttctctccatctcttctggcaccaccctggttaaagacaccatcatgtgtcgccaagacagccgcagtagcttcttaatggctctccctgcctctacttttgcctcttccaacctgcgctccattttgaaaaattaaaatttgcccatatcactttttttttcttaaaattatttactggctcccaattaccttgggtaaaatacagtctccacaaaccctgcctgatttggcccctgtccactggtctccctcactcccttgctccagacccgcttcagagggctatgtccctcaagcttcctgactgcctggcctggtctgaatcactcactcttcttttttcttctagtcgcaattgaagtaccacctcccgagggtgattgcttccccatgcggggtagaacctttgctgtcctgttcaccactctacctccagcacagaatttggcttatggtaggcgctaactgcgtttgtttgttcttctgtttaatgaatgaacagcatacatcaacataagaacttgacaaatccagggctgtaaaatcatcagtatggttctgcactgagatcggagagaagtaatatttctaggaaaattaggaaccctgggaacaggacgcttgctttagtatcctctccctgctcacctcccctgcactcccatcagcaccgacccacacccaatctcatagaagccttgtagctaaggatcaccctttctcctcccccactctcctcaccccttgtcaacttttctttttcgtcctgggggttggaatgagtaagaagtagcctgggattccattcactcacttaacaaacatttctgagtccttagctctagcaccttgctaagcaaggcaaaatctccaggaggcaccattcacattgcattttctgtgaatggtgctctggggagcagcattcacattgccttttctgtgaatggcaaattcttccagttaaatataacatgaatagtgtcccctggagttgaccacccaactgatactgactgagaagctgaaatgaacaaaacaaccccttagccctccaggagctgaccggaaatccagtgctaatactactttgcatcttacagattagttcttttacaatactgtttttttttcttttttcatttcattttgtcctttctgtgactctgggatgagtctttttatgaggatcctcatataaagatggacatttaggattaaagaggatgaaatcctgacaaaatagggagtctcccctttagaaaattcctaagtaaggctgggggtggtggctcacgcctgtaatcccagcactttgggaggccgaggcggacggatcacctgaggttaggagtttgagaccagcctgaccaacatggagaaaccccatctctactaaaaatacaaaattagttgggtgtggtggtgcatgcctgtaatcccagctactcaggaggctgaggcaggagaatcgcttgaacccagggaggcagaggttgtggtgagccaagattgcgccatcgcactccagcctgggcaacaagagcgaaactcaaaaaaaaaaaaaaaaagaaaaagaaaattccaattttgaaggcctcatcctatattatgtcaaacatactgaaatgcagtaacgccccacattaaataagatttataaataactatacatatatataattcaatctaattgctgttaatagttgacatattgctacattt

SEQ ID NO: 1244500 - DNA, 4001 bp, Homo sapiens
ggacgtagaagtcatctgacttcgtcacccagagatgagcaggtcttttgttaaacactgaaaaaatgaaaatgcaaaaaatgcagaggccatttcttttacagccccagtcctgctgggttcaccaacgtgaaacctagcaggtttccaagagcgccatcctgccctgattctatcacctaaaaattcccctaaatcaaacttgagttttcgatgaaaatcttccaccatagatcaccatgaagcaagctcttttctgtacctagaatcagtacacatgactggaccccagatctctgtactagatgtctgaccccaggaggtcaaatctcacccgaggagtacacgtacagatagaaaatctaacacaatgcaacctcaactaaaggaagcagttctaagatttttttttttaaagatcaagtgtaagactcaattaagaaacctatttgcagccgggcacggtggctcacgcctgtaatcccagcactttgggaggccgaggcaggtggatcaactgaggctgggagttagagaccagcctgaccaacatggaaaaaccctgtctctactaaaaatacaaaattagccgggtgtggtggcttatgtctgtaatcccagctactcgggaggctgaggcaggagaatcgcttgaacctggaaggtggagattgaggtgagccaagattgcgccattgcactccagtctgggcaacgagtgaaactccgtctcaaaaaaaaaagaaaagaaaagaaaactatttgcacacaagagaattttttttttttgaaacagagttttgctcttgttgcctaggctggagtgcaatgaggcaatcttggctcactgcaaactccacctcctgggttcaagcgattctcctgcctcagggtcagcctcccaagtagctgggattacagccatgcaccaccatgcccagctaattttgtatttttagtagagacggtttcaccatgttggtcaggctggtcttaaactcctgacctcaggtgatccacctgcctcggcctcccaaagtgctggaattacaggcgtgagccaccacacccggccaagaattatttatccccttttttttaatattagcaagcctcaggtcagcatgttcttggcaaatgtttattttaaaagaccactgcctgaacaaattgctccaaagcctacttcatcatttacataacttcagtacttttccagaacacaggccctttgaaatgtgtaaaaagtgtttcgagtggctcctcttcccatgcctgagtgttactaaggattgcttcacagctttttctggcaggatgtgagaaacgctctatacacaaaatcccagcaacggtgattcactcacagccaggcttacctaaggaaaagacccctctgaactctccgacactcacatcctggggccgaaaccatgatataaacagcctctggagcttgaccgaagctccctgaacgcacacacagtccctcttttaacgtgtaagtgcacggtggccggggctcgccaacaagcacggtgtagacggggagcaaggactggccgggctgcgcaggaggcccgccggctggacccggccgataatggagcacgagccgcccaccctccctcaagaaggccagtgaagaagcacataggtcaggcgccgagccccgggaggcagaaatgggcccggaaaccggggagggactcgctgcggatgcccaggacgctggggccgggagtttgagcgccggggggccgggctgcagccgcgagggctgcactctcatcccggccgcccctctcacctcctgcgctggcggtcccggttcctgccgaggcggtcggacaggcgtcccaggagcgcggccagccctgggcggccaggcaggaggcccagcagtcgcctccagaacacgggtcccgccgcagctgccgccgccaccgccatggagactcgccgcttccgcttccgctcccggcgggcgcgaactttattgacaaaggcgagcgcggacacggctcaggcgcgcaggcgcggaacccctggctcggggagggcggcgctgcaccgcccccaagcctcagtttcccctctgggggacacaggcgaggaacagtggtcgcgccgcaggagggggtcggaagccggcccgttaaatccgtaagggcgccaggtggcctgcattcctgcagtcactcgtcacaggtcgcggaggaaaggatgcggcgcaggggctctagcaccgtcacgcttggctccaactcaccagctgtcaaaaaagcttttgtttgtttgttttgagacagagtctcggtctgtgtcccaggctggagtgcagtggcgcgatcttggcgcattgcagcctcgacctcccggcctcaggggatcctctcaaagtgctgggaccactcccaaagtgctgggaccaccaaagtgcgtgtgccaccatgcccggctaattctttacttttttgtcgagatgggggtctcactacgttgcccaggccggtctcgagctcctgggctcaagagatcatccagcctcagcctcccaaagtgttgccattacagacatgagccaccgagcctgaccactggctgtcaagattgactcctcggccggcgcagtggctcacgcctgtaatccctgcactctgggaggcagaggcgggtggatcacctgaagtcaggagttcgagaccagcctggccaacctgatgaaaccccgtctctactaaaaatgcaaaaaattagctgggcgcagtggcccatgcctgtaatcccaaactactcaggaggctgaggcaggataatcgcttgaacccaggaggtggaggttgcagtgagccaagatcgaaccactgtactccagcctgggcaacaagagcaaaactccgtcaaaaaaaaaaaaaaaaaaaaaaaaaaaggacttctcactgataagtgagggaattactgtttgaggctctaattgatagggtgttctttagacttgtacaacacccctaaggtgttaaacttgaacaaagtctgttcttgtacaaagtcttgtaacctggttaacgctgactcactaaggtgcacagaaccacggaaaatccccaccagactgagagaggaatcatttttcaccctgttagccccagaggctgcagctccatggcacagaacagcctaagcaaatctgtgtgagatgaacagtcttccaccctcctgatatgcccaagtacacagatatcactggcccctggcaacacacagttctatgcccaaaaagctgacggagcacatcctcatacaccaagaacactttttttttttttttttttttgaggcagggtttcactcttgtcacccaggctggagtgcaatggcgcaatcttggctcactgcaacctctgcctcctgggatcaagagattttcctgtctcagcctccggaatagctgggattacaggcgtgcgccaccacgcctggctaatttttgtatttttagtagagacagggtttcaccgtgttggccaggctggtctcaaactcctgacctcaagtgatccacccaactcggccttccaaagtgctgggattacaggcgtgagccaccgcgcccggcccaagaacactttttgcagctaattttaaaatggaaaactttgtggcattctgaaaggcaggagaggtgatctctgatctgtaatatgcagctccctggctgacccacataggctgggacctggaaactggaaaagctgtaggacataatcatagtctgccgtgttgtgaggttaaaatgatatggacacgtgggccgggcgcagtggctcacacctgtaatcccagcactttgggaggccgaggcgggcggatcatctgaggtcgggagttcgagaccagcctcaccaacatggagaaaccctgtctctactaaaaatacaaaattagacgggcatggtggcacatgcctgtaatcctagctactcaggaaggctgaggca

SEQ ID NO: 1244501 - DNA, 4001 bp, Homo sapiens
agggaaatccagacactgtgcggcagcatttgggtggtgcggcttcacttcaccttgacagaagccactggacacatccaactaggaagtgggctgggaagctctttttgaatacaggctctgagagaacctatgactgaaaggtcaggggctctgataacaatgcagtcctgtggtatgaaatggcaggaggtgagccctcttggccacaaacacattcactgacggcagctaccatcaagagtgtcacatgggctatgcagaccaacagaaaactcctaggaaagtgcagtgacccactgtccctccatgcctcaccattatataaggcagagttcaccacgcctcctgcaacagctaaggccaggccaaacttgccaatggactcaaacactttggcagccatgtttccttctgctggaccctctcacacctaaggggataaaaacaaaatacaatcaaacttgatgccaaatcctcagagaaggccctctctgacacacaacagtcacttttcaacctggctatttatttccccattcctgaaagtgctaaatcatccattgaaggatacctaataaataatgctttatagcttggaaagtgtactatcaattcttctgctttttttttttttcagtttcttttctttcctttttttttttttggagacagggtcttgctctgtcacccaggctggagtgcagtggtgcaatctcagctcactgaagcctcgacctcccaggctcaagcgatcttctcacctcaacctcccaagtagctgggaccacagaagtgtgccaccatgcccggctaattttgttcattttttgcagagatggggtcttgctacgttgccccaggtggtctcaaactcctgggctcaagtgatccccctgcctcggcctcccaagtgttgggattacaggcatgagccatcatgcctggctgatttctctttttttctcaaccatttaaagtaaggtgtctgggacacttggttcaataatgaaaacaatgcatgggcttgaaatccacagagaacttagcaccacactaaaccaccctctcatttcctggacaagtaggcccccaaaaagaggctgtgaggttagattggtgcaattatggtttgaaaaaaataacttaaaaaatgtgctacatgttgatgccaacaaaaaaagtaaccgtaacagctaacacttatatcaggtagcctaataaaagcaatttatttacttctcacaattaccctatgaagcatattactacagaggaaacagaggcacacagagaggttacatgagaagccgagattgcagttattaagtggtagaaccagaattagaacccagaggtctaatgctagcagacacagcttacctcctcaccatactgcttgtcaacatcgtgtattaagaacgacatgcttcttatggaagcaggagctggatgacatcctggggccaagataactgaagaacccatttgggagaaaggctctaactagctgcacagggacagtgagctctggaataactgggagggtggggctgaggcggggtgggcataagcacagttgacctaactagaaatcacgccagcatgtaactttctaacgctccgccccaccgtcgttgcccgctccagtctcaaatcctccctccctacttcccagacctcaactcctgagactaccctgatctcgtccagtgcatttaaatcttccttctctgaggctgggacacccggccctttacatttgtaatagcttctggattattcctcaccctgcctccatggacacctcccttactctgagcaacccctggctcgtcccgggctcagccccttctcccctccctcacaagtcggactcacgcacgcactctcctcgcccaaagtgcacatcatggagcagaggaggactgcagagatgcccagaaacgagcctttgccgccccctccattctcacctgcttccactctgacctccacatgaattccccaaccacacatactgcgcatgagctcctctgccccgcccgctttccaagatccacgcttcctattggtgtggaagagcgctgtgagttctgggaagggtggcttagaacctcaccctggttctgcggctcttagcagatgaactacaactcccaaaaggctatgcagcggcgggcccgcggagaaaagcgttttctctttggtgatcaacgcgaggatgttgccgcaaagccttttgggggctgtagttttctggggctaaatgcacgtgcctatcctgtacagaggctaagactgccgcaaggagagccttagggctccgggaaagaggaggtgggcgtccagctggtggcaaaaattagtaggggcaagttcatggctgatgaagaggacaggtggaactctggaggaagtcgtggtgaaatcaccggcaggctgagaccctttgggggaaacgaagggccgtcttccttccaaagccctgtctgcaaacgtcctcagagttgtgagacgttgattaccagacccagagagaaccatctgtgctgaaaaactgagaccaaccgagaggaaggaattcattcagggtcatgcaccgagtgagaaaaggggctcggcttggaatccaggtcccctagacatgattttagagaaacgttttatttggaaaagttgcaagaatagggcaaaagaacgcacgttaaactttggctcagattcacctattgttaacaatttgcttcatttgttttatcatttgtttcttacctctcccctcctcctccctgccgccactccgccgccccacctccgtgtgcgtgtgtgtttattttcttgtttttgttttgttttgttgtttgtttttgagatggagtttcgcttttgttgcccaggctggagtgcagtggcgcgatctcggctcaccgcaacctccgcctcccgggttcaagcgattctcctgcctcaccctcccagaatagctgagattacaggcatgcaccaccacacccggctaattttttatttttgtagagacggggtttctccatgttggtcaggctggtctcgaactcccgacctaggtgatccacccgcctcggcctcccaaagtggtgggattacaggcatgagccaccgcgctcagctctcattctagtttttacctctataagatcaactcttttagcccccacataggaataagaacgtgagggctgggcgtggtggtcacgcctgtaatcccagcacttcgggaggccaaggacagaggattgctttagcctaggagtttgagactagcctgggcaacaaattgaaaccctgtctctacaaaaataaaaataaaaagtacctggatgtggtggcatgtacctgtagttccacctattcgggagccaaggtgggaggattgcttgagcctgggaggtcaaggttgcagtgagctgtgactgtgccactgcactgcagcctgggtgacagagcgagaccttgtctcaaaaaaaaaaaaaaaaaaaaaaaaagtatggtcatttttaacaatattaattcttccaatccaccaatccatgaacacgagatgtctttccatttgtttgtgtcctcttcagtttctttcatcagtgttttgtagtttttattgtagaggtctttttcctccttgattaaattttttcctaggtagtagggttgctttcttgatttctctttcagctaattccttattggtgtacagaaatgctagtttttgtataatgattttttatcctgcaactttactgaatgtatcagttataagagatttttggtgaaatctttagatttttctatatactaggtatcatgtcatcttcaaagggggcaatttgattttttttttttttaagactactcaagtgcagtagtgagaagtggggaaagagtagaacaaggagttcaatctgtaacttactgtgagattgagataactcactacattcgcactggcctgacttcct

SEQ ID NO: 1244502 - DNA, 4001 bp, Homo sapiens
cttcaccttgacagaagccactggacacatccaactaggaagtgggctgggaagctctttttgaatacaggctctgagagaacctatgactgaaaggtcaggggctctgataacaatgcagtcctgtggtatgaaatggcaggaggtgagccctcttggccacaaacacattcactgacggcagctaccatcaagagtgtcacatgggctatgcagaccaacagaaaactcctaggaaagtgcagtgacccactgtccctccatgcctcaccattatataaggcagagttcaccacgcctcctgcaacagctaaggccaggccaaacttgccaatggactcaaacactttggcagccatgtttccttctgctggaccctctcacacctaaggggataaaaacaaaatacaatcaaacttgatgccaaatcctcagagaaggccctctctgacacacaacagtcacttttcaacctggctatttatttccccattcctgaaagtgctaaatcatccattgaaggatacctaataaataatgctttatagcttggaaagtgtactatcaattcttctgctttttttttttttcagtttcttttctttcctttttttttttttggagacagggtcttgctctgtcacccaggctggagtgcagtggtgcaatctcagctcactgaagcctcgacctcccaggctcaagcgatcttctcacctcaacctcccaagtagctgggaccacagaagtgtgccaccatgcccggctaattttgttcattttttgcagagatggggtcttgctacgttgccccaggtggtctcaaactcctgggctcaagtgatccccctgcctcggcctcccaagtgttgggattacaggcatgagccatcatgcctggctgatttctctttttttctcaaccatttaaagtaaggtgtctgggacacttggttcaataatgaaaacaatgcatgggcttgaaatccacagagaacttagcaccacactaaaccaccctctcatttcctggacaagtaggcccccaaaaagaggctgtgaggttagattggtgcaattatggtttgaaaaaaataacttaaaaaatgtgctacatgttgatgccaacaaaaaaagtaaccgtaacagctaacacttatatcaggtagcctaataaaagcaatttatttacttctcacaattaccctatgaagcatattactacagaggaaacagaggcacacagagaggttacatgagaagccgagattgcagttattaagtggtagaaccagaattagaacccagaggtctaatgctagcagacacagcttacctcctcaccatactgcttgtcaacatcgtgtattaagaacgacatgcttcttatggaagcaggagctggatgacatcctggggccaagataactgaagaacccatttgggagaaaggctctaactagctgcacagggacagtgagctctggaataactgggagggtggggctgaggcggggtgggcataagcacagttgacctaactagaaatcacgccagcatgtaactttctaacgctccgccccaccgtcgttgcccgctccagtctcaaatcctccctccctacttcccagacctcaactcctgagactaccctgatctcgtccagtgcatttaaatcttccttctctgaggctgggacacccggccctttacatttgtaatagcttctggattattcctcaccctgcctccatggacacctcccttactctgagcaacccctggctcgtcccgggctcagccccttctcccctccctcacaagtcggactcacgcacgcactctcctcgcccaaagtgcacatcatggagcagaggaggactgcagagatgcccagaaacgagcctttgccgccccctccattctcacctgcttccactctgacctccacatgaattccccaaccacacatactgcgcatgagctcctctgccccgcccgctttccaagatccacgcttcctattggtgtggaagagcgctgtgagttctgggaagggtggcttagaacctcaccctggttctgcggctcttagcagatgaactacaactcccaaaaggctatgcagcggcgggcccgcggagaaaagcgttttctctttggtgatcaacgcgaggatgttgccgcaaagccttttgggggctgtagttttctggggctaaatgcacgtgcctatcctgtacagaggctaagactgccgcaaggagagccttagggctccgggaaagaggaggtgggcgtccagctggtggcaaaaattagtaggggcaagttcatggctgatgaagaggacaggtggaactctggaggaagtcgtggtgaaatcaccggcaggctgagaccctttgggggaaacgaagggccgtcttccttccaaagccctgtctgcaaacgtcctcagagttgtgagacgttgattaccagacccagagagaaccatctgtgctgaaaaactgagaccaaccgagaggaaggaattcattcagggtcatgcaccgagtgagaaaaggggctcggcttggaatccaggtcccctagacatgattttagagaaacgttttatttggaaaagttgcaagaatagggcaaaagaacgcacgttaaactttggctcagattcacctattgttaacaatttgcttcatttgttttatcatttgtttcttacctctcccctcctcctccctgccgccactccgccgccccacctccgtgtgcgtgtgtgtttattttcttgtttttgttttgttttgttgtttgtttttgagatggagtttcgcttttgttgcccaggctggagtgcagtggcgcgatctcggctcaccgcaacctccgcctcccgggttcaagcgattctcctgcctcaccctcccagaatagctgagattacaggcatgcaccaccacacccggctaattttttatttttgtagagacggggtttctccatgttggtcaggctggtctcgaactcccgacctaggtgatccacccgcctcggcctcccaaagtggtgggattacaggcatgagccaccgcgctcagctctcattctagtttttacctctataagatcaactcttttagcccccacataggaataagaacgtgagggctgggcgtggtggtcacgcctgtaatcccagcacttcgggaggccaaggacagaggattgctttagcctaggagtttgagactagcctgggcaacaaattgaaaccctgtctctacaaaaataaaaataaaaagtacctggatgtggtggcatgtacctgtagttccacctattcgggagccaaggtgggaggattgcttgagcctgggaggtcaaggttgcagtgagctgtgactgtgccactgcactgcagcctgggtgacagagcgagaccttgtctcaaaaaaaaaaaaaaaaaaaaaaaaagtatggtcatttttaacaatattaattcttccaatccaccaatccatgaacacgagatgtctttccatttgtttgtgtcctcttcagtttctttcatcagtgttttgtagtttttattgtagaggtctttttcctccttgattaaattttttcctaggtagtagggttgctttcttgatttctctttcagctaattccttattggtgtacagaaatgctagtttttgtataatgattttttatcctgcaactttactgaatgtatcagttataagagatttttggtgaaatctttagatttttctatatactaggtatcatgtcatcttcaaagggggcaatttgattttttttttttttaagactactcaagtgcagtagtgagaagtggggaaagagtagaacaaggagttcaatctgtaacttactgtgagattgagataactcactacattcgcactggcctgacttccttttttccaatttggatgccttttatttctttctcttgcctggttgct

SEQ ID NO: 1244503 - DNA, 4001 bp, Homo sapiens
aaatggcgctgagaataaaaatataatttaaaggcaggtcgccatattgtaaacagagaggcaaagaagaggcggactcgagagacaccctccacgattttttctacagccacaagcgcccggttgccggggtctggaccagggcaactcaggtggccgagggctccacgcacccaccccgaggagatcccggccgggcaggagccccgagggcagcgggcgcgcgggcaggcaagcggcactgggcccggagctcctccccttcctcccccgccactgccggctgtccccggccggctctgtcccggctccccagcgacttccaatcccatatggggttctcttcactcgtcccaacccccacctcggggtccggacccaccgctgctcctccccgctaaactgccagaacccggcggacacctgggggcggggaggtgctcgccccggcagctgcagaaagtcagctagcggctgcaagcgcccgttatttcggcagtcaggggcaggccgggtgaaggaatgcgcagagaagggtccgccaagaagctccaaaagggtccccagaccttaccagcactggaggtggaaggcagccgggcagtggtcgcagcacaggagatctccaccttccttgcagctatcgcagctgtcgtggttggtggccctgccgcttctccggggctccttctcaggcttccgactgcgcttttctgcctcgtccgtcttggggggagccagcagagcttggatttgctgcacacacatacaaacggcgtgtgtgcacactcggagctcccgggcggtccgtcgcccccccggcgcggtttctccgtcacccacccctctccccccttttgtccttcttcctcccatccaggctgctcccagaatctctcagcccccggaaccagggggagcccaccctaaccgcgttcctgcagcacaacaacgagaacagcttcttccaaatggggaggatcaagggtagggggatgggaagagggtgcgcggttcccttcttgccacttccttgtatggacagtgggggactccaaagacccgctcgggagaggcccaaagcccggtacccggacgtgctgggggaagcacaaaggggccaacaagaagggggtggggaggcctgccggtgcaacgagatggagtgggctggcgcctcgggagagcgaatcgagggcggcgggtaggtgaaactgctgcaaacgtcctcggaggctgagctcagccccctaaattgcaaagaggggagggagaggctaggtgaggaagaatccccctccctcggccatctaggcgcttcgagtttaggactggctttgtggggcggagggcggaggttccctcccggcgctggaggaaggagatgaggagggccactcttacctccatcagcccccctgatgtgtccaagtcgtacacgatcgtcttggtctccattttctcccacattcatccacctcccgggctgggtgctctctgctccggcccccccaaccccggggggaggggggaggtgaggggagggggcgctcctgaccccggccccgcttttttcccaatacgggtcccgacttcctcgccctggctcccccccaccccccggcccccagtccccgggacgacagcgtcctcccgacgggccgcgaggggggagcggcccctcagtcccggcccggctgctggctgcacagtgggtcccggctccgggggtcaggcctcggcggggcctagtcccacaggctaaagccggcactggcgacagccggtccggccgggaaggctggcgggcgctgccatcccggggctgggggtatcggagggggggtgagaggttacgtgaggttgtggtacgtgaggtgactggggggagggtgatggggggtggtccccgggctccgcctctcgccgccgccgccgtctgcgtcccggctgccgcgcacttggcgcaaacttaccgcgagcgcccgcaaagccacccgcgcaggcgccccgggatcggcgctcgccgcgcgcaaccgcagtgacagccggcggcctggctcccgcgcagccgcggtgagggagtaccccccagcgcgcagccgcgctggcattcgtctggaggaccgaagccccacctttctgccctgcgccagcgcactgagacaaaagggcgggacctgaggtctcgcgcaggcgcttgagaaagcttgtaggggtcaaggcgcagccgcaggaagctagggactgttcatccattggtgtttgtgtgcaaactaagacgactctgttctgcgcaggcgtgttgggggtgctcccccttcctctccataacacagacgcctcccgcgcaggcgtattgccttccgcaggccctcacaagaaagctgctcctttcgccattttggtaatgggatatgggctatcatgcccttggagtcctcaggcatgaacagaaaggagcaaggtgtggtgttggatggagctggtcgcctgtcggtgacagcagtattcctagggatgttgtacttgaccgtttggttctaccatcgggtgtggctggaccaggccaccatattggtaaagagaaaagccatttgagacagaaaatgacgcttttggaggcgtgtgggatgactgtggttcctaattctctcccgctcctgacagataattttatcagttaattgtatcctcagcatccctgccttgcgtggtggtggcactggagagttccgcctgcccgttaccaccctctcttcaccactgtccctgagatctgctcttcaagaggaagcctaaagtggagagtttgtaatcctgacaacgcccagctacctgcgtaccccggactccaactcccagtttgcaacgccaaagggtctaaagggcgaacgggggcgcattgcatcctgggagcaagaatcgcgataggtctgatggattgtgggaactgtagttccatgtgcgtgcgatgcactctatggtaggatagacccggggaagagtcatttgccggccaggaagggatacttttgagagcgtcagtgctgcatgccgggatttgtagtctgagggcccgcctcgcattctgggcggggattcatgctccttttcagggcgcccgctcctccccttggtattgccgtcagagatgggcggttggttattgctgcctgatggtggatgaagcagtggaaaagagaattgtatcgttgtgcttgacactaggggtttagttggaattgttgcttcgtagctgtgctcggcccacttttaatgttaagggacacagcattctcagagtcgtcaaactagcaagggtttagagaccatctgatttaatcccctcttttccagatgcacagggaggcgcagtgatttgcctaggtcacatagtgcatttatggcagacctaagaattggatttcttgattctcaagccagacactgtccattacactatgtcgactgtgtctaaggaattactatgcttgctttggggacagtaaggaggatgagttagacagagtggggatgtcagtgtatggagtcttaggtttctgttttcctgacttttcgcttttctgatgaccctcttggtgcctggaaagaatgataaggtcatggatggtggggtggagaatgtcatgtgaattggctgccctctgctttctaccattctgagccaacaataaacttcaggagctgtggaccagagatgtggccatcagagaggggagggctgagctagattgtttgtatgaaagaggcaagattttctatctcctatggctatattttatgtcacaggctctcagagtttagaacctcatgtgccctctctctttggctttttttcctactgctcagggcccagctgtgctgctgtgttaacctggaggcattatggaacaggtaagtaagccattggcatccatccactggacaaggctttgctttgatcaacaccatcaattgcagctgataataggaactat

SEQ ID NO: 1244504 - DNA, 4001 bp, Homo sapiens
aaagccacacagtttaagaatggcattcccagaaacacagtccctaagtgaggtctagaaaaggggggcggggggcgttgtcaggcagggctactaggctgcaaaggtaaggcaaacctcacctgagtctctggcttaagggtcggaggtggatctggaaaagcaataaaagctgagtcaagacactaggaacaatctgtgtaaaactccccctctaaaccccgttgttcctaagtgaaccccctgctctcccaggtccctctgccaggccagcaggcccccagctgtgttggatccgccccggctcccccttccgccccgcgaggggcggagcctgggcgcggcgccctctgaggcctcgctatagcgctccccttcccccaaccggaggcccggcgccccgcccccccaactcacggtctctctcgactccagtctactcggatccctcagcgccccaccccaccgtaccgctcccggggccgcgtccgggccgccgccagccgcccccgtccttcacacgcgcccggagccccgagttcctacccggccgcgctccaccgcctcgggccctccgagaccgcacacgccgcccgccagcccccagggtccaggatgaccacgccgaaccgctccccgccctccggccccttctactcgagcacgcggcccggcgcgcccctcacccccaccccagacacacacaggcacacgcatccaacgctacttcacggccgggacagacccgggagctctaacccggacgcggcccccacctgcccccccccccccgcccataccgcgctccccacaatttcgccgtccctccgcccccatccggggctttggcccctccccgtctccagcttttcgggctccccaccgggccccccggccctgttcctagccctctccggccgccgcccccccctccgcccccgtactcaccacccagttactaggctatggacccctcaactctggccccttccccccaaccagccactctctctctctctccacagcagccaccgctgctgccgccgatgcccccctcaccctcagcaactcccaggctcttaaccctcgcggaccaaccctacccccccgcccgacaagtcgccggtcttaaccccccccaccccgccccaccaccccctacaactacccagctcgcctcgcttcctggctcgctctctccacaactaccccccggtacaggtccgtctgccgtagacaatacccagaccccctcttctccccacaactacctgcccacctctccgacaatcaccgggcattctccggcggcaactactcggagctccggtaccaccgccacaaactaccccacctcggcgaactaccgggcccctcactcagcctcttctacgtcctccctcctgagcaactctccggccactggattcccctaaccttccagttccagggccccaatctgccggtggccctttcgggccctaacccccgaggctccgggtttcaagctcctatcccccgcacccccacaccgtctgatctccaactaccccagcccagtttcccactcctctttctccaaggtctctcaactcgtcgctctcccacctccagggccagcctcccgaccccctccccgaactcccccgctgggctccggggctcgacctccaagtttgccaattgattcctcgcccgccccccgccggctcagcgctctgcaccggtcgagagctcaccttcgggactgggctccgccatggcttccagcatcgccccctcccctcctcccggtccggcgcccccctccccggagccggggatcccggtgccgcctctagtgctcgatgctcccactgcttcgctccacagaagtgtccgcctcagcccggttgagactcgagtccgctagccgctgccgccacctccctctaccactgcctcccgcactcccggaccgggccccctccccccgcgccgccggccgcctgctccctcctcctcctcctccacctcctctctcctccctccctcctcttctctccctcctccccccgccggcgccgaggcgcagtgcaccaagggttttgtagtccgtccgggaacagcggaaaagggaccgcatgaacctccggaactttgattcccagaaagccacaggctggcgcaggcgcaccaagccgctcccctcccccggggagcggcggggagaccaggagccggaggggagagcggaagtgcgcgcgcaggcccctgggagatgtaggctgggcgggaccaagaaagaagaggaagaagggattagaactctcggccaccatactgcctcgttctgcagcttctttctccccaggaggaccgccccacttccggcctgccggagaaatgattgctgggagttgaagtattcctggcgataatggctcccgctcccagtcttctccctccctgattccactctgccggatcccacacaccggcaaaagtctagccaagtgacatgcaactgagaacagccgttttactagcttgcacacatgaaaatatcttagttagaatgttctagcaaatgtggatgttcacctaaagcaggtacttcggaactttctccacaggaacccacagtaaaaaaaaatttttttttacatgagcatttttaacatttagtttcacatgcgtgttataaaactaaagtttcaagaaataatcctcagtattccattccatcacaacaaaagcaccctctttttgcagacagggaaaagcccaacatgaacagaataaaccaaaatatacttctatccctccagcttgtacccagtactcttctttccccaccactgaaacccactgacaccttggaaagacttaaaatcagcgggacgaggggagcaacacaaggcaaaattcagttcagcttggtggtttcctctttattgatgtgcctcctaccttccccccacaatttcagtcccttccaactacccccaaaaaagaaggtagtgaaaggaagggattgctggggttctgagccccttgggcagtcagaaagggaacagaaaccaaaacaatcactggatgtgacacagactgacaatcaagaagtctacagcaggatgggaaaggcgggcagagaaaggggaagaaaggagaaaggagagttacaagatgccaactccaccattacccctcctaagagaggctggagagaaagccacaaacattaagaagtgccggtcctgaataagggaggtggtgtttgagcttgaaggaggaggaggtcaagaaaggggggccacctctctctttgtagaatgagacccccctccagctcaggggcagcagcttcacagaccgtagacactttcgtcactgtaggcaatgtagagaaagaagtcttcttcatggtgttcctgggatgaaagcagaaaactgttcagcaactgggctccagtaacttaaaccaaccacgacccagacacgttcttctagaaccacaaaccattgcctgactccttcactgactccaaggcctaccacacgagcagtataatctctgcagtcctgggcaaaaaggcctcaaactgttttctgctgctttggaatggggagggggactgggaagagtcccgaacagatagtttctctagctcactgttctctttccttctctctactcctactgttctgtccaaacccccaacccacggctattatgaaactttaaggcaagccaggaagctagtccaaaactactgatgtaacaacactttcttcccctcacgctcttccaagattcctctccaaagcctccaccacttcccagtcaccatacctggtacagctgacccattgtggcactggtgggtggaatgacattgttgacaaagaaaaacaaggcatcctcagctcggagatgaattcgcttccggatcaagaagtagaactgaccaactgcaaaagatacaagatgcaagaaagtcacagaggtcaaaaatgcc

SEQ ID NO: 1244505 - DNA, 4001 bp, Homo sapiens
agcatgtcctcttgaccagtccgtgttacctctaccctcaagtctgacacctcaccgctgcccctgcccagggcctgtggaacactgtatcacccagaccggagccgttatgtccttagctctttttctgtatagcctcatttgttaccattttcatctccctaaaatttatccataaacaccttccattcacagcacctcaagactatgccaaaatctcaaccagcgactccaaatcccccttccttttcactgctgttcaagctagctatcccggccatccactccccgcataccagctttcctaccacagccctaagagtctccaacttccctggtcttacatataatttctaagggcctccttctataaagcaatacagttctgtttgaacaacagtcactctatagtcccaccacaccagcctcaagtcagtaattctcttgcccctacctctttgctagggggaatgtaaccagcatatgccaaaacaaaactgcagaatttgttgaaatcctcaattgttctccgccgtttctctggtggctgaaaggaaggagatatggatcacatgcaaagccacacagtttaagaatggcattcccagaaacacagtccctaagtgaggtctagaaaaggggggcggggggcgttgtcaggcagggctactaggctgcaaaggtaaggcaaacctcacctgagtctctggcttaagggtcggaggtggatctggaaaagcaataaaagctgagtcaagacactaggaacaatctgtgtaaaactccccctctaaaccccgttgttcctaagtgaaccccctgctctcccaggtccctctgccaggccagcaggcccccagctgtgttggatccgccccggctcccccttccgccccgcgaggggcggagcctgggcgcggcgccctctgaggcctcgctatagcgctccccttcccccaaccggaggcccggcgccccgcccccccaactcacggtctctctcgactccagtctactcggatccctcagcgccccaccccaccgtaccgctcccggggccgcgtccgggccgccgccagccgcccccgtccttcacacgcgcccggagccccgagttcctacccggccgcgctccaccgcctcgggccctccgagaccgcacacgccgcccgccagcccccagggtccaggatgaccacgccgaaccgctccccgccctccggccccttctactcgagcacgcggcccggcgcgcccctcacccccaccccagacacacacaggcacacgcatccaacgctacttcacggccgggacagacccgggagctctaacccggacgcggcccccacctgcccccccccccccgcccataccgcgctccccacaatttcgccgtccctccgcccccatccggggctttggcccctccccgtctccagcttttcgggctccccaccgggccccccggccctgttcctagccctctccggccgccgcccccccctccgcccccgtactcaccacccagttactaggctatggacccctcaactctggccccttccccccaaccagccactctctctctctctccacagcagccaccgctgctgccgccgatgcccccctcaccctcagcaactcccaggctcttaaccctcgcggaccaaccctacccccccgcccgacaagtcgccggtcttaaccccccccaccccgccccaccaccccctacaactacccagctcgcctcgcttcctggctcgctctctccacaactaccccccggtacaggtccgtctgccgtagacaatacccagaccccctcttctccccacaactacctgcccacctctccgacaatcaccgggcattctccggcggcaactactcggagctccggtaccaccgccacaaactaccccacctcggcgaactaccgggcccctcactcagcctcttctacgtcctccctcctgagcaactctccggccactggattcccctaaccttccagttccagggccccaatctgccggtggccctttcgggccctaacccccgaggctccgggtttcaagctcctatcccccgcacccccacaccgtctgatctccaactaccccagcccagtttcccactcctctttctccaaggtctctcaactcgtcgctctcccacctccagggccagcctcccgaccccctccccgaactcccccgctgggctccggggctcgacctccaagtttgccaattgattcctcgcccgccccccgccggctcagcgctctgcaccggtcgagagctcaccttcgggactgggctccgccatggcttccagcatcgccccctcccctcctcccggtccggcgcccccctccccggagccggggatcccggtgccgcctctagtgctcgatgctcccactgcttcgctccacagaagtgtccgcctcagcccggttgagactcgagtccgctagccgctgccgccacctccctctaccactgcctcccgcactcccggaccgggccccctccccccgcgccgccggccgcctgctccctcctcctcctcctccacctcctctctcctccctccctcctcttctctccctcctccccccgccggcgccgaggcgcagtgcaccaagggttttgtagtccgtccgggaacagcggaaaagggaccgcatgaacctccggaactttgattcccagaaagccacaggctggcgcaggcgcaccaagccgctcccctcccccggggagcggcggggagaccaggagccggaggggagagcggaagtgcgcgcgcaggcccctgggagatgtaggctgggcgggaccaagaaagaagaggaagaagggattagaactctcggccaccatactgcctcgttctgcagcttctttctccccaggaggaccgccccacttccggcctgccggagaaatgattgctgggagttgaagtattcctggcgataatggctcccgctcccagtcttctccctccctgattccactctgccggatcccacacaccggcaaaagtctagccaagtgacatgcaactgagaacagccgttttactagcttgcacacatgaaaatatcttagttagaatgttctagcaaatgtggatgttcacctaaagcaggtacttcggaactttctccacaggaacccacagtaaaaaaaaatttttttttacatgagcatttttaacatttagtttcacatgcgtgttataaaactaaagtttcaagaaataatcctcagtattccattccatcacaacaaaagcaccctctttttgcagacagggaaaagcccaacatgaacagaataaaccaaaatatacttctatccctccagcttgtacccagtactcttctttccccaccactgaaacccactgacaccttggaaagacttaaaatcagcgggacgaggggagcaacacaaggcaaaattcagttcagcttggtggtttcctctttattgatgtgcctcctaccttccccccacaatttcagtcccttccaactacccccaaaaaagaaggtagtgaaaggaagggattgctggggttctgagccccttgggcagtcagaaagggaacagaaaccaaaacaatcactggatgtgacacagactgacaatcaagaagtctacagcaggatgggaaaggcgggcagagaaaggggaagaaaggagaaaggagagttacaagatgccaactccaccattacccctcctaagagaggctggagagaaagccacaaacattaagaagtgccggtcctgaataagggaggtggtgtttgagcttgaaggaggaggaggtcaagaaaggggggccacctctctctttgtagaatgagacccccctccagctcaggggcagcagcttcacagaccgtagacactttcgtcactgtaggcaatgtagagaaagaagtcttcttcatggtgttcctgggatgaaag

SEQ ID NO: 1244506 - DNA, 4001 bp, Homo sapiens
gcgacagcgagactccgtctcaaaaaaaaaaaaaaaaaaaaaaattagctgggtatggtagcttgtgcccatagtcccagctacttgggaggctgaggcacgaggatcacttaaacccaggagacagaggttgcagtgagctgtaatggtaccactgcactccagcctgggtgacagagggagtaaccccatccccaacacacacacacacacacacacacacacaaaactcctcatttctcatcataaaatacagttacatttttctgctaataatagtatctaggggattcagttaaacacttattgtttggtgagttgcccttgtttctttcagtctccaaggcagaaagtcaggcatcttgggtttcttccccagaaaactgagaaggccatgctgtgacacctcgtccccaccccacaggagtcagaggaaccccttccccagttggaatttggctcctgtgatgctccaaaaggtctctcacctctgacacctttgttctgagtcatcaaatccttttgtggtcaccaaacagagtccctcagagtagggggcaggatctgagcttctctcacaggccagagcagggagaagggcttctggggggttgcagggagtccatattctagtcccacctaaaagcagtgcctgcctccttaattctgcaccgggtcacagatccctgcctgcttctcccgcctttcacacaaatgctcttagattaaatctgtgggaagggggtgggagggaaacaggcccctctctgatacaggccctaagtttcaaattcccctcttactgggcagatggagttcctagaaaagttttgggatagttttccaaaggaaatgtgcagaatgaggatggggaggcgaggactccagaaagaccacagtaacaagccctctctgtccaaaaacaagtctccttgtatcaatcactagaaatcagatccaacaactaagctagaattccctccctttcccagacagtgctcccaaacatgaccatcttccttgctcaccacgcccgagcagcagataggaaaaacagaggcccagagaggtcaggctaacatcctaggggtcacacagcatcggaaccgcgattagaactcaggagtctctggcgcctcttgggagaattgcagctggagctccccccttggccctggagactccagtgggcagggagcttgcggtcctgaccagctggcggtggtggccctgcgccctggtgccagtgaggcgtctgggtctagcagtcacctctgggcactccctgggtgggaggacaagctgggaggggatcctaggggcaggggcaggggcagggaggtggcagctgccggtagggttgggggagagatatttttagaggtgactaggaagccagcactctggcgcacccccggctggcgggcgctgggctccaatgcgggcggggggtgcgcggctcggggaggggtattgtgggtggcagggagcaaggggacaccaattccttggctttgtcagagtcggggacggagggataccccagcactatgttcctgggtaggagagagaaggggactcactcctgagctccagaactcccccagtgccacgcgcgtgaaggagcgccttcaaactccacagcccccaccccgcgccgggaccccagccctcccctatctcccggagcccaggactcacgtgggggcggcggcagcagaggtctgtcccggctgagtttggagtgtaagaagtggggaagggggctagctgaggtattggggcgcaggatggagcaaggggtgcttacgggaattggaggggacgcggtgtcttatccacccccggatttctgggctccggctcacgagtccctccagtcccgagggactgaggatgatgtgcgtctgagccgtcccctccacttgcccctcatcccccccgggcagccgccgcgtcccctttaaatgcccgggagccggagccggagccggagccgcggccggcgctgcggctgctgcagcagcggagcccaccgcagtccccaacgtcacaagcgactgtccaatcgcagcggtgccggcgcacatcaaaggggcgggccgcccgaggccacgcctccctcctgccccggaggctccgggagcgccagctaaggtgggattaggctctcggggaaagggtagcagggtggggatggagcgctgcccttccgaggaacgtgggtgggggcaccctcactagagcggctgtggacatacgctaaatccctgcctacacacccaaaattgctagggctgtggactttctcatccgccgcctccagggcttcggttcttgagatttgcagaagtgcacctccacctcctgcccattccgctgtcgcgtcctaaacccagtgggaggcacgggatgacccagccctcgggacccttttccccagattataggttactgaggattgcgggggttggcgggaggaatgactccctacccccacccccgcccgtaaagttggtggagcgggtggtgacagacagtttgccccttttgcagatggccctataaataaaaaacgcactttctcccctgcttcctaagagtgtgtttctcccccaccctaatctcctccttttggccctcaaagcctgctagtgaagagaaggagagaagatagtgtttcgagaggaaagacgtgaaactagtatttactgagaacatactatgaaccgggcattcgagctaggtcgctgcgtttatggctgaatgttcacaacactcgagaaattatttgcctagccgttcaaacccggacacacctgactccattgggtcacaaaggggtgtgtaggtggggagaatgcactttgggaggccaaggtgggaggatcgcttgagccccggagttcgagaccagcctggacaacatagggagaccccatctctacaaaaaattaagaaattagctaggcattgtggcatgtacctgtagtcccagctctactcgggaggctgaggtgggaggatagcttgagcctgggaggtgaaggctgcagtaaactgtgatcacaccaccacactctagcctaggcgaaagagtgagaccctgtctcaaaacaaaacaaaataaaacaacaacaaaaaagagtgagcttgtctggggtcacccagctggtagggctggggtatcatactgtccctctcattgtctgtcatccctcctctcctgtaagcaacatgaggaccatgtttgtcttattgatgtacccccatcccctagcataggcagcctggctggtgcacagtgggccttatagatgtttgttgagtgaggccaggtgcagtggctcatgcctgtaatctcagcactttgggaggctgaggcgggtggatcattagaggtcaggagtttgagaccagcctggccaacatggtgaaaccccatcactactaaaaatagaaaaaaaaaaaaaatagccaggcatggtggcatgcactggtaatcccagctactcgggaggctgaggcaggagaatcacttgaacccgggaggcagaggttgcagtgagccaagatcatgctgcactccagcctgggcgacagagcaacactccatctcaaaaaaaaaaaaaaaaaaaaaaaaaaagatgttgaatgaaacaagtcccctgctgtgtttagctctaggttagtgctccatttgtgttccttcactttgtcttcacaataacagattgttccagtgttatccccatgttattttattttatttatttttgagacagagtctcgctgtgtctcccaggctggagtgcagtggcgtgatctcggctcactgcaacctctgcctcttgggttcaagcgattctcctgcctcagtctcccaagtagctgggattacgggcacctgctcccatgcccagctaatttttgtgtttttagtagagacggggttttaccatgttggccaggctggtcttgaactcctgacctcaggtgtt

SEQ ID NO: 1244507 - DNA, 4001 bp, Homo sapiens
gggcgcctgtagtcccagaaagaagggcgtgaacccaggaggcagaacttacagtgagccgagattgcgccactgcactccagcctaggcgatagagcaagactccgtctcaaaaaaaaaaaaaaaaaaatttataaaaaatgtcagtcaatgctacagaaagtagtatattaagacagatactctcattagtgccagtaagaatgtaaataggtaggccaggcatggtggctcacacttgtaatcccaagcactttgggaggccaaggcaggtggatcactagaggtcaggagtttgagaccagcctggctaacatggtgaaacctcatctctactaaaaatacaaaaattagccaggtgtggtggcatgcgcttgtaaacccagctacttggcaggctgacgcaggagaatcacttgaacccgggtggtggaggttgcagtgagccgagatcacgccacggcactccagcctgggcaacagagcgagactatctcagaaaaaaaaaaaaaaaaaaagagtaagttggcattttgtttttgggaatgtgttttgcaatgcaaagcctaaaaacagccaattttaaaaattaatactcatgaaataatataaaatacataaagatgttctctgctctttgcaataaactaggaaaaaaccctctgaatgtacaaacaataagggatgattaaggtttatcccgatgaagccatttaacaggctatacatttagatctaattaatataggtagatgtttaaagtttcatgaggacactgctcttatctagctttccacttttgtatccctagggcatagaataaggcctagcacataaatgtttaataagtatttggtaaataaatgaaaaagtaatgtcgagtaaaaacgatataaaattttataaaatgtgatttctgtgaagaagctgtatagaaaaagaattggaaagacacacaaacaaatgggaaaagaggtcatgggcaatttaaaaaaatagctttattgaggtatactttgacatgccataaaattcacccattgtatgtgtacaattcaattacttcatttatacaactgttcaattatcaccatattccagcttaatggtcaatatttgctttgtcatttgatcttttctctatggtaagcaaaaatctattatttgaaaggttccttcactgaaagctgggtggagttgaactctaaaattacctacaaaattactttctatctagtcatctatgtctaattcttcaatttgacacatgcatgttactagcacaagctgcattttaaaggcagcaggaaggtcttttactatcattagaagttaactttaaggattgagcaggcacgatacagcatagattgtttcgtgtgctatatagtaaggtcaatattcttgctccttctacaaataaaaaaaagttccacagaataacaagtacaggtggagttcccaacggaaatgcaggtactgaatacaaccaactgcaactgtttctctgctcctcaatcctgctggcgtagtacgcgagctgccgacgtcccccaacccaccaggtaagccggccgctcctgtccctaggctgtgaggggttcagaggtaagaccttcggtgtattcacttagctccctacggaaaacttcgagaagaaggcgactgagatcggttagcacttaaatccctttcaaagccccggctcccatcgcccctcctatggcctcctacctgcagagaagcaaagcaggtacacccagtgccttaggcgggccaagcctagcactgtgggagcaaaaaacatggcttcatcgtcagggtgcgctatgaccagcagggtccggctttcggctcccagccgtcctccctgctcccgactcttcattcgttctgaggagtcccaaacccagaggaagccccatgccaagaccgccaacgccacacacaggagccacattgcttccatgatgggtaagcagcactgagcctgcgcagtaggaaaggctgcctctgaccctgactccggctggaaaacttcaccggggaatgttgggttccgctgttaagtccctcccgccgacatgctccggaagcttgaggttttaacgttaagggttctcttgtgttttaacacagaagtctccatgccgtccagtttcctaccctagtcctaccacactgtacaatcggtttaaaaggaagcgtcttatatataagctcccacttataggaagagttccttcctcttcattttcgaattcatttcttaaaactcgggcctttctcgtaattatagggttagacagcccgttatccgtatgacagttttccaaaatagccagttacaccaactttgttattccttctcacttttggatggctttctttacctttttttttttttttgagaggctctgtcgcccaggctggagtgcagtggagcgatctcggctcactgcaacctctgtctcccgggttcaagcgactcttctgcctcagcctcccgagtagctgggactataggcgcgcgccaccacgcccagctaatttttgtatttttagtagagagggggtttcaccatgttaactaggctggtctcgaactcctgacttcgtgatccgctcgcctcggcctcccaaagtgctgggattacaggcctgagccaccgcgcccggccctttcttttttttttttgaaacggtctggctccgtcgcccaggctggagtgcagtggcgcgacctaggttcgctgctacctcagcctcccgcgttcaagcaattctcccacttcggtctccccagtagctgggattactggcgcgcgccaccacgcccgcttaatttttgtatttttagtagtgacggggtttctccatgttcgtcaggctggtctcgaactcctgaccttaagtgatggcccgcctcggcctccctaagtgctgggattacaagcgtgacccactgcgtccggtcgggcctggcttttctaaaggaacgtatgcgtgcggttacgaggaaccgtcgtttccccagcagggtgaggctgagcgtgcacttaacagtcgcgagggccacaggctcctcttgcaagtaacttaaggttaaggagcaacatcgtggacaaatcggcctcgcccagcatttcagtgagggcttggtgcgaattccagccagagccctagaaagtatcttgggcaggtcgaaatgcacccctccagctcccagccacgaggggaccggcttccctgtacgcagctccggccagaggaggccgccgccgccccaccacgccgcggaggggtttgcagggtcccttccacggcctggagtttttccttttcccacgcctgaggaaggcctcgggcgcgcggaacagacgggcaggcggggggcgcacaagcccagggcacgatggcagcagcgctggatccggctgggcgctgctcggccccgtatccgtccgagaggaccgccgctgccaggcctagaggagacatgaagagaccgggcgcagcgcgacccgggaagctccgccgaggtaggagaggcgcccggccagcggagggagttggtctcccaactctccggaaggaggaggagccggcgctggagccgccttagccgcggctccgcgggctggggggagggagaggggttgagtcaagatggcggccaaggtggcgaagcagcagccgcggcggcggcggcggctggagtgagcgtccgactcgccgcgccgaacgaggtcccggtgtagggccgcgcgccgtggccgcgtcccactcctcaggccggggcgcacgtcggctcccacgcttagccagctcccggtgagtaggccctggcgcctgcaaccccggcctccgggctcctgctagtccgggggcttccgagggctcccggggcagcagccgctgggacggtttctccgccgggcggggggtgtcgcaggcctgggcaggtcgggacccgtcctggccgcctggcctcttccact

SEQ ID NO: 1244508 - DNA, 4001 bp, Homo sapiens
tttctggcacacagcgagcaacaactatcagctatccttatactgtctcatgctattaactttgcctgaaattctctccctccttttcccacttaacctgaattcctacacatcctttaaaaatccgacttaagaattacatctctcaaaactttctctgcctttctttcctcccagatggttaatactctttactaagtgcaatctctgtttcttgtatacttctactgtaatttattttatctttctcccctacctatgaacatcttgaaaccattatcaatttcttattcattcctaaattcttggtacctaaaaaaaagtaccccagtaaagtgtttaatgttaaactgaataggggctgggcgcggtggctcacgcctgtaatcccaacactttgggaggctgaggcatgcggatcacctgaagtcaggagttcgagagcagcatggccaacatggcataaccccgtctctactaaaaatacaaaaattagctgggcgtagtgtcgcgcgcctgtaatcccagctactcgggtggctggtgcagaagaatcgcttgaacccaggaggcagaggttgcagtgagccaagatggcgccactgcactccagcctgggcgacagagcgaagctccgtctcaaaatataataaataaataaacaaacaaactaaatagggcctatatgcaaatccaatttaatttcaaactctgtgttctttccactatatcccacctcttcccctataccctgatgggcatcaactgcttccgattaggtagcctgtcttacgagtaaaattgctatttagtgactgtgaatttgaaagtagtttttttctgaccaaacacactgttcattcagaggtctttcaacagtaagtttttaactgcgtttatggtacacccccgctcctcccacccaactcagctctgaactgagctcagaggcgaaaagcagccctgatccccagtaactcacatttcagaggaatctctctttcatgcacaacggtgaagggcagcttctcctggtcgtccaggggcactgactcccgcgtaaacacgacagtgacaggcaccatgaggcggagctacaggaaggagcatcagggccgtcactgagtctccaccttgccgggggggctgtcccccgaccctcccgcacagcagtctcacctgaagggcattcaggccactgatctgggagtaaggcaacgaggcccggtaggtctccgtggtcttccaccagagcggtagccccagcacgatggccaccgcagcgaagaagagggcggcgcgcttgccccgggccacctctgagggcatggggaaccgactgaggcgctggaaacgggctagggtaccggccccatccccgacgcggagaagccccaaccaccggcctccaggggcccgcgttcattgggatctccgtgcgaagggacccggcccaagcctgaagggaatctcgtctgaagagacccccgagccccccgtccgcgggacctctcgcacaccacaatccccacccctgctattcctcccttgccatcagctagctgcaggccccccacccgaagcccaccgcacctaggtgtgtagccgcagccccggcggccgccatgctagcttccggctgctccggccaccgtgggggcagagcttcgtgagcctcacccaatcggaatctctgcaacgagggggcaggaccgcggcggtgatcggggccaatcgcgagcgctactccagacccgcagacgggagcaagcgggcgaggggtgggagggctccgctgggagcttcgctggggatctgaaaggaagtcacccgggcgcggagggacagcctaggggccgtgcgggtttcggcgctgctggaacgaagttccccgcttccctgtagaacacacttctagccccgcaatcaagagcgcaacctctgcagtccttaaatactagctgggcaactacaggcagctccgaggctcatctgaaaatggagatatttacataaatgaggccgttcttgtaaggagcctggcacacggaaagccctcaacgtcaactgtcacggtcttattatccttatcgtagaactcctcttagggtgccctctcctcaaagcctcaaacacggaggtagcaagctagtatgttttagcacaattggctctctcgctattttaaaatacgttttaattcatttccaacttggaaaactcagaatacttcacttaaaaatcttgaaaagtcatgagcccagactctagatgctgatcactgcggttcaaatcctggcttcatcacttattaggtgagtgatcgtgagaagatcgttctgtgcctatctgtgcctgttttctctattaaaatagggatgatagtaatagtacctactttatagagttgtatgaaatgtgtcagtacatataaagtgattagaacagggttggtgctatgtgcaagctatttttgttattataaagtcaggccacacagggtggagcatttgtagcctccccagttgacacagaacacacgcagcttgttatctcttctttttatctgcttagacccaggttctcagcctacctcacaacccagcccagtggttaaagttcagcatcaggcctcaccagagctgtccttacccagaccctccaattggctccctttgtgcccacttctaccccaaatgaaaatgggccatagcccttggcaacctcctagatgccctgctcagccctggcagcccgcagagccttggttttcctctttgggcgggagtccaggtgctcgcttgcccttactggtgtggctcaccctagtggaaggtaccaggtcccagctgggcttaacactgcgagatgggagagactcccacccactcttatcccagcctgtcttgctgcctccctgctttgagccttgcacaaatctgccttcaggagttgccagtttggcctcactccatacttctgtagctgcagcccagtgccactgatgtggcagtccctagaagacttgcagtcttcctcattgccccactccagacttggacatcaagagagcaagagcctgagctggggatggtgactgcatgtgcccttcctccataacttgaagcccagtaagactcaaatcccaccctctccacctccagagtcagagggcccagagatagaattagcagagatcagaaactgggaggtgggaatttgatgtgtaaaacagacaggcaaagtagaatgttttgctaccatttatttgctgtatggtatgtactcaaggcatgagtcagggcttctgtactaccctctgatcccaggagacagggcaggcaagaaggagagcccagggagaagctacctcatcatgggaaaattgtgggagctggaagaggtagggggagacccagccatcctgttctgacttctagcaatttcttctgccctcagtcatgaggggctccctatcctcccatcctatggtcccaggtgcagcaatgagagaggggaagggaagagagaaaggaagacaagttggtgccaggtgaaggcatctctgctctgcatagctatttggccctggccatgactacaagcaaaagtgggtgcagatggctgggccaagggctgtggtatggagtggatactcagtaggcatggttggcaatgtagagtgactgtgctgctgctccaccatcttctccactgccttcatacttgccctgggctgcaagcccattcacctgcaaaagggagcgtggagtaagcaggctgagccagcccacaggtgccaagccctgcccaggctatagcctctgggtgctgcccccacccaccaccacctgtagctcccaacctcagcccgcttgatgaactcctcagtggcagccccagcattgtcccgttgccctcgccaggcattgagtgcagaggcttgcagggcacgcccataggagaaggtaagcgcccagggtcggggaagggggcagcgg

SEQ ID NO: 1244509 - DNA, 4001 bp, Homo sapiens
aaagtgggaagtccacagccaaaatagcaatagcagtaaacgcactggtaattacacggaaacaggagatggctggattgtattctgattctagactgatgttcaagaatttttcaaggatttttaggaaaggcagtctggcatagcaggtcctccttcggtatatttgatacaacagccctgccccaaagataattacaccgagaagctcaaggaggataaatgaagcccaaatggtcaaagtggctaccatgggaactattaggacaacaaagtcagtgaggaatctagttttccaggtaggtgaaaaagaacacaagtactgtgagaaaatgatcaggaaccctctgcacaggatacagaatgcaggaaagcacaatccctgggtgatttccagcacggtggttccattgaggttactgacaaaagcttccttcatctgcttttcagacatttttcttcctgtgaaaacaagagcaaaggaatggatttgtgaaaagcagcattcttgtgtaattagcatacctggcttaattttactcttattactagatttcagagcagaactttgggccctaatgagttcacctaggatttgtgattccccttccaaggattgtgggaagaagcttaacactaatgtgttcagatagaaatgtcatactaataatattaaattattggttacaaagcttcagctattccctgtacaagacagactcacaaagaaagtgaatttggggccaggcgtggtggctcacacctgtaatcctagcacttcgggaggccgaggtgggaggatcacctgaggtcaggagttcgagaccagcctggtcaacatggtgaaagcccgtctctactaaaaatacaaaaattagccaggcgtgatggcacccgcctgtaatcccagctactttagaggctgaggcaggagaatcggttgaaccggggaagcagaggttggagtgagccattgcactccagcctgggccacagagtgagactccatctcaaaaaaaaaaaaaaaaaaaggaaaagaaaaagcaaaggaaaagagagcgaatttgggatataaactctgagaatggcatcataggcagatgggaatttctattatggagcacagtacgtatcatgaagattctttgatgcaaattgaataggatttactaatgaccttaaagcaaattcaaacgctaggggccaagtacattttgaagttgggggccttggttccagttcagagcctctccaaacctactgccttggtacaaaacgtgacccctgcagtgatttctggatccccaggctgctcctttcctcatttacagacagctatgttttcaggttaggatggaagtaggtacggtgggtgcattaagaatggatgtatagcacatactagtgttagttgctcttttattaagggttgtaaaacacctctgaatgccacacatcattgtctgaaaaacggcatactggaagaacacatttgttggttaaacatgaacctagagtttctaaatgtaccatgagctgaataagtaagtgaatgcatgcgtgcattatggcctgtctggaacctgtgacaatatctcacagtaaccaactcaaatcagttgaccattaaaaataaaagtcctagccgagagaagtggttcatgcctgcaatcctagcgctttgggaggagagaggatcgcttaaggccaggagtgaaaaaaaaaaaaagaaaaattaaaaattagctgagcgtggtggtgcgcgcctgtaatgccaggctgaggcgggaggatcgcttgagcccagaggtggaaggcagcagtgagccgagatcgcgccactgcactcctacctgggcgacagagcgagactccgtctcttaaaaaataaacataaaaataaaaagtctttttcctaacagacgcccgacctggccgcgccctacccgtatacctcacgtactccaaatggtgccggcgcccccagcagacggtctacgtgggaagggcagccggactgccgctgcacccgccaaaccacgcgggaaccagccgcttccgcctcccgcgcggcacttccggccgacgcaggcagctggcacttccgggccggccgattccgcgcgtctccgcccatcatggcgctcgtgccagtgtcccgtgggctacccactcctgtcatgtcctttgggctggtgcaggccagatcttctagggccgtagccctgagaggagcgcctggagaggaaacggcgcgccatgcacctcacacggcccctcagacctcacggcgaggccctatcagggtaatggtgtccgccggcctcgcacaacactccgccgcactcgcacaagactccgccgcggcgacctctactgaaagacccccagtcctggtgtcgcccgaaggcccaggaaaccgtgcttccgcgcttctcccccagaacgtgggaagctgccgctttaccctcattttaccccagggtcgcaaaacatctcaccgtagttgaagccagcaagccggaccaggcgtcccggccaagccacgtgcgcgccccgcgccgcgagtgctcgccccgcccctagggaggagccggccgacccccggccacttagcagtgccgcagccgacggggtgcggttcggcgctcccaggttcctttcctcactgcacgctcttgcccctcctcttttctctcctgcccgtgttcttcccgccgcctgacctggcccgcccgcctttccagtctggccgggcgggggcctgaagcacggcggctcgggccgtgggaccggtgagtgtcaacccgaacctatatctgaagcccttcagacgcggaaggggcttgggaggccagtttgccccgcagcggtgaggaagaagtaggcgtctccacctccccttccaaagcgccgtttccctcctttttgccttttccttttgaccctcttgtgtctcacgagggggtagcccagctcttggctcttgcttgaaacaagtctttcttgatcaccctccacctttccacctggccggcagggggcggcctggggggagagggtccttgctccactcttcgcccagctgaggaccccgggagggggcggctggtcccgggaggtgtcagggcagctgcgcccttggctggggtcacgtccaccttcctgggaaggacatactctccccgtgccaggtgcttccggaacggcatcccagccctgggtttgcggcacgacgcccggaccttgagtccccggttcccgccgggaacctgggggcggagccagctggactgatgagatccttacccagcgcttctcagcgtctgccctcccactgtcctccatgcctagaaagaaacagtctgagaaggagggactggtgatcaggttgccacttgccttgattcggtgttccatttactcattaccgtctcctttctgcccacagtgttcacaccctttccagaaattcttggctggtaaccgcgaaaccgactggagcaggagctgggagaactggagaaaactgctctaatctcacttgactccagctaggagctgatgctgcatcgtaataacatttgcagagcgctttcacaggtattagcccctttaacgcttcatttagccccgtgagatctggatattatcactccgttttgtaaacgaggaaacagagtgaggcttagttcttgggttctgtgccaggggccttgggttttggattcaaaccccaaacctgttgtgctgcccctctggacctattgcttgagatgagttcccagttgaaagagctttgttctctggagccctctgcatggctgtcccttggatggggtacagtcagtgtccagggtcaggatcttttagggctgtagcaccacaccttaagtggtccagcacggtcctgatacctgtttccgcctcaattgtcctttttccagcttctatggaagtccctatccctgggttctttaaagacttgatgtattcagagc

SEQ ID NO: 1244510 - DNA, 4001 bp, Homo sapiens
ggagggaggaaaggcaagcagggaggcagagactgtctgcttctactgcagcctgaggagggaagataatgaatcatccctctcgtaagctagagatgaaaggagggaggttcttaaaaccctaatgaggctcagcacacaaagaccccaagccttcctgccctcacagtcctggtttgtgaggcttcaaaaagcaggggagggagccctgaagcaagaaagtagcttgaccatccaaaactgtcttctttgtcttccacgggtccacaggcaaagacccacaccaccacagccacaacgaggaaacacggaagccagcgttctacaaacatccacggagcatctcccacgtgcagccgttctcatcatacatgcctcacttaattttccacactgggccaggcacagtggctcatgtctataatcccagcactttggaaggccaaggtagacggatcgcttgagctcaaggaatttgggaccaacctgggcaacatggcaaaaccctgcctctacaaaaaatacaaaaattagctgggcgccgtggtgctgacctgtaatcccagctacttgggaggcggaggcggaggattgcttgagcctgggaatttaaggctgcagtgagccatgatcacgccactgcactccagcctgagtgacagagcaagaccctgtctcaataataataataataataattccacacagctctatgggtcagtatgacagcccattttatgaatcaggagactgaggctgggttgggggacagtgtgatgctgcaggtcacacagctggatccggttggaacttgggtctcttttccacatcatgcatggttcccaagcaacggcttcagcatcatcacttaaggagctcattcaaagttttgaaaactacagattccagatcccatccctggaaagccacgttgtagggttggctccaagagagccctacctgcagtcagctctgggagccagtgccttacaggtggtcctgagggcaggaaggaaagtgtggggtggatgagaagacacagaaggaaaacgagggtgtcagtccagagaggaccttggaggcaggcttggcctacttttagcccttattctgcctaaacccacccctcctctctactccgagtcttgttaactcgctttataccacatcctgctgctttaacctcgccttccttttccttctgaacaatctccttcctcctactgacctgaactttttgtgtatttaccccaggccgggatgggccagcacgcgcacatgcgcatgcccacacacacacacacacacacacacacacgagtcacgcggggatgtccagtgtgtaaacacagatcctctgagagcagaaagcgtgcagttctctaggacagcagccgcgtctgggcccaaggctggctaactagcaggctgagtgaggctcgacggagggcgccttacgcgggcacttccatgactcccaggttctgacggcacaagagccctgatgcccacgctcacggacagttccccgctggagcgggcaggggacctgaccctacgacacagggcgtcctgtgtcagaggcaggaggctgaggacacagctgcgcagagccgcccagcagaggttacccggataacgataagtggtccccgcgacgccccttaagtctctggggttatctggagcgcaggtttgcagacccgctgcccccgcggtgggccaggtccacggggccggaagatagcaggatctgtccagccctcgggctgcggcggctgctcgcggagcccactctccccgacggtccccagcttgctccagctctgcctggagctcccatgcgtgccctccgcatccgccctggccgcccagtcacacacctgcagtccccgccgggcgccgagcccctctccagcggcgactccctgcgattcgggtgaccgtcgggaccaccgcgccccagctggagccgcgcggcgagccgcagcatctgcccagcctgggctcctccggcgggcggggcggagcctgtcagggggcggggcctaatggggcggggctgaccgcggagccggcctctccagccacctggcggcccggcagcgtcagccaggtgcgcgcccggccccacatcctctgggtcacgcccccgaggccgcaaggcgtctgagaagcagccccggctctgacccgccagccctcggaagaagcagaccctggccggtccatggcagtggcccgaggggcaccagcgcggagcaccagcgacccccaaggagtaaggggaggttaggcccccgcgtcggaagcgcggctttggccccgcaggagggctgggcggagcaggggggcaggtctggggtaggggcttaggggaaagacgagaaagaggaagctccgacgagctgcttccttctctcactgcgacccacttcctcttcctacttctattttctttcttttttttttttttttttttgagatggagtctcgctctgtcgccaggctggagtgcagtggcacgatcttgactccccacaacctccgcctcccgggttcaagcgattctcctgcctcagcctcccgggtagctgggactacaggcgcgcgccaccacgcccaattttttgtatttttactagagacggggtttcaccatgttggccaggatggtctcgatctcttgacctcgtgatccgcccgcctcggcttcccaaagtgctgggattacaggcgtgagccactgcgcccggcccctacttctattttctttgggtgcccttaacccttaaaatgcctgcactactgctgtgcagacgggcaccttgacccgcatccttctgcaggaaccttcatagaaataccagccagtcccggcgttcagcactgctgttccagcctctggctggacttcccgccctccctggccggcaccaaggctactgtcacctgagtggtttccccagcccctggggaagggagtgagggtgtgcgggagttcctgcctccagggtcaaggccctcttcttgcctcccccttttctcccccagacgacgttgcagatgatgctctaccaagagttggaaggactccccagggaatcccacaagacactgcgcttcctatgcctcctttccctcgtttaaaaaatggggataagaaggttggctactgctccgacagccctcacaatggaagagtagcacttcatttgtgggttaacaaagggcaacgctgaaatctccacttccactattgaatggaactgtgtcataatatctgttagaggcgtgcaaactcggccacaaggtcatggtcatacgttattgttggtcaaaagccgcagccctacctgaggctttgagagatatgaacaccaatgacttttcttttcctgactcccgaaataccaagaaaaagcaacttccccaaatggacagaaacagaaagtacccttggttgaacacagaggcctggttccagccatcgttagacgtgggaaggaactcagaccccctctcctacctcatccccaaccccttccccacacgtcaccctttcacagagaaggaaccagagccaccaagggctgagagaggacttgataaggattccagtcttctgtctcccctgtccccactttttccaccacaaaaatatggacatttggaagaagaggagaagagggaaggtacacactgtgcaaaggaagaaaatggcagaaatgctctggaatcaggaattcaggagcaagaatgacactgtgtgccagatggaaatgttggattaggagagcacttggaaaggcaaataatctgccagagaaattatgggatgcctgccttctgaaaatggaggaaaactgcaaaagagtggctcattggtgctcactcctagggctctgagcatcccaagaagccaacttggtcccatcgtacatcccctcagaagtaggcattctcctctccacctacagctgtggcccagatgtggagcc

SEQ ID NO: 1244511 - DNA, 4001 bp, Homo sapiens
ttgttattattcccattttgcagacaaggcaagtagagccagggtcctgggaggataagtggcctgcgcagggttgtaaagccaatgggagatagctttaatccaggtctgtctcattccaaaggccaaggacagcctctcagaggaagcgacatttgagctgagacctggatgagaaggagccagctatgtgtacttcccagggaagagttccaggcagcaggtgcaaaggtgctgaggtacggagggaccaggtatgttcaaggagcactgggtggctactcacggagaagttagggaggccagtgagatatggggcatgagaaagctctacaagcataagaattattacagccaggcgccagccttcagagacgcaactgcccgggactgcggacaccctgttttttagtcctgggaggtgggaaacatagaggcctcctgctctctgcagctctgctgagttttcccttattctatagggaagaggaggataggactatgagggaactagaaacaaacaaacaggagaattctggggagagctgcctgtgaattcccagctgctttttcagaatcagcagttgtggttttctaagcagattcgatggattcttccagaagtaaaaggcagccagccctgagtaggatgaggaagatgccgtgggagaagggagaaagtgccagacactgaggtctgactacatcaagtgctgcgccaggcacctgcccaggagaaggctgaggcttgcccaagtcacacagacagggtttcacctagaatttgccagtttccatgcctggtccagtgcccaccgtggcccctgaggcttccttgagccctcaaacacctccccggctcccttggaccgacctgaccaggaggtggagcggcggctgaggctgagtccatgcaggcagcgttccagggcatgctggatgcggtcctccgtgcatgtcgtggcccctggctgcatcctgggtcatcgcctgcatgggggacagacgccggtcagcttgtcgagctcctttcccagagagcacctggtccagtaaagacaacaggtgctcacagtgcagcgcgatcagcccagcccagctatagctcaggtgctgtggaaacaggaccaggggccttacagctgcctccagggtaggaatggcatctggagggccacatctgagtggcaggacagagcacccctgcagcagaacgggacagaggtgtgggaagtaaggggtcaggaatgggagcagagaggtggaaagggcactgggcagtgggaagtgtcgccaagtacccagggagtggtcagaccccagtgggctgggcaggaagatcctgaggggaaaatcagaatcactcggaggactttttctgaatttccaggctgtgttttccaaacctccagggatggggcagagagcgtgttcctgatgacaaggccacagcaactccctcaatatgcttggagggagctccctctgattgggtgcccaggtcacaggcatctgtttcctttctgccctaacctccacttttgccatttttctttccttcccctggggcttggcaatgttacctgtcattcaaagaccttccctgccctccttcctcatcctactgaggagaatccaaggggtgcttagctgagctggaaagtcactgaagagggaatttcaggagggttttagccccgtatggggaactgagagcccccagcagggccagcccagcttcttagttatgtatgagggctcctgggtctctggggaagccacggaaggtgatttggcccagtgattaagcttggctctggcatccgacggacttacactcaaacctggactctgatatttgctagccatgtgactttgggcaaatactttaacttttccaaacttctgttgacttatctgtaaaatgggatgacaatggtgctaacctcatggggctcttgggaagataaaatgctgtagcagatgcgctgagtaagcttccaacacgcgagagctgccctgctacagtcattgccatcatcgccctggcctcaggggatgccactgcactcactccttccgggcagaccccttcactggccagtcaggccaggccatagagggatgctgagaaagctgcagttcagctctggaagccagaagaggaagcacagagctcagagctgagccatgcagatgacatacaaagagggataaaatcctaacctgggttcagctgcgcggctagagtattcagcttacggaggccccacacaggcaaatcctcctgcctccccagcctgggaggcaccactcgccaagtgaaaactaagccctttgtgagctctccagcatcctttcacagtgtctgtggtaggctatgcattccaaagccggacagtgcagcagtgggcacgcaggaagcggcacacgcaccttggttccatcacgggttcactgactgtctgccatgtgccaggcactagaggagactagaggagacagcagtgaaccaagcagctgtgctccttggtgggagacacagacactgagcaatggagcaaacaaagacgtgattccaagaagtgaaacatgctgtaaaggatggtgctgggagtgggacaagtggggacccccctccagggtgttggggggtcagggaggcctctctgaagaagggacatttaagctggatgaggaagccagggcaaatgagggggaagagtattggagaaaggggagccagcccatgccacagtctgggtgcaggaattagcttgctgagaacctggacccaggagtatatgccagggcgccgggctggcccaggacaaagactaacccattaggtcccatgccttctggctgtggaggtgaagagctgagttcagaaaacttttcacgggtggctgggtgcggtggctcatgcccgtaatcccagcactttgggaggccaaggtgggcggatcacttgaggtcaggatttcgaatccagcctggccaacatcttgaaaccccatctctactaaaaaatattttaaaacattagccaggcgtggtggcaggcacctgtaatcccagttacccgggaggctgaggcaggagactcgcttgaacccgggaggcggaggttgcagtaagtcgagatcacaccgctgcaccccagcctgggtgacagagcgagattccatctcaaaaagaaaacaaaaagaagaaaacctttcattggtgactcaagaccttgggtgtgtccattagcagcacctggatgcccaaagacatcctgaggcccttccatgtgacttttacagttgcctttggatcttctgtttaacacctccacaggtagctcaggtcgtgagtccactgaccctgagccagaccgggcagacccctccctgacctgggattgtgctggcacctggcatggatgagcatctgtggggactgacacctgtgatgaggcctcatctttctgcctcccatggcagcccgaccacaagaccctctggaggtgggtcctattccagctcagggctaacggcacctgctggaggaggtagaacaccagacaccttcacatggatgagcctggggcatgaacagctggcccagatgtgacagcgaccctttgttctcacaggctgatttctcccaggttacccccagagcaggttcttggagggagctcagaggcctccccagcaagtccctcattttacagaaggggaggctgaggtccaggaaggataagggacttgttcgaggcagctgggagagagttgacactggtataaacagacaaggggatcagggaggactttttattttcaaattgtggctgagacccaattctagggacaaaagttgctaaatcctctgcattctaaagttctaagagccacggagtattgtcaaggacgtgggcgcagccactctggtgggcttgctgggaggtgtcagtccagaaccagcacagtgacccgccaatccctgtcata

SEQ ID NO: 1244512 - DNA, 4001 bp, Homo sapiens
cagagctctgggtcctgagggggccccctcaacctttagcccttgcccccatgaggtctacttctcagattcccaaggagccgggaggtgagggtcctgctgccctggctggcccccgtggacaaggacaggcctgtttcctcagctgtgtctgcttctggctggaaggaaacacctggatatgaaagagccagtggggtgggggtgggggagcattgttcccaggggcagggaagcttggtgggatctgaattcaggtggggcctgaatgcagcagggaccagatggcgatgactgcagcttggcatctgcagccaccgtgtcagccgaggcgctttcgtggagacagtgtagggcctgcagcaggttctagtgtgaggcagcggggcatggtggccaggcaggtggcattccaatcctgttaatagggcaacttgggctgcttgcttaaaacctccgtgcctcagtttccctatcttaaaggggacctgacaacaacacctacctcataggcttgtcatgagactaaatgagatgatatttgaaaaccacatagagctaaataaataaatggaccgggccaggcgctgtggctcatgcctgtaatcccagcactatgggaggccgaggtgggtggatcacgaggtcaggagatcaagaccatcctggctaacacggtgaaaacacaaaaaattactactaaaaatacaaaaaattagccaggcgtggtggtgtgtgcctgtagtcccagctacttgggaggctgaggcaggagaatcgcttgaacccaggagacggaggttgcagtgagccgagatcgcaccactacactccagcctgcgcaaaagcgtgagactgtctcaacaacaacaaaaaaggaccggcctgcgagtgctccacacaccccctctagctgtgctccccccaacacctgactttcccacttgctttcctgcctctgggggtttgcacactttgctccccattgctgaggtgcctcttgcctcctctttgcacaccaggtcctcccttgagcctcagccaggcaccaccttccacgggaccctccctgagcccgcaccctgcagtctctttcatcctgcacacaccacacacctcctggctcgctgaggaccctgaaggttctgagttggtcactcgcagctgtgttcagaccctctttgcaagcagtcagcccttcaaggacagagaccaggcctcggtcagactctggcacacatagaagatactggatttgtgtataggaagagaatcagccagaccagcatgactttcaccaaattccccaggaaagtgatgggcagatgatgtcccagaaagggcacagactgggacccagatgtttcacactgagtcctgctccttgctaacccactctgcaatctttggcaagttgcttcatctccctaagcctcagtcttctgttctataaaatggcactaaaacacttatccagtcaacctctaaatgctggtgagaatcaaatgggaaaatgggtgtactctgcagcaccgggcatcaatcattagtcctattattaacagcatgtacaggattccagaagaaaggagagtccttctcacagggtcccgtgtcttttcatcttgtgaaaatgggctgaaacaatcttaacttggcagaattaccctgcagtgtctgaggtcacccttctcagaaagacggccctggcagccctgagcctggataaataagagccaggggtgtttcagcccccccaggggctccccttccaggtccctccgttccacccctctatctgttctgctcagatctgcctgcctggcgatctccatccaagccagcacttaccttggttcggtggcagcttctgggctccccaagtccttcagccaactccccacggtcctgagcgaggtccccagtcccagagaagcagatgtcttgggggagcctccacgggtgtctgtggtcttgactgtgctcttcagatctgcaaagaaaagctcgatgtctcacagctctgtcccctcctcttccttccccttccttgtggccctcgaagctcctcccagaatgcattttgctgtgaggatcctttctaaagaagcatgacccacggtcactggaggtcctttattctgatcgaatgtgaccaattttatggggcaggagggggacacctcccaagagactccctctggtgttgacgggggagggactgatgcagggagccctgacctctctctcaagctccagactcaccaaccatcccccacccctggacatggccagccagatgtccctcaagcacctccatctcaacaggtacaaaccgagctcatcatttctccctctaagcccacttctctgtttcctgcctcagaatcagcaacctcggtatcatcctaacgcctccctcttcctcgcctgttacatctaaactgcaccaagccctgtcaataggtcatggatcctccactttcttccatccctatggctgtcactgtttcacctgactaccatggtctttctcctgaaacactacaatagcctgaggtccttcaccccacagccaaaggtctctttctaagagtgaaacacaaatctattcatgttacactcctgctacaaccttcaatggctccttattactttaaagagaatggccaaactcctcagtgtgacttgccagacccttcttgatctggtccctccctaaactccaacctcatgctttatcccctcactccagcccctcccagaagtactgcagtctcttaactatccaggctgtgggaatcacttcccaacccttctcctggctcatcccttgtcattcattatttatcagagaagaacaaaaaaacaagcctaagaggcaggaggaaagtggagtgccagggatgctggcagaagacagaatgccaaggaggagacaatggtcaacgacgccaatgattgtggagaggacacaggtgaagagaatgaagaagcatctgctgtccttggcaattaggagagagcagtgctgggcaggaacagtagacctgctgggggaagttgatcaaccgcatggtgacacatttgctactttgtcattttctttttttcacattttgaagtcaaacactatttgggagagtctctgacacatttctagagctttgaaaaactcacagattctatgctgtcatcccgttgggcctaatgggtaaatggctctagagagtgacagattgctgacagcagggtttgagtgctggatccagctatgcctgaaattctggggctgaatctactcttggactgttcattgtacatgatccaataaattccattcttttttggattaagcctgttggagtttgtcacttggctcaactcagagagctttggggctgtgaagtcactgatcctttcccgtaggggcttgactaggttctatgctgacctttcattttgcagaggaagctatttggaaaaaaagtccagaaatgtaaatcatttactctattgctgtgccttcctcccataactgcttcttttctgtccccttcatgtgactgaagtcacattctatcttgcatctttgtattagcgttctcagctcacatgtctgccttgttcctccctcaatgagtcctgaaagagcaggggctagagtgttgttcattattccgtccatcacagggtgaaagagtgttaagagaatgcttggcttatttatgaagcaaatgggtgactgaacgaaggaaacgaatacgcccaggacagaataaaggaccaagaactcagcccctgcaggttccagactcagcagcagctgggcagtgtggccaccctgggcagcgcctctccttatcagccttggcttaactgaatcggaaatcacaagccgaggtcacttcttgtgggtgcactgctctctttatcatcagctgccatttctgcaactgcatttgctgtggtacccatagagggggcagcttggtgaccat

SEQ ID NO: 1244513 - DNA, 4001 bp, Homo sapiens
gtactcgctatcctggcaggaccctcactaacaccagtgatgacagtgaaaacagtaacctgcccaagaccaagaaaccacagagacctcaatttacacatgcactttcctaaatgacaggtcaagatctaaaaccctagctcagattacggttcatcgatctccacccaaaggcaccttcagctcctctgccaaagcaatgcaaagtcttgctggccctctttgtcatcgcttggtcttgtgagcaatttcaagcactcacaagtgaacctaaagaactgaaatccacaggaaacccaagcttgatcctccttattccaaaattctagttagtgaagttggtgtttcgggtccttttacttcctctgctcattcctagtgtggggattcataaagaaatggtcagaaggcaaagagcaagtggttggaagagggagaataaagaccctgaacaaacaccacataaacagtcttccagcttaaactgtcaggatccaacttcctggcaggggctgttgaacaatctcaaagcaccctaaggacccaggggacctatctctcctatctaggaccataatcactatgcatcatcacaacattgcagccacacaacagataagtcaacatctttaaaatgatcaccttcaaaaactatgggaagacatattatttctactatgaatagtccctccttataaccaggcatcctcttctctcaaatggttaatagccattctttcttctccctaacccagagagacccaggtgaagtgtctggttcaaggaagcctgtgcttctccagttgatacatcttgttcaagagggaaaaaaaaggaaacccagggtggagttctacattcaaaggtaaggaggcctggaggatggaagaatttgagcagccacaacaaccaaacgatcagaaagagaggactatttgggcagaccactgctacttgacagagctggcagccggctgtaaggaacaagggggaatatacaccctcacaaacaggatgaggggggaggaggagaagcagggatgaaagcgactccactgcactgaggccttgcctttgcgctccatgggctgccccaagcgagcacgccacacgcaggaagccagaagggctggagggaaggggaggtggcgacggcagaccacagagacaccaggcctcgcgtggcgtgcggggagtgcacacggggccgaaaggcgtgcaagggtggggtgggcgtgcaagtggcttggcgaggggtggcaggcgtcaccggcagggcctgcggggcaagggcccagggctgcagggggcgtgggagcgcgcggggccgcgctcagaggggcgcgcaggagctggttaccgtgtggttcaccccccacatcaggacgctgaggatcggctcgctggcccggaatagcttcactttctggcacacgaaatgcttcttcttggtcttggtcttgctggcgctgagcggcgccaccgccaccgccgtggtgctggtgcagttggacgacatgcccggggcggcggcggcggcggcgaaagaggggggcggcggagacagcgcacaagccagcggcctcaggcctcccccggaccgatccccacccccgctccctcaccgcgccatggtcgcgcccgtcccgttacctcccaccccgccccggtggttccgtccgccccacgccccgccctcccgccccgccccggggagcccgccggcccgctccgcaccccgcccccgggcggtgcagccgccctgcagtcccctggccccgtcctccccgtccgcgtggtacggcccgtcccggggaggcagcggccgccccgcccgcccctcctccccgggcctgacagaaacccgcctggcctccgaacgcctcggggccccgtgccggagccggaaggggaggagggctgggcaggcgtcgctgtggaccgcgggaggggctccccgcccgggccccccaacgccagggtttggctctttcccgcaacccgaatgccaagatggcggcgatgccaccgctccggaagggaaggagggacgggaatgcgaggagggcgggacgtaccatgcccaccccgggggagaggagggacgcagcaaggggaagagaaagtccagcctagaaagccaaggaacgccccctcgctccacctaagcgtggatctgcccactctgctgggccccgggcgcgctccacccgcggggcacgccccttgcccccagggccaatgagagaagcaggccaggaacactggtttttatgaatgggccccgcgcccacccacctgctgcctgttctccccgcaaagggtcagagctcagaggccgccagcaccttcagacacctatcccactaatcgtcttactctggctcatttcgtaaaatctttgagtaaactgccccacgctttgttacataattctcagatgagggatctccatatattcgacacaaattacaggtcaacgttgttctttctgcatggaaattcgtaaacacggtactccacaggtggtcgctctttaaacagttacaaaaataaatgtggcctttattaccaattataaaataaacataattaaccccggcataatgaagtgattaaatgaataaaaacgtatgttacattctctagggaaagatcgggtttcaagcattacagtgcctggcatcataagtgttcaaaaacagaaatccaaatacattttaagcagaattaggaattagcagaacaaggaaatcgcccagctaatgtgcgggtcaagagggcctaggagttcactggtcaaatgagggcttctggtgaaagaatagagaagggaaaaggagtaaagacaggagagtggcccctcgagggttttgttttgttgctgttgttttttgagacggaatctcgctctgtcacccaggctggagtgcggtggcacaatctcggctcactgcaagctccgcctcctgggttcacgccattctcctgcctcagcctcccgagtagctgggactacaggcgcccgccaccacgcccggctaattttttgtatttttttagtagagacggggtttcaccgtgttcgccaggatggtctcgatctcctgacctcgtgatccgcccacctcagcctcccaaagtgctgagattacaggtgtgagccaccgcgcccagcctgttttttgttttttttttagtacctgactgaaagagactagcaaacaactcctgaaaatctgtaattgtagtaaggttactacacggtaagaagtgaagccgcaaaataaaaacttccattttattttcctttaggagccatggagcatattggcaatttggttctgactcctaaaatcattttactatacctttacactgcctacattggagactgcaagcagtggaaaagaatagatactccagatctcgtcgataaacccaggctcctcctaaaccagccagattcagagagaaaaacgagctggcctgccttattgtattacttgccatcaaggttcaatgtggttctattacccagtaaagtcattgaccaaacaaggtattttcacaaagctaaccttttttaaaagcatgtaaaaattgtacatttgtacatatacgcattacaattttacatccaaagatcaaatagttaacagttcatttagggctttttgtattgtttgattttccagattctgtcactcccttggctttgacctaacctgacatcattctgtcacattatcttctaaatcaagtaaacgttcatttgtctcagtaagcacaatctatctgggtgacaccagagaggtttctgaagggtctggtgtacgctgaggcagtgaaataggtctgttggcacaggtaagaaggaagtggcatgataaacatcacaaccccagggaacagccttccagagtggcacaagcactcccaccgagatggtccagtgcccacccgttaaagagtcaaaacccaaagttactgagtgtccc

SEQ ID NO: 1244514 - DNA, 4001 bp, Homo sapiens
gctttgtccatgggagcttcctcgggagtgtggtagaaagaactggaagtggaaaacaagagagatgatggaagccattacccctcacactgcatcccctgttaagagccatatcagcatgtgctgtcaaccaggagccatttatccttcaaatatttccacacaatctggggaaggattatgcacaggaagataatttgagcccaggaattcaagaccagcttaggcaatatagcaagacccagtcttctcaaaaatttaaaaactatcaggtgtggtggcacttgtagtcccagctacttggaaggctgaggtaggaggactgtttgagcccaggagtttgaggctgtagtgaactatgatagtaccactgcactccagcccgtgcaatagagtgagatcctgtccccccacaaaaaaaaattcacacaatctttccaaattctctctttatgaccaatttactgacttggcaatcaagatagaagttcttcaatagcactaacttaggcttcctttttgctaacgttgttcacatccagaagttcttttgttagctagtcttcaaccatcctgctgcaatctcacctcacttagattcacaaagaagcaaaattagaaaaaaccttccagttcaactactccagccccttcattttatgaacaaggaaactgatgctgactttatttctctgtggctacagatcactcagggtaagagaaccacctcaggattcagcaacaatgagtttcctgagaggatgaaccaggaatcccttgggctttgagaaaactgatagagaaatgaagaaggtttctaactactctggctcattaccaagaagagcaaaccatagccagcctgggtagctgcaggcagaatggaaagggagagtccactgcagtggatagctgggtggccctgtcctcgaaggaccctgcagacacacagggcccacccacatatgcagtggtcactgcagactgcactgcgtagcaggaaaaataaggcctcagtctcacttatcatgtgtcaaacaaggaggctgctattatctggaggtggcaaaaaataaaaaataaaaaaaaaaaacagaagcttctgctgggttctggtgtgagaggccaggaatatgcaagacagaatcctacctcttaggctgataaatcaacctttgcctctaggcaaaattatctttactttaggttacctagagcagaaccaattatttttctggggtggggatcaaccatttgggcacagaagggaaagagtagtgagaaggaagagaacagggcctaggacgcttggtcaagggcaggaactgggaagcagtagaaagaggaaatgtgcctagaaacccaatgtgggtatgagggatgtgaaacttctttgaattgccatgaaacacactaggcagctaagatacaaattacacagaatttttgatgattcagtccctttggccttgccctgtagcctgctggctctgaaaacccttctgcaggggaggagggtaggacagtccttacagctgggggtgcagaagggacacagtacctgctccagcaggaggatcctcttcctgtgtttggccaggtggtatgcagtgaagcagccctggatccccgccccaatcacaatggcgtcccagagatctttctgagccgccatgatgccactcagccccacagccacagagcctcaaaggcaaaggcaagcaaagacaggctcccggctaaaggacgaggaggaaggcaaagtccagcctggccagtgttcccacaatgccctggggtcgtgtcctcccgcttccctctctgccaagcctggcccagggctcagtctcccttcccctgcggagcagagctgggtagtctgatttgtgaggtttagcccagctcagccgccagcctcacccttgcatccctgtggctttctattcttggctcaattattgtcatgcaaatgggctccttcctttgccaccttcctgtctcattatgatctttgtctcaggacttcggccctggaatttcaatgcctcctagaccatactgggcaccgggaatgctgcctccccctgctggttttcccctcttcagcctgatttgctttagagattctagagggccccgctaagaacttggcacgatgcccagaataagacccacctccctggtgggtggtgaggtcagggggtagaggcaggggccaattgggagggcagttttgtaattatgaaattattcccagcatgttttactttcattttgaagaaagaagaaatgatcctgaaaagacagaaagggcagagtgagaggaggagccctctcctcagccacagagaggggaccaggccagcccagtgcctggaggggccccgtgttgagcatctctctgtcccaggcagtatgcttagtaagtactgatactggcatttgggtagggcttgattgtcatacagttcgagggtactctttgagaaaaagaaaaaaggagaattattaatacaaaattagatgcccggatgtggaagaaactgttcaattaaggacccccatggttgaagtttcatttgcttcatggtaaatttgcctctgcatgagttatctcatttactcctcatagccctaggagtttctgcgggtttttgtttttgaagttttggtttttgagaggatctctgggatctcactgtcacgcaggctggagtgcagtggcacgaactcggctcactgtagcctccacttcctgggctcaaggggtcctcctacctcagccgcccgagtagctgaaactacaaacgcatgccaccatgctcagctaattttgtttattttttgtagagacgagggctcactgtgttgctcaggctggtctcgaactcctggactcatacaatcctcccacctcatcctcccaaaagcttggattacaggtgtgagacactgcacctggcttaggagtatttttatgcctacttttggcagattaaggatggccccaaattctttttcactccttctatcacagactctgtgactgcttgacccataaaatatggcaaaagtgataccatgacactttctggcacagccctaaagagactggcagcttcctcttcttatgttggagcccttactttttttttttttttgagagggagtctcgttttgtcatccaggcaggagagcagtggcactatcttggctcactgcaacctctgactcgtgggttcaagcgattcttctgcctcagcttcccgagtagctgggcctacaggcgagcgccactacacccagctaatttttcatatttttagtagagacggggtttcaccatattggccaggctggtctcgaactcctgacctcatgatccgaccacctcggcctcccaaagtgctggggttacaggcatgagccaccgcacctggccaaggagcccttactctctgagccctgagccaccatgttagaagtgcaggcaccctatgggagagttcacatggagaggacctgggaccaggtggagaactctatataagaatgaagttatcttggtttgggaggctgagtcaggaaggatcgcttgaggccaggagttccagacaaacctgtgcaacatagcaagaccttgtctcaaagaaaagtgaagtcatcttggttcctccagcccagcctagcaccagccaaatagtaccaagtgacccaattgatgctgcatagtgcagaagaatcacccagtcaagcttcattcctgatccacaaaaccatgaaacagaataaaatggttgttgttttcagccacaacattttggggaggttttttacacagccataaccaaaatattacttaatggctgaagacgtgaaggcttagagagattctatcttacccaaagcaacacccctggtatacaaagacactgaggctgggcacagtggctcacgtctgtaatcccaacactttgagaggccgaggcgggagaatcact

SEQ ID NO: 1244515 - DNA, 4001 bp, Homo sapiens
catgttggccaggctggcctcgaactcctgacctcaggtgatccacctccctcagcttcccaaagtgctaggattacaggcgtgagctactgcacccggccaatcctgctcttttatttatgctttctcaaggagagggccctgcctttttttcttcttgttttcttcaccgccttccttgcattctaccaccctacacctgtacatctccacctctgaactcactccccagccttttcctggtgctgtcctccttcgaacgtgctgaaatacagttggtattaagagggttgtcagatttagagaataaaactacaaggtgtccagttacagttcagcctcagatcaacaacggatagtttttttcatgtaagaatgttccagtattgcatgggaccaacgcatgcaaaaaatgtatttgttgtttgacaaattcaaattgaactgggcatctcgcaatacatctggcacccctaatattgtaagagatcccgctgtgctgctgtgcttgggcctggagttatctggcccttcctgagcttctgcccctcaggccccaccatctagagagctctgatagcacctgggctgttctggaagttgcaagagctgaaagcagaggagagaggcacacattacctcactgctgggaggctgggcccagcgaggggagtctgggggagaagcggggaaggcaggatggaagtggtgggaataacaccatgtattattcctgtggaagacccagagtggtaagaagtggagggtcctcctgtttccctcacggagtccccattaaggccccacccagctccagcttgccagtggtcatccccacggtcccttatcttctctggcggtgctgtcttcccctcaccaggacattcagttggtgactgtccacccctctgataaggtgagtgggggccaagtgtctgggctaatagaagctagagggtttctgagtaagccgctgctgtcaccatggccatggccacccatctgtcacctgctcatagcgcttctaggaagggaagtttcccaaaggtcacagtcaacctagagggtgccacccacctcccttgttgggccacccggctggtgcccagaccctggccagtgacagggtagaaaaatagctcgggcgattgcgtgtgtgaccacggctggctttacccggatgcagggttctcacggcacacagttgcctgactgagccacgtctttgtccgtgtttgcatgtgcctgccttgttccccctgtctgagataaaactcccgaggcagccaacgcactccaccttgtttttctggcacctgccccagacacctgccacagctgcaggaggaagacattggcagctgcagaggtctgacacagggtgctcaggaggacggctggggtccgagattccacccatgtactctggggtctgggggtggccttgcactttcctgtctggcttttttgcttcttccacttagatttgggaggagagtccctgcccagcccttcccacaatggctgctaagagtgaaggctggatgctatagacgcaggactgaagcagctctctgcccacaaattcccttcttcccagtacacagcaaggggcggccccccttcctctggccaccactgtctgccaagaccctcagcaggcagtgcctccaggctgacttcaccccctcccagggcatagcccccttttctccgcttgttgttcatgcttgccttccaaccccagtttaaagacaacacgctccaaagcaaagttaaaatctgctccttccttcagcgagatggaaggaagggcagaaggaaacattccctccttacttactgtcctcgatgtcccaggggaggatgggggacctgggaatcacttggtgctcgtgcaaggaggaagccggcaatgagtttctgctcaagtccatgccagccagagaaagccaccctgaccacgtccagaagtcagtgtgttgtgaatcccagcaactgagcaggctccagcagggatggatgagctcaccaggcaatggcctaatgggttaactctttgtgagctgctggcatgggtcctcggactgtggctttctcagctctgctcagccacaattagatgaatcttgtgaaaaattcatgatgcttctctgcagtctgtcttcaagtttcatggaggcgtgcgttccgttggtgcctgggcagggcagcttctcctgacccaggctcagaaatcagaggacctggagtttctgggttggtggaggtgtgtagtggccatggtggtggggatgagttgccaaagagtggatcagaccctccggctgactcaggctacactggctctgttcagtgcaggccttaataatttgatctgggaactctctgtgttctggatgttggagggggcacatgcagacttagaaaacatccttggttgcaagatggcagggacacttcttggaactttccaatgcacgggtgggcaccctatgttacaaactgccaggagcccacaacacgacttacctccatcccaggcctgacatctcaaatagaggcaaaagagcttgttccccatcgctcttccaatcattcctcatggtgccctgttgctttttatgggatgcctgctgccacaatgatgagaagagaatgatgcaaatcagtgcaaggaggatgaaaaggttttctcctctataaacctttaccagactgtgcttcgggaagctgggtgtgagctgttgagtggccagttctcaagatgctgacggatacactgaggtcagcaaaattgcctatgattctggaaggcatgctggctcctgccctggcccacactaacctgagaacgtgggcagctgttgttcctcaggataactggtgggtgggcatccttgctactgggaacagtaccctgaggggcttcctctgtggtctgccgggagggctttcctaggagccatccaaggaagctgctgtcaaggcaggtatgagactctcccatatttggcatcttgagttcctcatctgtgcaatgagcaggagattctgagcctagaaggctctgtagaggttgctgtgtgatccatgcctagagaagcagagagctaggaggatgagcctgtcccctgagctgctgtgagggatcaggctgagtacgccctctgtcctctgtgaagatgagcgtctctgctcagggcaatgagcagggagaggcctgccttgagtgtccaggggaacttgactttgaaggtttttgaggatgtgagttgctttgccttaggtgcctctgactttatactcaaatcagtttgtaaaaccaagtggcctggctcgcagaggaaccctagagtgaattattttgcaatgcaaataatcaaatgatttatttatttatttttacaaagttcgggctattcccccaccctctgcagggcacggcagtgtggcagagtaataccatcctaagttaaacccttattcatcactccctccatgtcaggcactcttctaagcactttatatatatagcaattcacttatttcccatacaactccatgaggtagccatgtgaggtatattgctatctctgtatttggccttggacgaattacttctctgggccttaatttcctcatgtattcattgagtgggatcattactacatcacagagcttttatgaagattaaatgagaaaatgctcatagcaagtgcttaaagaatatatacataatatatatgcacataatgcacatgtgtataagtacatatttaaatataaatgtaaattggaggggcagcaagcatcagaggagaacatgtccggggtagaagctgttctgtctgcagacccccttcctagcaggacagatgaggaggcatgaggagccatcatggtccctgggcagctgactccagtgtcccgggatgaagaggccgctactgcagctgtggtgttgaagggaatgggagcagggatggtcactgcctggg

SEQ ID NO: 1244516 - DNA, 4001 bp, Homo sapiens
atgtcaagaaacagaggggatgaggcctcaaaataatgctcttcagatgaggtgtttagctgggatgacatgtgggtctcagctccctctgttacccaaactccactctatgtcctaaatgtcctaagcacctccaaggagccagcctggtggggatggtcaaagtgcgatcgctgacaaagtggcaagagctctctgcacacctgcctggctgcctcacaagttgctctctgtttgaccatctcccactcctggggcttctggccctccctccaggaaagcagtttcactgtaaattctgtgcacacacgcacacgcacacacacacacacacccatcctatctctcctctttggggagaaaaatgtcctgtgatgcttacttggaaccctgagcttcaacgatggctcatcttgtacttgaaagatttagcacaccaaacatctccacctgtcccccagtcccctggatttcaggagcaaacccgtcatcctgcaactccttccagaagtcaccagtttcccacgcacccctcttcactactcaagagctccccaccccttccaccatctctcctcagttcacggctccatggacccctcaattcctcaaagaatttccccatctctttgcaccaagactgagaatcccctagaaacaagctggccctgccctggtctcccccatctccaacggcaggtatactcatcccaacatactctctttccggaccagcctcgaccccggtaacttcccggccttctccacttcggaccctacccaacattttctggcctcctcgcccaagtctccccacgtcccaagcagtcatcccaagcttgttccaaaagcctcctcttccgcaccagctgcttgggcaccacggttactccggcccgcatctcagccccctctgcatgtcctcagacccttcacctgtctccccagccaggccctgacttcctagtcctcctcctgtgtccacttaccaccacccctcacccgatgcctaaggcggccactcctccccatccccatcccaactccatcgcggagcctctgacccatccacccggctctccgtgtgaactgttcggccctccacctttccccaccgccgggaggccctgcctgccccggtgcgcctcttcctcggccgccgcggggcctctcagcgccgcctgcagtcccggctgagcccgcgccctcggcccgcgcagagcgaccccacagcactcccagcgctcggcgtcccctcggcctcccccagtcccgggccagctctccctgccctgaccccgtctcgggcctggcctcgccctcgctgtccccggcctctcctcgggtccacttgggcctccgaggcccccggggcgcctgaggagccgtccgcccgggttgtccctccgtgcccgtgggcccctccatgccccggctgcccgtccatgccccgtgggccccggctcagatgccgaacgccccggctgcccctccacgccccggccgcccctccacgccccggccgcccctccgtgccccgtgggccccgcctcacgtgccgcccgccccggatcccctccatccccgctgggcccgcctcaggcaccctccgtccctgctgcccctccgtccatccgggccctgcgtccctcgccgcgccgtcgccccggcggccgtccccaccctccctcctccccgcttccgcacggccgccggacactcactactccttgagcagcaccatgtcgcttcgcggctcggtggctgcccgcggcccgcccggcctcccgcccgctgcccgccggccgctctccccgtggcccggcccggcccggctgcctgtgcgtcttcgtcgtgctctgctccgtccccgccgccctcgccgcggtcgccgcgccggctcctgccgcccgggcctcgtcgcctctcgcgccgctgccgacgccgcccggagctccggttccgcagcgccgcgcgggggcggggcgtctctgcggcaaccagagcgtcacacgccgcggtgcgcgctgacgtcacgcggggccgagccttcccaggcccgccctcccgtccttaagtgggccgcggcggcgctgtcggttccgaggtggggccccgcggctggggccagacccggcagaaggcggagcagactagggtgtccgtcaccgtcctcggtgtgaaccgccacggatgcacgcgggtgctggctggggggcctccccggttgagggaattgagacccaggaaaaggttgtttcaaaaaatattaatagccgcgcgcggtggcccacgcctgtaatccttgcaccttgggaggccgaggcgggcggatcacctgaggtcaggagttcgagaccagcctggccaacatgatgaaaccccgtctctactaaaaatacaaaaattagctgggcgtggaggcacgcacctgtaatcccagctacacgggaggctgaggcgggagaatcgcttgtaccgggaggcagagtttgcagtgagccgagatcgcgatcgcgccattgcactccagcctgggggacaagagtgaaacttcgtctcaaaaaaaaaaaaaagaaaagaaaagggctgtgaggccgggcgcggtggctcctggcagtaatcccaggcacatcatgcctgtaatgcagcactcaggcgggcgcatcacctgaggtcaggagttccagaccagatggcgaaaccccatctctactaaaagtacaaaaattagccgggcgtggtggtggacgtggtggtggtagtcccagctgctcgggaggatgaggcaggagaatcgcttgaaccctggaggcggaggttgcagtgagccgagatcgcaccattgcactccagctggggcgacagagcgagactctgcatcaaaaaaaaaaaaaaaaaaaagaatgaaaagggctgtgagaaatgagacacaggcttagcggcattacacggaggggcacctaattgagcgtcagggatgtagtcagggaaggcttcctggaggaagagattctcagatctgcagagggcttcggagaagagcatagcaggcagagtgaatgcaaaggctggaggcaagagggagagcatggtgcatttggagaactgacaagtgagtggaacagaacatttcagggctgagcagctcaataggggagggttcctggtgaacgatgataaggtatttggagtccaccctaagggcggtgggagggcatgtaagggctctgagcagtgacatgagcgggtgtcctgggcgaaggctcactctagtggttgggtggacagaggggatggaatgccagagcgtaggcagggagaccggcgaggaggctgctgcagatgtccaggtgcaggtggactaggacagtgggagggaagaaaaggaagggatggattcaggagcaactcagaaggtaaactccgtgagacttgttgactcattggctgagaggaggagagaaaagcagcgaggtctctggcctgggagccggggtggacggtactgtcttctctgagaacacaggcaagacaggctggcatgggggcaggtaatgactccagtgctggactcacactcagcgcaggacgctagaggggcatccaggggagatgggagtgggctgcctaagacagggacttgggaagggagggtggagcagctggccgtgttgctatcaggatgtgactggcggcccgcgactgccctgagcactgtgctcacttatcagatcctagagtgggggccaggctgagtgcctcacacctggattcccagcactttgggaggctggggcgggcgaatcacttgaggccaggagttcaagaccagcctggccaacatggtaaaaccccatctctactaaaacaaaaattagctcagtgtggtggcatgtgcctgtcgtctcagttactcgggaggctgaggtaggagaatcgcttgagccctggaggcagaggttgcagtgagccgagatcatgccaccgcactccagcct

SEQ ID NO: 1244517 - DNA, 4001 bp, Homo sapiens
ggctcaaaaacatatctgatagtttcgaggcaccagatttaaatataaagacggtctgggtggctgatttcatgtgtgttgccacaccaaaccacactagtgagtttcacgttgccttgcttggctttgggctccctcgctgtccctggacagagacgctcagcagtcgtggaatcaccacaaaggtggggaggaagaaggggaagaaagggaagccggggccggaataatcctatctgagtcaccacttcctgaatactggagctcgcggcttcgcaggatcgggagaaggacagcagagccgcgcttggaggacgagcccccgccccgcgcccggcgcccccagccggcagccgcggccccggcaccacgtgctggagcgccctcctgtggccgcgtcgcagcccccgccgctcccggctcgcgcgccgctccccgcggcggaagaaacaagagacgcagaaagtttccgagccaggcggtttgcgaaaggacacagccgggtcccgagcctcgaagggcggacgtgccgggagctgcgcccaagcccgcggcgacggcgagaagtcgggccccgcagggacctcccctaagggctcagaggttcctcccgcggggctcggggcgtgcagatcccgagggcgcagggctcctcctcgcacccctacctgaccgcagagggcggggaggggaggctgggcccacggccaggacgggatgccccccaaaccccagctacagcgcgcgccgggggctcttgggtttggtttattcattttcttatttggagggagggggcgcacccactccctttggctcatagtgatccccaacagtctggattctgggcgcccccgaaaagcccacccggagtccgccgccccacccagcgccgccctcccccgctggggtgacaagtggaagccgcaaatcccctccctcctctcctccaggcttcgggtttgcggggtaacgtccacctgggtttcctgccgctcgcccggggctcgccggccaggaggcggcggtagcggcgggggtcccggagcgggcgaggccgggccgggcgcggcgcttacctcgtctacggtgagcggcatgcagatccggtactctttcagcagcatggtcctgccggccgcggacccccggggcgggaagcggggggcgcccccaagaccagcaaggctgctgcccaggcgcagggcagggcgcccggagcccggcgctcggagccggagggcgaagcagcccccgcggcgcgctcagctcctggcttcctcctctccgccccagagcatgtcagggtttgggtctgggtgttcgcagctcccccgcctcctccctcgccgaggccggtcctcccggaacgcggtgttgcaaagtcagggaggcagggagggagacccgctggggacgactctgctcggctgcccagggtggtaggagcggccgccagatcaggacatgcccggcagcgagcgagggaggaaaaaagagagatttccaaaaattaaaacgaatgcacaaaagtcacccgctcgatccgcctccgaaagcagacgggaacctggcgacccccctcctccggcgggtctgcccgatgctaatgtcaccaggaacacattgcagccggagccggagatgctgactttccagacaaaggctcgatcggcttctctccgcgggcggtaaacaagatttcctgctctttttagggccggtccccgcgccgctccggggctcggctcggggagaaaagggaagccgccgccgccgccgccgctcggctctgcccggctggggccccgggcgcctccaacctcggctcgcggctgccaggggcgggcgggaggaagctggcgccttccgcgcgcgtcccctcccccgagtccctcggctccccgggcgccgtgcgtgcccgcgagtttgcagccacctcgccggggccggagcgtccgcgccgatgcagtgtgcctggggccgggaggtgggtgcgggaggagcgagcgcgagcgaggctgacatcagcagcggccgcggcggggagggtagccccatccggccaatggggaaatggcaaagaatgtggaggatttaaacaaaacagcatgtctctgccagacggcggggctgctccggagcggagcccggccggcgctggggaggctcgggcagaggggctttcctcggctcctttgccctttgaatccgctctccattgtgccctgagtgctgccgtgctccatccagcccctctgggaagtttctggtcccctgaccctagggacaagtcaccaatgcccaccacctatgtgtggtccagtaagcaagtctggggctggagaggcaatgggtgggatttgggaacaaacccttgcctggtttcagaggagagatcctggaaaactgggaagtgcagccgtgtgaatggaaatgaagtacaaacggggagggaacaaccagagagaacatgaaccccacgtagcctgttacctcgcctggcccggctctgcaatctttctgcagattgtgcaggctccgcgcagcagaaagaaagagtaggttttcgtatccgcactcctaagttcaaaaagtcacagtgaaatgtcaatgaaaatgcctggagtgttgctatttgatccatattaaacagatctctcattttaaccacaagaagcacattcttcagttactcaggaagcagcatggaactgctgaagtctgtttttcatttgtctggtatttttcagcttgtttttatgaaaagttgccggatgaaaaatgcatcagttgcctgtatgagaataacctgtaagcgttatcttttctccgaaaaatcttcacgctctgaagtcctgaagctagagcttagatggcgatgcagatgcctcaatacagtattttgaattgtgtttaattaataagtaattaaccaatatgacgatgatgggcttgtggcaaaagtcatccagagggctggagagaatttataactgttaactgatacaaaccctcctaggaaaatgataccctatatccagcttatattttagtggaaactattttccagataaatgctttccagagttggctcagaaatattcacagcaactaattaaagctaaaccaaattcctcgaggtggaaaatctaaatctgacactgcagtgttgaataataacacattggaaggctgtgatatggaaagaaactcaagctgtttttcctttttttttttttttttttgcttcttacttgaaaacaaatggaagacctaataatcttcccagaggcaggaaggcaagggattggctagccacacatgcgcatgcacttgggacatcgggatgtgtaggctcagttcctggcttcctggacatttcctgacactgattctggaaggaagtattctactgacgggtgacactgttgaggagctacttctctgaatttcccgaactgtaaattgtcacatatatgcttcctccatcatccgtcttgttgctgttattggtttgtgatggagtttcgctcttgttgcccaggctggagtgcaatggcatgatctcggctcactgcaacctccacctcccgggttcaagcaagtcttctgcctcagcctctggagtagctgggattacaggcaccggccaccacgcctggctaattttgtatttttagtagagatggagtttcaccatgttggtcaggctggtctcaaactcctgagctcaggtgatggcctcggcctcccaaagtgctgggattacaggtgtgagccaccgcgcccagcccacccctcctgttgtaaggtgacttctccattggattctcattttcttttcattcattgcatccgcaaacctggtcatattaatcttgtgcaagtacagctctcatcctgccaccttcaaaccttttagtgattcctggctgggctcggtggctcacccctgtaatcccagcactttgggaggggaggtgggccgatcgcatgag

SEQ ID NO: 1244518 - DNA, 4001 bp, Homo sapiens
atgctcagagcagggcagtttttccacctgtcactggaacaaattcccacagactctcagcccagggaccaaaggacccacaggctaaggcagagggactgagactggcacccccatttggtaagggggtgacctatcagggcagtgacagagagagtccttcgagtccaatagacctggctgtgagtccaggctctgcccagaccctctaagccaccttgaggctgctatttctctgagtatctgtttctagatgttttaaaagtgggagagtcgcatttcctccctcccaggatcacggtacagtaaagagcttagcactctgcctaatacatagaacaagcagcaaatgttcactgccgttgcgatgacagtgccctggcaggtgacctgtgctcaaggcgtcccagtgcacacacacactcacacacacacagggtagggcagcagatgggacacacgccctgccacaggccattttaaggagtcggggtgggtgaggacccaggcacggtggaggaaagagggaggcaagaagcctttttcagcttccttggtgtcatctcacagtgcctccctcaggaggggaaaagggaggggagtgagaaggctgtttagctgtgttccatactggctgtgcctcacacaaccggccccaccccgacaggactccttggggacagaacgggagtgcattctcaggcacctaaatcttacaggctcagtgcctgcacagggagacgggtccgcagcccagggtcccgggcagctttcgggcttgggggtggattgacacacagcccgatggtattcacacccattccttcactgtcgcgcccggtcctgggggacggcatggcaccagccaacgtcacgggttgggtgtgagttcatggtagattctcacacgccagcctcacaagaggcactgccgagaccaggcttgctgccgcctactgtatggccggccctgtgggcacagctgtcctccacccgcctcccaaggcaccatcgggcccagaatgtgcccgatgagtcacgggcctgggtctccccagcatgggcgcagcaggggggctgagtccgcctgagccccggtgcccagctcagggtctggcacagagcagatgctagtgaatgaacgtcgggctggatgaatgaacgaatgactaatgcccgctccctcaaaccacaggctacaccgtctgagcctgggggagggcagagcccacgggaccccagaagaggcctccgcagctgaggctttgcgtcccagggtcgatgggggagggggcggggcggccagcagccggcgcggcacggggctcccctccttcccgagaaggaatctgggtctctggactgagctggtgacgggggctggggcggggggttgtggcgtcctggatggagagagctgcaggagcagggggcgcgtcccggtttgcgttggggtgtgggacgaagcggcggccgcgggacatccccttcggtggcgaagcccgggtctgcccggggcctccgcggggtgcagagggctcccaacggcgggactggcccggggcgccgcagacctggccctttccggcggggccgtggagaaggggacgcggtgtcccccgaggtgaccgggggcgcaggaaggacggggggcgcgcggagccccctctccacgcgcgggaggtccagccccgctaccgccccctacgccctcccgggacctccgcccacctgcgcgaggggttcacctgggccggcggcccctcctctagacgcgcgagtccctcccccgggccccggccctgccctccccgcgcccgccctcacctgcacggcccgccttggccatgtcccgggcggcgggctccggcggcgctacgcgcgctcctcgcgcttcccgggcccggccccgaccgcctccggccccgaacggactccgagcgccgcgcccgcgcccccgccccgctcgcctcggctgccgccaccgcagccgccgccgcctcgccgctccctcccgctcccttaaaggcgccgagcggcggccgcgccccccccccaccccaccccccgcgccgccggggagggactgacgaaggaaggcgcccaacgccgcccccgcgggcccgcacccccgccccgggccgtggccgccgcgctccagcccgctccgctccggcccgcgcggccaccgcagcgcgcgaggggcggcagcccaggggctcagagacgcggagacagcccgagacactgcgggccagagacggggccctggactgggagaggggcgcacagactattagacagcgctggagagagacgctcctagggccagaacgccgaggtggagggagagagagagaaattcagaggagaccagagacccagagcccggctccggctccgggagagacggacagagggagcggagagaggaaggaggacagggatccaagggaggcccccacgaagtcaagaggaaagtcgctctgggatcagagacaagagagggaccccctccatcagcccccgctccaggggttctggatcatttatggcgtctgacctaacctcaaaagagaaaggattcccgtgattttaaccctcaagggataagtaaaacacttgcacatccacctggggttctaggctggagcaggctttgtggaccccagcggcctggtggtgagcagtacccgccttccacttcctaaatcgggatgcagagattctagtggacaggccttgtggtccggggagatatgggttatgacttctgtttaggggcagcagggatccacagtccagccccaaaagagagcaggagatggccaattgtatttggcggtgcctgagaggtaacaaccctccactgagagggtgccctgcctcccccaggaattggtaaggctgaagcccagttaccatctgtagagccaggcacccaacccaccctgtcccactccacttaacagggaaaaggtcaactggagaattccatccatggtccaggctccagggtcctgcaagctcctctatggaaacagggcacacatggggttagatgggggctctcagtccagtgccttctctggggctttgactccattcacaagattcctgctaagcagtcctccagctcctggttggttacctccaaggacaggaagctcagtatcttaagtgagagttcttccttttattaattttttttttttttttttggctagtgctggccttaagaatgttcttactcgtttgagctgaaatctacaacccgcatgtcccatccatgagttctgctctgccttccgacacctcacccaacaaaaccagggcttcccaaggccttctacccaaactccctagtatggattcacccagggagaacaaccatccacgtttgccagagctcacctcccaggaaacccatgagtcccaagagctctggatcccagagccagatgacagcaccaactccaacagatgtagaatttcagaagctctgggctcctgaatccaacgctgttcaccagcacctgccattggtcaccagctgggagagcaggaatggaccctgcagcctttccccactatgagaatgggactggggatgagaataacaaggactattgattgaacaggcggtatttaccctcatgtactctctcagctacattgcgttatcctcagcatacacataacgaagtgggggctaagaaagttcggtgcttgtggtcatggaggatcaatttcaggcccctgtgctttgtctactgggcctcactggcctcacccttccctgaggtgtttcagaggcctgatagcctggacaatgtccaggcttggccacctggtctgtaggtgtgagtggtcacgcaggagacagaacgctggctgcagaagaagcaatgcgcctgccacagaggggacacgcctgggcctgagctcctccccagccctggctcacagtagcagcagtgaccagagggcatcaagggccc

SEQ ID NO: 1244519 - DNA, 4001 bp, Homo sapiens
cccaaaccacaccatttcttagcccagagaatgacacctgtcgatcacagagtccagcccagtctatctcctgggagttctggggtccatcctgggtgtcccccaagtctggtccccaccccttgcccaactaactcctcagcctccctccttgggtctccctgtttcgcccctgccttcatccaacctgccccccactctccacactcactcctgcccaagccctttctggggctcctgatgccctccagataaagtccatgactctccagggagggcctggaggagctcctcccacccccagcctctcccctttgccactcccgtcttcctcagctggggccagccagggcctgctggctccccagcccctcatgtgctgccccctgttcccccacccccaaggtcctgttcctttgtttcactgtctgatctccctgctggaacctcagctctctaatgcaagagccccagggtggagcataccataggcactccacaagtgcttgtaccatagtaccataccatgggcaccgcataagtgcttgtccaatgcatgcacagttgaatggatggcagggtagagatggtgtcctatgtctcagtaaccagagtgccaggcacagcgcccagacatagtcagcgctcaggtggaatgagtcgaggtaacaagaaggcaaaactggcaatcaggacccctgaattctgccccaagttctacacggggtccctggcagccttgtccttctgttccggagttccacacctagcctctccatcactgactattctaccaatggcaggtccaacgcagcacttcagtggcgcggtcctttccacgtcagacaacattctcgcacacaccctctcattcaagccctccactgccctgcgggtcccacttttcccagactctgagagggtaccagggcccatgtggtggggcaccaccggggtgccagtcacactttgccctttgttggctgtgtggtcataggcaaattccttgccgtctctgagtcagtttcctcacttgtgaaatgaggattcacctcccacctaggaagtcgaggaagattgcaagacaccacctgtgtaacccacccagtgccagctgcctctgtgatgttccaatgagccacagttacattccttctccacgactgacttccccaaatctgaggtgagagccttggctgtcggacgtaggctgttagaccagtcctgccagagcagtgtggctgtggccgcctctgtggggccgcggcttggagggctgctgtggaggccagcctcttctgcggaggccgaccgcaaactcgcatccttcctaagggctgccaagaccccgagacaccctggcagaacctagatactgctggggagccggacgagggacaccccaagcctccctctcccgctccattctccttggagaccccaccagcgccccgtgcccgaattcgcgcttcagacgccccgcgagcgccccctggtgggaagcaaagaacaccctgggcgcccggctcgccccgggaccctcggatgaccccaggtgcgacccccagctggagggagctggccctccgcccctagccatagcctcccagccccgtgcagcctggggaatccacgaactgctccctggagcgccccagactgggcctctgggaacggtccgcgcccaccccaccgccccttgcccgtcactgacccatcttcttcagcgcccgcagcccgggcctcttggtgccgccatcggagggagtcggcggggacgggagagcgaccggcgccgcgacttgggctgcgacctgggcggccaccgggggctcctcgggcgggcggcggcaacgcctccagcggccgcacagcatggcttggcggggggccggggccgggcccggggtctgcacgcggggacagggcagcggggcgccgctctggcccggccccggctctgagcgaggcggcgagcgaagaaacttagcggcgcgggagggagtcggaggaggcagcaggaggtggggcggggcggggcgggaagggaagggggcggggccggggcggtgcgagggcggggccaggcggtggcctggaagcccggagcctcagcgctcgcccctgctcgtgagtccgtctccccttagtccgggcgagcctctgatcttggccgcaagggtgactagagcccccatgctgcggggctgggggtgggagccggcaccggggacgagggccatcctctggcacagacaccctctccttcccgggggccctgactcgaggctgacgcaggaccccctcctccttcccttccgcgtccccgtcgcgccgcaggcctcagcagggaaccagagccgggacaggacgcagggccgggagcgaaggcagaaccccgggagctgagccgctcggggcagcgcgaacccgaagggatgggcatgggggtggggaggttggcagtgacgtcataggattaacctccctgtgccaggccaggtgctgccccctcggagagccacagtctcggagctgacggacctggggagcgtgaggcggagccgagcctggagtccccagcaactggttctgggttcgaggcttggacaggccggcaccccagcccggcacccgcggtgtagttgtccgcgacgtcaacccgtgggtgggcatccgtgtgcaggttctggtggccgagtcgggtgtgcacttactatttatatgcaagcaccagagtgcgtgcgcgaagtgggggacgtccaggtggcagcgtttctgcggccggtggcctgggtccggcagagacatgggcgcacaccgccactttgcggcggccagcggcgtggcatcctacagagaggctagtgctcagggcctgatttgccacctacttgccctgctctaccccatcctcagatctcccaggcccagagattctgcacactggcttgggtccctacgccactctggggtcctgaattttctttttttttttttttttttttttttttttgagacggagtctcgctccgtcgcccaggctggagtgcagtggcgggatctcggctcactgcaagctccgcctcccgggttcacgccattctcctgcctcagcctcccaagtagctgggactacaggcgcccgccactacgcccggctaattttttgtatttttagtagagacggggtttcaccgttttagccgggatggtctcgatctcctgacctcgtgatccgcccgcctcggcctcccaaagtgctgggattacaggcgtgagccaccgcgcccggccctgaattttcttcttgattatcgtattcgcctttgtgcttttgatcctgccgttccttcctccagaaacaaccttccttattctcctggtttacccttttgttattcttgttgttggataggctaagtctacatttcttttaattgttatggacacttaatagttgcagagaattatggagaggcatgtaatgttttgatacaggtataaaatgtgtaatgatcaaatcaaggtaattgaagtaaccatcacctcaagcatttatcattcctttgtattaggaacattccaattccgcttttagttatttgtatttgtattttatttgtttattagagacaaggtctcactacttggttgcccagggtggagtgcagtggcatgatcatagctcactgcagcctcaaagcaattctcttgccttggcctcccaaagtgttgggactacaggcctgagccaccacttcccgcccagttattttgaaatatacaataaattggccggatgcggtggctcacgcctgtaatcccagcactttgggaggcagaggtgggatgatcacttgaggccaggtattgaatgaagaccagcctgggcaacataatgagacttctgcctctacaaaaattgtttttaaaataattaatttaaaaagatacaataggccgggcgcggtggctcacgcctgtaatcccaacacttt

SEQ ID NO: 1244520 - DNA, 4001 bp, Homo sapiens
atctgtggaaaggatggatgaaggtcaggtaagagctgggaggctgggtgctctggttcctgaaaacactggagatggggctcggaggaaaagaagaggcctggaggtggccaggcgtggtggctcacgcctggaatcccagcacttggggaggccgcagcaggtggatcacttgagctcaggaatttaagaccagcctgggcaacacagcagcaccccatctctacaaaatatacaaaaattagttgggtgtggtggctgtggtcctagctactctggaggctgagacgggaggactgcttgagcccaggaggttgccatgagccaagatcataccactgcactctagcctgggtgacagagggagaccttgtacaaaacaaaaacaaaaaacaaacaaaaggcctagaggctggcaaaacggaggccccctaccctgggaatggagactagaaaagggtgaggctgccaagagcattttgggcatcccgcccagctgagatgctggcacagaaccatggacagggaaagctgagcagggaaagtttcctggtaactggggtcaggggaggcagcacagtggccagagttgcagggaggaaaggttgtggccccggggtgagacagacagaaaggagggtggggagcacctgccctctacaggaagcagtccggtcgccctcaccgagccagagggagcagactcatcaagactttgtgtctcaggaggtcccgatgcagctcctgaaaatgacggtatttcttcttggttgtccaggaaaagtcgccgtgagtcaagcggacagaatacagagtgcaggttcccacctaggggtatgaggaactgaatggatgtcccctgcgtgggtccccgcctccccactctggccagccctccttttgccccttccctggggccagcccagccaccttggatccattccgggccgccctccctttccccctccctggggccagtctggccaccttggatccgctggtatatctttcggtgcccaccacctgggctgtgacagggaccccaggtgcgaacaccaaggggtgcactttcagagactgaagctcatagatggccagaaacgggtgcatccggtcggctgggaggaaagaaagtcgaggagtgtagaccacaacaggccccagccccctggctcccgaacgcctctcctccctgagggccatccatcttccctgtgtacctgggtcctctccctccttcagggtgtccacctcatcggactccatctggagctggctggagtccagttcgtccccagtggggaagaggctctcaggggtcgccgtcatcctaggaacattgggaagcctcagggaggcgagctgtcctgcagaacccgccccccatcctaactcccgcaggtcctccatctcttccagatcctcctcttcccccacggcctcctgaccgcccgcggatgacgcctgaccagtttgcaacgccccaccgaccccttcgagcccccatcccctaccttagtccttcatccacaatcccagtcccgccccccgccccccgccccgtcccgtaaccagagccccggggaacacccagccaggcccggaaggctccgacctggggcggcgcagcagctgcgcggggaagcggccctgggtggtccggagagcgcgcggctacggggctcacgccaggccaggcgggccgggggcaggggtccaggcgggaatgaggaagttacgcgatcccagccgggggtagaaatcccgaaatctgagcgtgcgactgagtctggaggccccgcagcccgagcccgttccgtccccgcccgatttccgagacccgggacccccgcgcgccccttcccggccccctcaccctggcagacggagccagcgcccgcgggggttccggagccaagagagcagaccggagctgcagccggagcccacgccccggccgaggcggggccggccgaggcggggccggggctcagggcctgccctcgggggcggggcggcccccggcctcacctccgcgggattctcgtctgtcctgtcccgcccccgctgccctcggcccgccccgccgcccagtgcgccaccgagagccccgggcagggggccgccctgtgccctgcagggccgcggggccgcgtagctctctcggtgcggcgggtaagtgctgcccggcgtcggggcgtcccgcgccgtcggtcccagcgtgcccggccgctgcctcccggggcaccccgcgctgcgcgcatccctcgggctcggcgcccgccccgggcccctccagccgcgggcgctgcctcggcgcccgggggacgcgcctccgctgcgggagctgccggtaggtgccccgctcccggacccgctgcgagccacatttggcctagcccagatagcgtttgtacctggaaggaatgagggcgtaaaaggcctgaggggtggtggctacaaacccattagtgtatgaaagcgggcattctttcattcattcaccaaacatttattgcgcgcttactccgtgccagaaattgagagtatggtagtaaataagatggttagagagcctgctcagctggaattggcagtctagggggaaataaaattttttcgggtattaaaatacaagatatttcaatcttttttaaaaagcagatttatttttctcttttgatatacatgtgggtttctagttttgcccattgttttagctcctgtaaacattcctgtaagtttgcgtggatagttttcctttatcttgggtaactagggagtggagttgttcgatcatatcagtgtgtgtttaacttataagaaactgccaaacgatttttttctaaatggtttttccattctagatttccaaaatcagtgtatggtggttccagttattccatggcatggccaacgttggatattgtcagtctttagcgttggccatttaatgggtgttgtgggcacatcattgcaatttgatttgcatttgtctggagatcaatgatattgaccatgtttcatgtgctgattggccatttgtatgtcttcttttataaagtgcctattcagtcttttgctattttttatttatttttatttttatttttatgagacggagtctcgctctttttttttctttttttgagatggagtcttgctgtgttgcccaggctggagtgcagtggcgcgatctcggctcactgcaagctccgcctcccaggttcacgccattctcctgcctcagcctcctgagtagctgggactacaggcgtccgccaccacgcccagctaattttttttgtatttttagtagaaacggggtctcaccgtgttatccaggatggtctcgatctcttgaccttgtgatccgccctcctcggccttccaaagtactgggattacaggcgtgagccaccgcgcccggccagagtctcgctcttgttgcccatgctggactgcagtggcgtgatctcggctcactgcaacctcccccttccaggttcaagggatttccggctaatttttgtatttttagtagagacggggtttcaccatgttggccgggctggtctcaaactccagacctcaagtgatccgccctcctcagcctcccaaagtgctgggattacaggcgtgagccaccgttcccggccttttgctaatttttttttttgagacagagtttcgctgttattgcccaggctggagtgcaatggcgcgatctcggctcactgcaacctccgcctcccgggttctctcctgcctcagcctcctgagtagctgggattacaggcacctgccaccacgcctagctaattttttgtatttttagtagagacggggttcctccatgttggtcaggctggcgtcgaactcctgacctcaaatgatccgccctccttggcctaaagtgctgggattacaggcgtgagccaccgcacccggtcttaaacttataaaacaggcaaaaacaacctatagtgatggaaatcaga

SEQ ID NO: 1244521 - DNA, 4001 bp, Homo sapiens
actgcccctgggcagctgacctggcccacgccacttcctcccacaccactgcctccttaccctgctttatgaagttttcttggcccttctcagtgccctaaatgaaatattcatgacttagttggcatctccgtggcaacctggccttgtgcccttgtgccctaggatgttccagctcctcacaaatactggcacagaggggacattccttgaacagtgaatgccactggacagcctcgaagtcagcgaggatgctgggaggccatcccagaggggatccgatgggaccttggtctaggggcccttgaagggtcttcaccaacctcagcttctacgactgtaaaagcaactcaaacagaactgtactgtgcatgcctggaggtccccaaacctcccgttaaaatgaccaacacatgggaggacagctcttgtggctgccccaaagagaaggagacatcctcaatatgaaaaccacgtgccccactctgctcccacatggcgtgcaacatgccccacaccacccagagcagggagggaccctggctgactctggagaggctgctctgaggcccaagtcaacaagaggctatggctgtgcagaaggaacagcgcggcggtgaccactgcccagcctggacaattcccagggctccacacatctctcggtcactgcgaccaccagtattatcagatccaaccgttgcacgtgcaggcgtgactttctgggtgcctgagtgatggagacagagacaggcccaagagtctgtgagtgcagatacacaaaaggcaacagcaggctgggccgccgaactgggccaggatggactgagaatcctcaggtgggacaaggatcccaattattcacatttcctggtcccttctgtccccaccccatgagagaggcgcccccgccagaaatatgtgttcccctccttttgcagctgggaaaacaaccgaatgtcctggcgctgctttctagaacatgttcaggtctcccagagcccagtggcctgagattcactgggcagcaggtggccgcctctccccagagcccttcagtctggaagtccaagcacaaccctggcgtccagctcccctgccaccaggatccaggttaccagaggccgtccggggatctccggcagcgtaggagggcgggcccgggctgcagcagtcacgaaaactccgccggcggcgcccgaggagttgctaggggaatctgctccgcctctaacccggcacacgcaggcccacctgcttccagcatgccgggacagttcactgagagaaccgcccccaccgcggaggcaccgagggtccggctcgcttatgcccacgcagccggctagaccttctgtgggggctctgctttctccgcgttacaccaccccgaccccacaaggccacgaggaaagtaaatgaggcctcagcccgtccccagaccccctcccctaagtgtccacctttgcgcctaggaccccgcgtgggccaagccggccttctccgcttggaccccgccgggcctacctgccttgcgcagcagaccgatttgcgagccgttgagggccatgtagtcgcagtcggtgacgacccgcactcgcaccccacgctggtgcagcaactgcacggcgcggcccagctgcgggctggagaaggcgaacaggcagagatccaggctggcgcgggcggccagcagggcacgcagcaggcggcttagcgcgctctcgccgtggggcaggccgcacgggcagccctcggggagctcggccagctccgcgcccggagcccgcagcagggcctcggtacaggtcacctgagacgggaagaacagcgcctcgcgccgcggccgccgccgcctggaccgcagccagcgcagcacccaaggcagcgcctccagagtcagagccaggcccacagccgccgcggccgccacctgccaactcaaccgtcccatgccgccgctaatccgggacccacagccacgccgccgcagcggagtctgcgcgcccccagccctagaccgccaggccacgcccccgtcacgcgccgccagcggccatgtgccaggccacgcccagccccccatggccacgcgccaggccacgccctatcacgtcctgccaattgccacgcaccaggccacgcccccgtcacgcagcgccaacggccacgtgccaggccacgtgccaggccacgcccagcacccatggccacacgccaggccacgcccccgtcacgccccaccaacggccacgtgcaaggtcacgccctcagcccccgagggccacgcgctaggccgcgccatgcccccacaactgtcacgcaccaagctgaacccacgcctcccatcagcccgcccccaaccctcaacaggtgaccacgcctccctccacgcgccaggccacgccccctgccacagacaccctccaccccccaacgccaggctgtgccccccattttccttccagccaggcgctcggccacgccctccaggttccacctcccaccacgtgccaagccacgtccccaagcccgcgccaccaggcagcacctgcacacccgcgggccacgggccctagcacacccgtcacctgcccaggccagagaccgctctccgcgctagaagccacagcaaccccggctttcctcgcatggagcacagcagagctgctctggaaatgtggggtcacaccttcactgtcttctcgggagcagctaggctgggctggggaatgacctgggaacacagataatcagggaatcaacacagctggaggcagcattggaacccagcatactggaggcggtgtcggcccagaggttttttcctagcccaagaggttttttccagccggcgttgttggaaggcctgccctgctttaagcataaacagaggaagagactaaggcagccgagggcactgggccgggggcatagggaaacggggcaatgtggtggtctgggctggatcctggaaccgaaagaagacattcacggaaaaactggtgagagccaaataaagtctggagcttaatcgcattgtaccaatgtcagtttcttagctttgacaaatgtatgaaaggaatgtaaaaggttaacaaaggaagctgcgtgggggtaaatggatctctctgttctatattcgaaacttttctgtaaagcaaattattctaaattaaaagtttattaaaatattaaacttgcaccttccatatgatccagctatcccactcctaggagaaagggcgggatccattaacacaagcacgtgtcctggcaggcgtatgtgcctagaacaacccaaaaaggcgtcagcaggtaaacaggtaaataagcttttgtatatctgtacaagggaatgctatttagcaataaaatagaatgaagtggcctggcacggtggttcatgcctgttatcccagaactttgggaggctgaggcaggaggacagcttgagttcgggaattcgaaaccagcttggccaacatggtgaaacactgtctctaccaaaaaatacaaaaattagctgagtgcgctgacgtgcctgtgatcccagctactcgggaggctgaggtgggagaatcgcttgagctctggagactaaggttgcagtgagccaagatcatgccattgcactccagcctgggtgacacagcaagaccctatcccccccccaccaaaaaaaaaaaaaaacagtactcacatgtgctacgacgtggatgaatttcattaatattgagtgggaaaagccagacaaaaagagtacatactgtatgattccatttacataaaattctagaaaatgcaaactagattgagggaaagcagaccagtgtagcctggaggccaacaaagccacaaggaagtggagtgatggatgtgtgcttatcgggttgactgtggtggtttcacaggtatatacatatgtcaaattgtatggtgtaaataactaaaaatgtatgtcagtgattatgtcaataaaattctttttttttttttta

SEQ ID NO: 1244522 - DNA, 4001 bp, Homo sapiens
ggaagggcgggccagactgaggaatggcacaccctctggaggcaggtgtagttcagggttttgccctccccctccccctcctcctcccttccccctgtcctggaacttcaactgtagactggggtctgagagaggccacaaacccaacccggaggccagtcaggcgggaaccgtgccatcctcatattgctcccagactgctagagccaagagggggaggtgggggagggggccagggacacctgtccccaggctcagggaaggggggagttgaggtggagcatgagggaggcaatggcctggtaaagccgaccctgcccaagctggaagcttggggacgcctgggtcctgcacccttcctacgtgaacctccacctattttctggaaggtctgagtggggctgtcagccacaccacatgtggcaggtactgaccaccctcttaggctaactcccctaatcgcagtgccctgcttccctccctcccccctcctctatatttatccaccctccgcctccgccaggtgctggcgccggccccggcggcgcagcccgccccacccgggcaccgagccactgggcctgctggggacccctgcgcgggggatgggagcctgacccgggccacagcacacgggagtctggccgccagtgtgcaggagggatgggggaggagacgtcaagggatggaggtctcccacaccaatcgtgcctccgtttccccacggggagattcgacaaaaccaggcagcagcccagtgtccctcaccatccatcccctcaggggtttcccaggagcctcacccgggaaagccgagagttctgtcctgagtggcagggtaatgaggaggggtcctcaaagagctcccacctccctctccttggggtccccgccacagaccccaatcctgggatgacttctccccctcgtccaggtctccgcagcgggagctctcgcatctggcctccgcacttgcgaactgggagcggagggggacccaggcgttcgagccgcccagccggcctcgccacattcctcggcgctggcggaggcggaaggagacgggatgggacgcgggcccagcggggaagggagaggcagggccaggtcgggccacgcgtgacgcctcccctgcctcagggcccccagcaggtggatagcgcccagcctgcagcgggaggcccacaggcacatcccgagtagggctgctgctccgagagctcccgggggctttggcccccaggcaaaaaactctccctcatccctagttcgccaagcgcgcagcgtgtggctggaggctggagcggatcagcgtgacggccggttacagcgagagtgattgagacgaggctccgaacccccgggacttaccctcccgccgcccgctggactcggggtccgcagctcaaaggtttcctcgtcctcgtcctcgtccccgtccccgctaagctcgccgtccccgtagtcccggtgcagaagagtgaagcctcgacggcagcagagaagccaccatagtcccccggggagaggcatccgggcgaggagctgcggatgggggcgcgggcagccgcggccgagcagtagggggtcggaggaactggcggggctccgacccgagcaggggaaagatgaggtgggaggagcagaagggagaagaggacagggaggaggcagtgtcctgggctggggtgcaaggggacgctagccagacgctgaggggggctcagtgtctgggcccccggaggggggagggggaaaagcgtccagggccccgggagaggagggagcaatgtccggagctgggaagtagtgtccgttggagtgtccagccctgtggggggcagtgtccggtgcagcgtccgaggtgggcagttgtccaagctccagggagggtcgtgtccggtagggcgtccggtggccggggcccgggccgcgcgcgctgcgctccctgcagccccgggactggcgcgctgggggcgcgagcacagagctgggaccccgcccccccggccccctccctcccggggggccccccctctctcttctttctctcctcccttctttactaggcagggtccaggtttcgtcacagtctcctctgtccaatccctgtgcctggcgccgggcgcggctaccaatcagacggctgaaaccgcgttgggttgcatcatgtgcccctggcttggtgacagcggggaggggcggggaaacagggagggaggggacgaggctatgttagccacgccccagtctctgaggtcggacgcggggtgctagtgacgtcacggaagcccgccttcaggctcttgttttaactcttggctcaccaaccaattaaaaaccctgttgaggagttttggcacaggacagaggaaaacccaactgccgctctctgaacccctgtctcgtctcagggtccctgagaaagggaaacgccttggctactaagaggatgtccagacctgcgaggacacagctctggaggtggccctccacgtctggggagaaggagtccagtttctccagtttctcggtctgattcagctctcccccacccttttttttttttcttccagacagggtctcgctgtcttgcccaggctggggtgcggtggagccattatagcttactacagcctcgaactcctcggctcaagggatcctcccacctcagcctctccaggagctgggactacaggcgtacaccaccatgcctggctaattttttaaatttattttttgtagaaatggagtctcactatgttgcccaggctggtctttaactcctgggctcaagcgatcctcccagcttggcttcccaaagtgctgggattacaggtatgagccactgcactcggcctcacctccttttcgaggtgaaggagttgaggcaggcactctgggaaggtgcagacctaggccggaaataaaatcgaatatagagctcacagctcaccgaactcagctggggagactgacttggattctaaggaattctgtggtctccgaatacagtggaggcctcttagggctaatatcctgcggctctgtataggaaggggttaactcaggcgctaggcggccggggcggggccgcggcctccgcgggcgcgcgcgcgcgttgctgactcagcggcgattccagagatcttggatggagggttccaggtcggtccccagtggctggcgtgtgggaccctttgaggatcggcgccgtctccgggccttccctggatcctggcccctagaggccgtgggggaccccttttcgccgctgctgcgggaggctctgaggactgctagcctgggcagggctgggctgggcggggaggggcggggaagggcgggacgggcggggccgtcaggccagcacctcccttgagacctcctcgccacgccccgcccttctcgaccctagactccaggctggagcggtggggacagctttgctgaccgatattaaaccgcgagaactgtcgcacgtgaacaccatcctgcccgttgtgattgtgtaaaacaaagaccaggaatcaatgcgagcgtgtctaggaggccatctcggccgtggcctctctccacatgagagtggcctgtactgagagattacctaggaatggagataccacaaccatcttccaggtctggatcccaggcccttgcctgcagagaagttttttcccatatccaacctctctctttccggccagctcagtgcatttcctctgacccagtccccagagaagatggagaacagcaaatatccctcacccccaccacacccgtgataactactctggaaatttgcagattgcaatccctcctaggtttttcttcaaggtggaaaaacttcaactcaaattttacaattcattttttcattttttctttccatcacagacactaggaagggattgtaaagtggttatgaaatccaaacgcccaccaaaaacgggaatcccctgcccctccccctccccccacaccacgcaaaggcccacagc

SEQ ID NO: 1244523 - DNA, 4001 bp, Homo sapiens
aatacaaaactagccgggcatggtggtgtatgcctgtaatcccagctactcgggaggctgaggcaggagaatcgcttgaacctgggaggcagaggttgcggtgagccgagatcatgccactgcactccaggctggggaacaagagtaaactccgtcgaaaaaaagaaagaaagaaagaaaaaagctgcaatcaaatggcccacccatctgatgccgggtcctcaggattcagagaaaatgtgtaccaaaaagcccccaggaaactataaatgctgagcatgggacttgggtgcctctggaatgtccttctgcctcagctactctgagataacatggttccctgtgttcatggaacccagatggccaaaagtcaatgatccagcacttaaaagaaaagaaagcgattcaagagcctctgtacccacctaggcctcagcctccccaggacctactcacctatactcttcacaacaggtaacgttgcctctggcacccatcatatcccctgaattcagcatcaggactgatctgccatcagctctggcagggagaggcccttacaagtgccaagaaaaggaacacgaacaatattctgtgaccacagccaacaccacacagaacttcccagaagctctccagggcgagaacaccaaccagaaggaagtgacagcttccatcattctgtgctaagtgagctgagtgagtggccgtctctcaccttccagatatttgaatgatacctaccattccagcagccagcacaagtcatttaatatgaatgccaaaaacacaatccctgaggacaggtgcaggagaccagatgccaggaaaaaccccggccccacccaagagttggggagagcccactgctcctccacccttatttaccacctgagcccctgcacccgccaatcatgctgctcagtctgtaactgcgggtctgagtgagcacctacatttggctgttgaggggcagctggtggagttggcaggcgactctgcactaagttctcaggttgaatgggagttgggtcgagggaagcaatggacgcagagttggggtgaagagttgcggtgggtcagcgggggtgaaaggacatggagatgtcatttttaacaagattgggtgagggtggtaggaaaggaggcagcaagagttcgggacagtttggcaaagacttagggatgggctgtcctcagtacggcaggagacgcaaaggaaggtatacagtggctaggagactaaggacgagaagacacagttaagacttggaataaggctgagatcggagttatccagaagaaagcggtgagctcaacagggcacctactttgggggtgggtcttagatgagagggcggaggtagaatgtttgggatgagcagatcttggggagctagacgggggatgggggtgactgggataagaaagctgagccagaaaaggggaaacctgaatggtgggtctcggggaggtaagcgcggagcatcgggattaccagaggggtggggagagaggatgaggtgtgtcagggcggggcgaagggacgtggccgagatcggtgttggaactggggtaaagtggggtcacgagtgaagctgcatttaagcaagaccgctggtgaggggatgcgggcgcgggctgggggctggacagacggaggggacggggccacagcggcggtgcagggggaaggctgggtcggagaggagcgggcgcgggctggacagggctgagggccctgaagccgggcagtctcagggtaaccaggggctgggaatcgcggagggagcgggaggcccaccgcccgttcgcgcctcggccctcccaccactccgccgccctcctcgcatcttgaccccctaactcaccaagcggagcgaggagcgaggcgaggggcgctcccggccgcggcagcccctcagcctccgagccgacgatgcggtctctcggccactgacaacaggaagcggcgccccggcccctgacgccatcacgttggctcggcgctccggccctgccccggcccgcggtgccaatcgcgcagcccgaaggagccttggggcggggccagctgctcccggaagtccctgggagctgagccccggggcagatgcgaggtctgggaggctggggaactgggggcgcctgcagggcgcagagaggcgaaggcaccggtgtcagggagaacgcatccgttaccgcccgcctcccgcaggtctgcgtcaaactagatcctggcttctgggttcctgacctcgtttggcctcagaaccatctgtgcaacattggggctgtcacttcgcctccctcagctgaagagttcccacttgtgagtgggactaataacgcctgccctatctttgcctctccgagggcagcagtgcagcccgtggggcggagcccgggcccaaattggagcctccgccttgcgctttcaggataaacatagctgttttgaccacactttatcccaagggaacgccttgaggtccccttgggcactctcccgtgtgtaactcgcccattagcaccgcctggcttgaagcttaggggtctggttattctcttctagcccgtgtagaggatttctttcttcctttctgctttttttttgagacagggtctcactctgtcgcccagactggagtgctgtggcacgatcacggctcaccacagctttgacctcacggactaagtggttctcccacctcagcctccaagcagctgggactacaggcgtgcaccaccacgcccagctaattttttcttttttctttttttttttttttttgcgacggagtctggctctgtcgcccaggctggagtgcaatggcgcgatctcggctcactgcaagctccgcctcctggattgacgccattctcctgcctcagcctcccgagtagctgggactacaggagcccgccaccacgcccggctaatttttttatgtttttagtagagatggggtttcaccgtgttagccaggatggtctcgatctcctgacctggtgatccacccgcctcggcctcccaaagtgctgggatcacaggcgtgagccaccgcgcccggccaatcttttcatttttaaaaaaatttgtttattttgtagagacaggggtctcactgtgttacctaacctggtctccaactcctggcctcaggcgatcctcctgactcggcctcccaaagtgctgggattacaggcatgaaccaccacacctggcctgtatatcttctttctaacgcaaaagtgacatttctctttcagatgaactcggaacaaaatgtcataagtggtggccacaggtagtgaagagcagggcagggagtgttggcagggacccatgctctggacactttatacttgcaggctttggtcaattgggagcctagggcctgagtgtggatgaggagaggtactgctacatgccagtcctaagtgggcacaggggttggctggggaacgggccagttcttggaagcaagcttcactgccctcggcctgggcgtcctgtgctcttttggcttctctgggtaggaaggtgtccctcttatctctgcaaagttcagagtcccactgtctgctttcaagtataaaaccagcacttgggggtatgaccctggactgtatgagggccgccctttcagtaattctctctccaggagtgagaacctccccttctcaattttagactagatgggtctgagtgtgtttactgcagttaatggttgagcaggaagattagaaataaggacatagagacaaactattctctcggtgttaaactcattttaaacaaagtggaaagtaagggatttagtagggaaatcctttcaccttggcaaaacgatagtatacaactggcacagcataatccttggtggcttggcacaagcattccctgtcccccatcaagcacataatgtccctcagtaattccactgcatttttgtgcagcggctgtgtgctggagctgtggggaacccctcggtaat

SEQ ID NO: 1244524 - DNA, 4001 bp, Homo sapiens
gcaagactgtctggcgatcggcatcctggatggagaacttggggaggaagggatgccaggtctgtagcacgtggccaatggtggtgcctggtggagcctgtacttccatctgggagtgggaagcagacagggtcactgcggaggcaggggtcccagctctatcatctgtctatttggccctcactaaacctcccatccccacctgcccactcccacctgatccaggcctcatctcaggtggacctcatcattgtcccgccccaccaaggcccgccctcccggccccctccctccgcccacctcctggaggccacaggggcagcagctgcagccacagtgcagcgggcggagcaaacgcagcacctcacggtccccggggtcggccaggcggacacgcagcggccggcgggcgccacagcacagacgggcgcagcagttgctctcctcggccgcctgacccaggggctgcccggccccagagcgcagttcataccgattacaggtctcccagcctaggaacgctgcccgaggtgacacggggagactcgtagagcctcgcgcgcccaggagcccaccatccgggccaccatcatgaggtccaacctcccactccttctacttactttccactcgctcagccttctggtgaatcaaaatctgatcaatctggaaagagaggggcggcgcgcacatcagctggcccatctggacgcccaagtcccctcccagtcatcctccctccctccttcccactcacctgcaccaggaattcgaggccagaaggcacccctggcagtggcaagaagggggcagcagaccccaaggccacggggccaggcgaggggaagagggcgaagccgggagctggggcaggtacctgggcgggcactggcgcctgcccgggcccaggatgtagcgccggctccgggtacccaggggtgacagggtagggaggtgggggcgaaggggcgtagcctttggggggcaagtagcctgtaaagcggtgggagcaggatagattagaaagggactcaaggcctcatccccttattcctcagcccatgggccgcgaggcttcgggggaaacgtggtggcaagaggcagagaaagatggggcaggggagcagggtggaggttccccggaaggaagggaggggccccacccagccagtccgagcacattccgggaggatgtgttcaaacccggctcccaagtccgtgggggggataacggagacccccagacttgcgcgcacttacctgccatgggagaagggctggggttttcgagatgatggtgtctgggtggcttagttctggaagcggaggcaaactcggagatagccagacagacacagagacagacacaaagacggagaggcagctgcgcccggcgccggcccagggtctcttgggcggcgcctctgactcggggagaaacccaagtgtcagtgggcgggaccgggtacctgggaccctggattccctcgggggccccagaaccgccccctccctttgttctcccatcctgcggaggaggctgtgggccgacggcaggacagatggacccgcggtcagaccgacagccccaccccaagggcggtctccctgacccctctgtgcccccgctcacctggagcccccagaagagcccgggtgcctagcactcggcagctcacaggagctggcggaggcggaggcgggcccgagctcggaccccggccccgccccccgacccgccgagcccgccccctcctgggcggtgcgtttgcgccgggaggaaggcagccgtccgctgccccgggaagccgatcgtgggctttgctcctcggcgtcgccgacgttcccgccccttccgctcggactgcagatgcccagagagtaggagcgcctggagaaggcggcggctggtcccgggccccgcgaacgccgccaggccggcggcgtgcgtgctcagcgccctgggtgggaggcgagggcggcccgggccgcgctggcccctgggctcctcctcccaagggcagtcgggcctcgctgacgcagcggaacacccttcacactcactcattggcttccaggactggctcctggctcgccttctgcctcccaggggcgacctcgccgtcttctctccctggcacagcggtgacccacacgggcacctcgcagcgacagcagtttctgcaggtgccccagccacgcgggtgacaggccgccaaacggtgtcagtgagcgtgctcaggccgcctagagggccagaggaggaagcgcggtcagaaaagacccccgagatgagtgtcttcgactggatcctgagccaggaccagtcctgccttgggggccactggctgagtggcgcaagagatgagtttagaaacggagtgcagtccacatacagggcgggttgtgtggaagctgcgatttggccccacgagcagcgaggagtccaccgagacatttttagaacaaagaaggtcaaatgtgtgttttagaaagatcgtggcggggcgcggtggctcacgcctgtaattccagcactttgggaggccgaggtgggcggatcacctgaggtcaggagtttgagaccagcctggccaacatggcaaaaacccatctctactaaaaatacaaaaattagccgggtgtggtggcgggcgcctgtagtcccagctatgcaggaggctgaggtaggagaaactcttgaacccgggaggcagaggttgcagtgagccgagattacgccattgcactccagcctgggcaacagagcgagactccatctcaaaataaataaataaataaataaatatttatttagacatcaccaataaggcgaaggcatcaccaataaggcgatagttaggccgggcacggtggctcacgcctgtaatcccagcactttgggaggccgaggcaggcgaatcatgaggtcaggagatggagaccatcctggccaatatggtgaaaccccgtctctactaaaatacaaaaaaattagccaggtgtggtggcgggcgcttgtagtcccagctactcgggaggctgaggcaggggaatcgcttgaacctgggaggcagaggttgtagtgagctgagatcttgccactgcactccagcctggcgacaaagcaagactccgtctcaaaaaaaaaaaagaaagaaaagaaagaaagaaagaaagaagatgatagttgacccagaacctaaaggagatgagggactgagctgtgcagattactgggtaagtgtttcaggcagagggaacagcaagggcataggtcctgaggcagaagaccagtgagactggaatggagttaatgaggggaaggtcagaggggtcacaagaagccaggtcacgcatggccttttagtccactgaattataccctgagatgggaaatgttggagggtctggacagagaagagacgtgagacgtactgcagtggttctccatgtggaggttccccctgtgccctagatgccacctgaggtgaaggatggaaatgcagtgagagcactggactgggaggaaggagcctacagacccagccttggctctgccactggacctttgggtcactctggtttttctgtttttttgagagtctcactctgccacccaggctggagtgcagtggcgctatcttggctcactgcaacctccacctcccaggctcaagcaattcttctgcctcagcctcccaagcagccaggactacagccaccacacccggctaatttttgtatttttagtagagacagggtttctgcatgttggccaggccggtctggaactcttggcctcaagtgatccttacaccttggcctcccaaagtgttgggattacaggcatgagctactgcacccagcccctttgggccactctggaggtcccctctaagggtttgtttgtttgtttgtttgtttgtttattgagacagggtcttgctctgttgcccaggctggaatacagtggcatgatctccactcattacaacttc

SEQ ID NO: 1244525 - DNA, 4001 bp, Homo sapiens
tcctggtctcctcaaccgtctactaccccaaccctactctgaaggggccgccctcagccaggcccgggtctggccactatctcccagcccatccttgttacctcccaattcccccttccccagccctctccgtggttcacacaatccagccaaaggttcagatcctcccctcataaactctgttacacccagagttcagaagatcacaccaggttgaggattcaaaggagcccagaaattattcataacatatccaactctctcctgtttaccttgatttttttaaagtatcagttacccataaagaccctaacaaatatgaaaaggaaaggcaattataaaagatccttcattattccacgcacaagagtcaaagattttgccaacagcctcactttataaatgcaaaaataggtccagagagagaaagtaacttgtctaaagtcacacagcaagtgagatggcgggactagaagccacgtctctggccaccctctgtgtggtctccctgaaaattggtggttctcaccagcagcttctcggttcgtcagctccactgccctctgcccatacttcccactgtcagcctccttcccctcccacccccaacatactcttcttctcaatagggacccaggtctgtctcagctacatgctgggaccattaaagtcaagaacattgccactgacactgtgcctggtgccagcacactcctgagacacagcaggtcaaccacagcactcacctcaacagcgcctccctcaccccacctgaggggcacccatgccaatgatgcacaggtatctatcttcttaatcatctctgctgaggggccaggctgcaaattacccatctccccaaccccagagaaagtctaggtgcttaggggagaacagagactatgaaaattataccatgagggattccaggtagatctcagaaaggacttccaggtgggagagatgagtttggagaactggtaggggggaagaggagtgtgcagaatgggacgcctccctccaccccctaccccagtgccccatctagagccagagtagctgaaagccaaaggctgccagggcaaatgggagcaggtgtgaggagggggactcttgaggctgggggtgcagaagcagcaagttgcttcttcctgggcccactgcctctctactgacaccaaataggcaagggaaggtgaccgaatggctgctgccttcccaggcagagacgctgtgtccccaccatccccctggctgctcccacctatccctagcctggatcagctttggggtcgggggtgtggcagagaagaggaaaagaaggcatggctggggcaggggcctccccaggctcccatctcatcagaattcagccttgcctggggtgatcaggggtcctgatgactctcccgctgtcccctttcagagcccatggccacatagagccccctctcctaaggtccctccagtatccttccaggagagaaggagaggtccgggcatcggtgtctccaccgtcactcacacaccctatgtgtttgggaaagtggggtccctatccacctgcccacagcccacagctctcctggcctcctgcggacaatgcccccctcgcggacatcgccaggccgtccacacctgcccatgcccacacctgactgcccgtccctccccgcccccggcccacccgggccggctcccgccagtcctacctgctccgggctgggggctcagcgcccgggcagcctccctgagcaccagcaccaggagccagagctcgcctcgcatggtgggtgcccggacctgcccccggcctgcttgctgccccggtcctgacgagggagggggccctggctcaggctgcggccgcgcggtccccggggctggcggaggggcgggcggcgaggagacggcggagcgcggggccgggcgagccggcaggagcggcgagagcgcgagcggagctggaggctgcggcctccgggagcaggcggggagctgggggggccgctgggtcggtgggggtgggggggagctggggcagggggcggggcggggggcgcggcgtcgttgggggctctcccggcgcctgccctcagccctaacggagcgctcccctagagctctgcagccgctcccaaggcaaggggtgcagagtaggggacagggcgggagcccctcgggctgagagaacccctagaagcatcagccgccccgcgctcctcactgagctcctggctccctttccctcctccgttccgccgggaaagctgcagagagaaggcccgaggactggacccctggaagggacaggcgccccatccctgggtcacgggcccctgactgttccccgcccccagctcctccaagctctgcgacttcctgagctgttcttcggaattctgtgcgtctctgatgctttgtcctccagcccccacccccagaaatctccccctgcagcaaagacccccagcttttctccccaagaggggcctgaatcccaccccccttccatgactccaccttatccctccaccccccatttccagcaccgatttgccccccaagcctagcagacgtgagggtggagggggcctggctaccccttactctgcaacagtctggacccctccccacgagtaggtaacccaggcctcctgcctctctggggcctccaggcctactcagggccagacccaatcaatcttcagagccagccccagacgaggaaatggctcaccccacctgtcaccaccttctgacaggctctggggatagataatctttttattttttcttccaggacagaataaaaatacccgcaatgtaggatatttaatagacggcaaggaatcaggtcaggacacgaagatgcctcttccctcccctgacctacttcgttcttgtgacggcaaggagctggggcgctggagagtgggagacggggtgagggggcatcctggcttctagtgggctggggcctagggactagaaaaccgcggagaggaagggtgcgaacgctgagcgccattggagaaattttccaggaggagggatatgggcggggacaggagaaggtacactgtgggctggaagagacggattccgtggcactgaggttaaaaaaaaaaaaaagaaaagaaaagaaaaaaaaacacctaagaaaggaaacaactaaaggctctctaatctcttagaacgccggttcctccttccgccgggcccagagtcccagagactacctcctccagccctaaacccaatgtccccttaccgtggaacaaggcaaggccggtctgtaaattcttcttgatgtctaatttaaatcccaacttggcggactctcaaacagaatcagataggcagctacctccagctgcagctacttgctgccctcaagtggccacgtgacgagccacaaccctcttgtcctgcgggtttcctctttccccagcctgcccaccccctgtctccgacctcctgccttcctcgaggtcaaggtgagaagtctcgggacggattccagctccagccccggcgtctttgcacattcctccatctggggtacctcgtggtctgtcttacaagaagagctcaggctgaaacataaacttgtaaatagtagaagcaaatgtgtaaattttaacgtaagcctctagaacttgagatcgtaatcacctgcagggtgtgtgtgtgtgtgtgtgtgtgtgtgtgtgtgtgtgtgtgtgtgtattttgtttgttttttgagacaggttctcgcacgttgcctaggctggagtgcagtgctgcgatcatagctcactgcagcttccaactcctggactcaagcgatggggagcgtatatgaaaacacagatttctggactccaccctcaagtttctaattcattaggtctgggatgaggcccgagcgtacccaggtaatgctgctggtcccaggaccacattttgagagccactgctgttgaatccccagttcctttcagtccctcactgctc

SEQ ID NO: 1244526 - DNA, 4001 bp, Homo sapiens
gaggtggggttggagcagccaaggaaatcagctgattcatagcctcctaacgtggcccgcccagcgttacagggagagaggctagcccccttcagtctcggcttggcagaggcgcgcccaactgagactcccgtgcgcaggccagccttgaggcacgggacagggagcaggaatgtggatgttaaaggtttctgcctgaaaatgcagcagttcacgcacgcgcgcgcacacacacacacacacacacttccctacctctagtgtactgtgtcatagaagctcatcactctcaatgattcaaataattctatattattttacgatttgaaaggagctgctattttagctaattgtatattcttacggtaagtaaaaataaatttgaaaaagatcttcaaacaatgatctttttaaaactatcgtgttatcagattaaaatgaagtgtacttgtaaacactgcatttacagtgcccgttatatgccaagcactttgcctggactttatatgcatggtctgtgagaggcagtatggtgcagtggttaggcactctggctctgggctccaacaaacctaatcaccctgcttacttttgttgtgaatttgggcaatttctcaagttcactgagcttcagttttctcaggtgcaaaaggaaatagtaatgcctgctttaaaggtttatggtggtgattgaaggagacaatatgtacaaagcagttaacatcgtgtctgcaacataataagggcccagtgcccaaattgccaccactattattatatcacatttaactctcacatcaacctttcagggaagacctgaccacctctgcactaaagtagcttgtaactctgataggtaggtaggtaggtaggtagatagatagatagatagatagatatagatagatagataaagatttataaatgaaagtgcatatgcaagtagaaaaaaaagtctaaagacatggcagtgttttctttcctccacaggtcattttataagttagatttgctctagaaattattactttgttttatgccatttggacatttatttatttaaccaacacttatgtgatcacaacatactcaggactgttctaagtaagcactttagaaatatgagcatatctaactcagggttttctttcccttcctttgtgattttcaaataaactttttaataaagtctaatacacatacagaaaagtgcatatattgggtgctacagctcgcttcttcctttcttttgaacccaatagtttaatcaataaccacccaggtcacagccacaccatatactgccagacaggtaaacccaacccatctgtccctcactgcctctggcctcctgcctggttctcaatggtggcagaggaagtgctactcagtgcctgctgaccaggcttgccacacccagagcccggctggccaaggctctgccacaggtggcagcttctccctaacctgcttaccaaggccacctgccagctgtgtgtgcacagctattttccatgggggaaaaagcatctagattcctttcttcctttcaatctggatgcattagggtttctagatgctctcagatggccccccacctccccagccagagtatatatccaccttttaaccaaggatataaaaagccctctgaatctccagtcaattccaacacaaatgcaccatctctcctgcaatccttttcatttgcggcttgcagggggtgggaaattaggcaattcttgtaaagcataggcacacatcacccagaggcacagtttgccaataaaactcacccggccaaacagcgtaaccccttcttccaagcagatttctttgcagccaaatgcaagggatgttaaggcaagaccctccccacagggcagtcagagacccgcagccgacagactaagcctgcagcttccaaccaggctccccgagatgttccctggtggtgctccctgtaactgaagccagaccaggcgtctttccagtttattcaggggctggtccaatgctgggatatgtcatggtggcctgagaggttctcagcctctattatttaaagagacagtgtccaactttgtttgctttccagaatacaataatcccaagaggccctgcagggcatggagaaactggaatcagaagggagaagagctttgagtatgcctgaagcctgtgatgccaagactgttctctctggaagtgccaacctgtgtaatagccaagaggtcccactggctcccctcccctcccagtgaattctgcagagattaaatatactgtgggaaggatctgtgtctacagtgttacatacgtgcaggtaagttttattttaaataaacttccttttaaggagcccaaacattgcacagctaatctctcacagcatcacagcagtgagccaaatgtctcaagagtcaccaaatcaagcctcctttgttccaacccctggttggaaggactccctgttacctgccttgtctgcctagaccccatcgcaaatgatcacatgtgttgtacattagaataaaacttagggaaatgtgttcttccgactctgtctttaatgtgcccgaatcaagctgaccttcatgagataattcaatgcaagtaaacgaacctctattgaaaactattgaaaactttctaacctgtcaggcagaataggctggaagagcaattggaaattcttggagagggaagtaaaggaagttatggcatatttaggttctttgcagcgtaccactccagctcccagagagtcctccatcccttgaaccgcttctagctgcaaactctgacacaagaggactggtttcattgcatgagtttcctggaattctggcacttggggcataagacttcctcttgtgttagggatccccagtctggagagacctgcagaatttggaggagtccctccctgtcacacactttacgtttgattggactctccagtcacaagggcctctcaatggccctctcccctgttctgcccacagccagcatctgctcacagccagcatcacagccagtgccaataaaatagtttcacctttctctctttgctgaaatcatttttatttttcacagcagtggttctttagaatcactcaagagctttgcaaatgacctagcctgggccatggtcagagaagctgactcaggtgttttgggatggggctcaggtatgggtaatttccagtgtctttctccccgctggatgtttcgttgtccagccaggttgtcatgtggagttagattgtcgctgatttccttccagctcccttctgttgtggaacccaaatggagatgaggtacagtgtgggctgctgcagtattatgcaagttataagtctgttctgccaggcaaaacggtgtgtgtgtgtgcgcgtgtatctgtgtgtgtgtgtgtgcgcgtgtgcgtgtgtgtgacagagagagagagagaggagcctccctcagtcctcctctgacatggtctgtacggggactgggaacagtgagcatggtttttgcagcctctccagacagtcttttcctgggtactgccatgatcagctccaaaggctacacgacagaggctgctgtccgtcaggccaggatcaagcctgaagacacgtaagattatttctgatctaagagctaaagattcagaggaaaaggggtagggcctggtgagtgtggggcatggcttctggccagataggagcagtctgattagccctccctctctccttccatgagctccacattctgagacctgctctcttggcctcacgtctcttttgcccaggtcctccatctccagcagccaaaccccgaagtccctgttggctgtcagcagtagagctgttcactgttgtgtgccactggccctgtctaccagatgccaacacacttgtctttacccatctgggccagactctcttcccttcccagagtcaggtgaggaaaactccttcctcgtctcccatttccaataaccttttctc

SEQ ID NO: 1244527 - DNA, 4001 bp, Homo sapiens
gctgggaacccagatggggaagggcgggccgcgcagggagcctccccgccaggcactcacgctgacgatcgtggagacgaacagcagcaccagcaccgcgacgtggaggacgatgatactcagcaacaggaggagcattctggcggcaagttctgctcagcggagtttctgcctgcgaggagagcgctgggcgtgaggccgaacgcactgggccgagcgacggaggcgcgcgcagagggagggtcccgcgcactagcggaaggcccggcctggcccagcgcccgcagcccgaccgcccgcgcgggtcaggagccttcgcgccgcctgccgccgagagggggcagcagccgcctgcaggaccagcgcccagtgcccagcgcccagccgggcccgcctgcaacggaacatcttttgcttttggaaacaaaacaagcggttcgcacgtctaaaaccacccagggaacggaggggtttccagaaaatatgagcagaggccactgcacgcttccacccaccccaagcacctcccggcgacctccctggaaggtgagaggtcacgttctccgagaccccggttcagatggtgaattcccctatggggtggaggtaggggtgaggggagtaggtgcccagatttccgtctgagacctggagacagccgtggcatgcggtgggggagacagcggcgaggaggctggtttcccagaccccagtgctctccgcattccgtttgtctccaagtttccacccaactctgccagcgtagaggaacggtcctggccccagctcagcctcgcgcagactctggcggctccggagaggtggtgcagagccagagtagtgtggaaagaaaagaatggctcgagagggttgcccggaccctgcgcttcccgtccaccgcgcgcttccccaggcagcccctggggtcagggggcattctgctcttgcgctagacccacgtgctcgcctaggggtccagtctgcaccccaggcactcaaagccaggacacgaaccccaacaagcctgagctccggtctgggtgcggtgggacaggagcccaggagcctggaccgaagggagtagatgtccagcggacgggagagagagacagagggtaaaaggctgagtccgagaatttcagccggtcagagccggcaggacatttatcccaagtaatgcggtcctcgcccctcattttaaactttgggggaactgaaggctgggatgacctgttagaggacatgcatggctgtgaaagatctggctgagactctggggaccattttaggcagagtcttgggccagggagacaacgtttcaataacccagtttggaaagtacccaatcccaggcccctctgttcctctccacaagcatcacattcaaagaaactctggaatgcactggaagaaataaacaaggatttctgatgactcccagagggtttgaattaagccgatggcaggaggctgggaactggggaaccacaggagtccaacactctcgggatgtccgccacagggactgttttgccagtgtgtcccagagtcaacgcctcttcagcaaggcgagaactgggccgcccttatccgctatccagacaccagcaccatcacccttgccctgtaaggtcttatagaccataaaggctctcctcgttgtattactccaagacccattggagggaaacaggacacacaggggaccctgtgcccctaaacagaagccccagggagctggccaaagccccgcgcctgcgctgcgctttctggcaccctcactggaagatgcccacatttctcctccatctccttcactctccccaccaaatcacttacagcccaaaggaacagctgtcccgatcctcagggtggcctcaaacacaaactcgggtgcgttggctccgctgctggcgccgccaaagctgcgctgcggggctgcgcgcgcgcgaagcaagggggcagtgggaggctcctggcgttcccctttaacgggaacaacgccctgtttgcgtcgctgcagtagggtgtgtccctgggtcagcgtgtgcgggagggcgggactcagggaggagagggggcaggagagagggagggcaggagacagtcacttggccttaaatgcgcctcaagaaaaagtcggtccctgcaaaaccgcggcgacttttactcgaaaccagaggcggctgagctttctcacctcccacctcccttctcccctggccccgtggagacctagtgttgaccgagaaactggctcctcagcccactctgggaagacccagccaaatgtagctcagcggatgcccagggctgggcttctgggcccgccgacgccgaccgcgcccgcgcggggctgaggctggattcctttcccactaatagagggcagcgggcgcttgagcgctggaagaagtccctctcctctcgggtcctggagcccctgccctgtcctggcgtcttagccggacacacctgccccgcgccggtccccgctattactgtctgcacctacgaagcatgccagcttcctaggattggcggggattgatctagcgggctcctcttgggtgcgaattaggggaagaaaagtccggccgactactggatagcatggtctgggattgggctcctcctagcctaggcaaaaccagactaccaccgaataagctctaggcaaagtgttcctgcagcagtcgggcttggctgtcagccttggctggagtcctggccatggggtttggcgggcgggtgcgaggtggccatttgaggtggggttggagcagccaaggaaatcagctgattcatagcctcctaacgtggcccgcccagcgttacagggagagaggctagcccccttcagtctcggcttggcagaggcgcgcccaactgagactcccgtgcgcaggccagccttgaggcacgggacagggagcaggaatgtggatgttaaaggtttctgcctgaaaatgcagcagttcacgcacgcgcgcgcacacacacacacacacacacttccctacctctagtgtactgtgtcatagaagctcatcactctcaatgattcaaataattctatattattttacgatttgaaaggagctgctattttagctaattgtatattcttacggtaagtaaaaataaatttgaaaaagatcttcaaacaatgatctttttaaaactatcgtgttatcagattaaaatgaagtgtacttgtaaacactgcatttacagtgcccgttatatgccaagcactttgcctggactttatatgcatggtctgtgagaggcagtatggtgcagtggttaggcactctggctctgggctccaacaaacctaatcaccctgcttacttttgttgtgaatttgggcaatttctcaagttcactgagcttcagttttctcaggtgcaaaaggaaatagtaatgcctgctttaaaggtttatggtggtgattgaaggagacaatatgtacaaagcagttaacatcgtgtctgcaacataataagggcccagtgcccaaattgccaccactattattatatcacatttaactctcacatcaacctttcagggaagacctgaccacctctgcactaaagtagcttgtaactctgataggtaggtaggtaggtaggtagatagatagatagatagatagatatagatagatagataaagatttataaatgaaagtgcatatgcaagtagaaaaaaaagtctaaagacatggcagtgttttctttcctccacaggtcattttataagttagatttgctctagaaattattactttgttttatgccatttggacatttatttatttaaccaacacttatgtgatcacaacatactcaggactgttctaagtaagcactttagaaatatgagcatatctaactcagggttttctttcccttcctttgtgattttcaaataaactttttaataaagtctaatacacatacagaaaagtgcatatattgggtgctacagct

SEQ ID NO: 1244528 - DNA, 4001 bp, Homo sapiens
gtgatcaggagggcactaagggcatgtctctaggtagagtgaatcacaatgatgcccaggatctcagcttccccagcgagatcaccacccctcccattttccctggactcatggctccctgtcacatcccaccccaccccagcaacgacattctggcttgtgtcttccaataagcgtttccagctctgggctgagaaacgtgttacaggcgtctgaggacaagctcatggagcacaaaaccagcctcaccgtttggtgatgatgagaaacagtggtggacatttcctgaggaagaggtgctacagttctgccagagatcagttgcgtgtccattgcccacgatccattgctagagagaatcagatagatatcctgagtcagggagggagggaggagtgaaggaaaaggggaaggagaaaggcccagggatggcgaaaagcacccgcatccacctagccacaccgcccacccctgcatggtaagagccaacgttttatgacttaaaagcaccttgtaaatggagaagttccacatgcacacagaaacgattatgtgcagagatgtttactatagtagaaggagccatgaactcaaccttagacacctgcattcaagccttctctcctcccagcatctcgggatcattccccaagcccgcctctctcagtctatttccttgtttatagctcctatcagtctgatatcatcatcaccaggcacaatggagatactgtgaagatgcttgtaaatgttaaactaagtcacaaatccccaacataattatttctcacagagactagaaaatcatgcttacaggccgggcacggtggctcacacctgtaatcccagcactttgggaggcagaggtgggcggatcatgaggtcaggagtttgagacaagcctggccaacatagtgaaaccccgtctctactaaaaatacaaaaaaaaaaaaaattagccaggcgtggtggcgggcacctgtaatcccaggctgaggcaggagaatggcttgaacccggaaggcagaggttgcagtaagccaagatcatggcactgcactccagcccgggtgacaggctggagactccatctcaaaaaaaaaaaaaaaaagaaaagaaaagaaaagaaaacgaaaaagaaaatcatgcttacaatgtgccttaaattaagaagtgaaagccaccactggaaaactgcctgaatgtctgctcatcttcatcgccaagaaaataactttaagatctaatgggctggacagttttgtaacagaagttactctgatggcctgttcctaccagtggaagctttactaacaatgtgttgtgttcatgccataaagccgacatgggacctgtgaactcttttccagaaaagcccattttaactttccaatttcaagtcctaaaagggtgttttataaattaattcacccatctgactatggtttggagaaaaaaaaatcataaatactcctcttcttcaacgaggctgcatcaagaaaaaaaaaagttaaacaatcttgtcaaatgaaggtcggggaccctagatcggctctgaagttacttggcttaaatagagacctgcgcagctaacccagcccagcgctcgcttggttcctatcactgaatctgctctcgttttctcaaagcaactggaagggggcagattgccagaaacttccctgggacgtctgagacttccaactgtctgcaaataacacagtcctgaaccagcaggagcacgggctgggaacccagatggggaagggcgggccgcgcagggagcctccccgccaggcactcacgctgacgatcgtggagacgaacagcagcaccagcaccgcgacgtggaggacgatgatactcagcaacaggaggagcattctggcggcaagttctgctcagcggagtttctgcctgcgaggagagcgctgggcgtgaggccgaacgcactgggccgagcgacggaggcgcgcgcagagggagggtcccgcgcactagcggaaggcccggcctggcccagcgcccgcagcccgaccgcccgcgcgggtcaggagccttcgcgccgcctgccgccgagagggggcagcagccgcctgcaggaccagcgcccagtgcccagcgcccagccgggcccgcctgcaacggaacatcttttgcttttggaaacaaaacaagcggttcgcacgtctaaaaccacccagggaacggaggggtttccagaaaatatgagcagaggccactgcacgcttccacccaccccaagcacctcccggcgacctccctggaaggtgagaggtcacgttctccgagaccccggttcagatggtgaattcccctatggggtggaggtaggggtgaggggagtaggtgcccagatttccgtctgagacctggagacagccgtggcatgcggtgggggagacagcggcgaggaggctggtttcccagaccccagtgctctccgcattccgtttgtctccaagtttccacccaactctgccagcgtagaggaacggtcctggccccagctcagcctcgcgcagactctggcggctccggagaggtggtgcagagccagagtagtgtggaaagaaaagaatggctcgagagggttgcccggaccctgcgcttcccgtccaccgcgcgcttccccaggcagcccctggggtcagggggcattctgctcttgcgctagacccacgtgctcgcctaggggtccagtctgcaccccaggcactcaaagccaggacacgaaccccaacaagcctgagctccggtctgggtgcggtgggacaggagcccaggagcctggaccgaagggagtagatgtccagcggacgggagagagagacagagggtaaaaggctgagtccgagaatttcagccggtcagagccggcaggacatttatcccaagtaatgcggtcctcgcccctcattttaaactttgggggaactgaaggctgggatgacctgttagaggacatgcatggctgtgaaagatctggctgagactctggggaccattttaggcagagtcttgggccagggagacaacgtttcaataacccagtttggaaagtacccaatcccaggcccctctgttcctctccacaagcatcacattcaaagaaactctggaatgcactggaagaaataaacaaggatttctgatgactcccagagggtttgaattaagccgatggcaggaggctgggaactggggaaccacaggagtccaacactctcgggatgtccgccacagggactgttttgccagtgtgtcccagagtcaacgcctcttcagcaaggcgagaactgggccgcccttatccgctatccagacaccagcaccatcacccttgccctgtaaggtcttatagaccataaaggctctcctcgttgtattactccaagacccattggagggaaacaggacacacaggggaccctgtgcccctaaacagaagccccagggagctggccaaagccccgcgcctgcgctgcgctttctggcaccctcactggaagatgcccacatttctcctccatctccttcactctccccaccaaatcacttacagcccaaaggaacagctgtcccgatcctcagggtggcctcaaacacaaactcgggtgcgttggctccgctgctggcgccgccaaagctgcgctgcggggctgcgcgcgcgcgaagcaagggggcagtgggaggctcctggcgttcccctttaacgggaacaacgccctgtttgcgtcgctgcagtagggtgtgtccctgggtcagcgtgtgcgggagggcgggactcagggaggagagggggcaggagagagggagggcaggagacagtcacttggccttaaatgcgcctcaagaaaaagtcggtccctgcaaaaccgcggcgacttttactcgaaaccagaggcggctgagctttctcacctcccacctcccttctcccctggccccgtggagacctagtgttgaccgagaaactg

SEQ ID NO: 1244529 - DNA, 4001 bp, Homo sapiens
aggtgccacttcaaagaacagggaatccaggtgggtgggggccacagggcaccaggtacagccctcacagcccaaccttctgagcccaggcgaagaagacgcccttgacatcatctacgcctgtctgaaggtgggcaggcatgatataggtgcggaggtcccggaccttgtagccactacgcaccagggcctccctcacctcctcctcagacactggcaccaccgtcagcctggcctccccagccaggtaccacgactcctccagggccccgatgaggaggaggtgccccccaggcctcagcagcgtggtgatgtggtccagggcccgctgaaagctggcaagatctgggctcacagcctccaagcagaaggcagagaccagggcgtcagcaggcaggggagctgggctcccagcacccaggggctggggctggtgcacgtcgatgggcaggacccgtttcaccctggctcgcagctggcgctccttatcctgccagcattccctgtgcaggaggcacaaggcagggctcaaggctgttctacgctcaggcctctgttgccccaaccagccactctatgggaagcctcctccccaaccctcaccccccagtccttaccccttgccctcaatgaggcaggcatgttggctgtacatgctccagttgaaggcccccggctcctcctgcagccagcgccccagctcctggcggttgacctccaggaaatctgtcatggtgatgtcctcaaagtggctgcaggcactgagcagctggtacacggtggggcctgaaccaatgtcgatgagggtgcgtccggacacttcacctgggcagggcagaggaagagggtcctggtgccagccagcccaggcagcccctgcctccttacccttccctcccctgcatctccctgcctctctctagttcttccttctcctctgcaaatgtgtctccatctggaaaaagcattggccccagagttagactgaacccagctccaacatgggctgcccttcggaagggaacttcaccgctctgagactcaggtttcacatctagaagactatacctactggccgggcgcagtggctcacacctgtaatcccagcactttgggaggccggggtgggtggatcctaaggttgggagttcgagaccagcctgaccaacatggagaagtcccgtctctactaaaaatacaaataaattagccaggcatgggggcgcatgcctgtaatcccagctactagggaagctgaggcaagagaatcgcttgaaccggggaggcggaggttgcagtgagccgagatggcgccattgtactccagcctgggcaacaagagcgaaactccgtctcaaaacaaataaaaaataaaaataagtaaataaatgaaaataaaataaagaaaaagaaagaaaacaactatacctaccagccaggctcagcgaggaaatcctggcagtttctcacccctgtcccacatctgcctccatttcctcctatgcatctccacctcagtctgtcctgcatcccccaccttagctctcaattctgagcactctccgccccctctctccacctctctctcctctgcccctctcctaagggatgttgctcttttttctcttctgtttgcacctctcagctatctcttgtttcttggtccccatctgttaggcgcctggtctgtctccctttccttctttttatttccctgcgcctgctttcactccccgacgacctcttgtccctcgtgcctcagtttcccccgctcaccggtggcgaaggtctgcgccaagcagcgcagcttccacggcccgacgccgttcgggttgcacaggtccccgcgagggggcgcgtagttgttgcggaggtaggcgcgcggctcgaagcgctggtaggccgaagccaccgccgcctggcccggggccgagtcaggggctgcgcccgcattggggctacggtctgcgccgctcatgctgccgccgcggtccgcccagtgccccgctcgcctcgcggcccttttttctaccgcccgacccccgccccgaccggtccgctgtgggggcggcagctgaccgccgagccgcccggggccatgtgcgccgcatcctccccacccattcatccatctcccttagtgtccgggctgcagacacaccggaggtgagtggggcggcggctgcagcggcaatcgtcccccacacccccggctccgtacttgctcccgcagccctcgccctccgcctcgcctgccccgccccgagtcccgcctctgggcgccccccaccctcagttcctcacccccacaatctttagaccccctcacccccgccggccggcccctcccatctctcttctccagccccccgcagccattcacctcttttgcccagcagcccgccccttctctttcctgattcgaggtggagactggggaattaggccctttccccagtttccccctcgcagcgccctccgcgacgaggccccagaccccgccaggctcccctccctcccggacacccgtcccagcacccacccttcccttagaactgccacacaactccccctccccgcccctcctccaggcctctctcgtccgttgctatgccaccgggccctccagcgacaccccctccccaccccgccccagaaaggacagtccgttccggcctccgctgtggtcgctccgggggccccagagcagggcgcggcactgcccgtccgatggcaggcgcgataggggaggtgagctgtgctaatgcacttagcgggcggaacagccgggcctcccctgcgggccccgcgggttcccagccgcttatctgggggctcccgaggacagaaggttcgggttcgggttgttcccgccacttcgggggcggcgccggacccgggtgagggcagagggcttgggcaggggaggggcaggacgcattcgcggagggccgccggggccaccggggagcgcagtccgggccttggggcccagccgatttggggtcctgcggatgtaggggctctgaccccactcctctcgcagcccaccctccagcttccctccgaaggagcggccaggccaggcatgaagattctgctcagcaccccaggttctggctgtcaaaatgccagggtctccccacctatctcccagatgggaagccaattctgcctgtggcatctccgtggtcttcctgaagaccccttccttcccctctggatgagtcccgggcccttctgccctgggtaggtcaccagcccagctcctgccaccgtgggttcctggccccgcttgatgtgggcctcctccatgccattccctcccccttgtccccaggggaaagtctccttgggagaggcagctaggttgggacatgagtcaccacaacagctgcaggggtcacagaggggagcctgaccccctagcacctccaaccttccctggcttccagggcagggggtgtggagcgagacacagctgaggattgattctgtctggattcagaactgagaggcaggttagttttagaggtcactgaccccgttcacaccccgaggcaaagccaaggacagtcctggcaccagcccctccatattctccacgagacatcattgaaacaaaccctggatgcggatgccagctggcttgctggttaccacccagtgccagggggctggacacagaagccaggactgggcagcggtcagggtacgggaaggagactggagacagcaccctgtttacagctctgtcctgcccccacccccaccccaagtatggggtgtacccattagctctgccatatttagctcagatgcggagcctggtcccagaagtgggcattgaggggacacccatgggccagcccccccaaccacaaggaaagagatgcaactctggcacatgattgagcatttattgcggcactaacagagggtgctgggggccccaccatccttgcctctgcccttttcacctccccctccctcccagcttc

SEQ ID NO: 1244530 - DNA, 4001 bp, Homo sapiens
tggaaccataaaattggcatccagagtagagagcttcataagcttcctagttcatatgtatccacccaaagaggggcccacagccatgcccacctggtgcaggtagccagacacatggcattggcttcccctatgtcaggacactgaacagcctcctcaaaccaggcagcaaactgtttcactgggtcaagggaggtcagatgagtctcctcaaatgcctaggaaaggagatttatttcatttaataaacatatatagtgcttactatggacctggcactgttctagtcacttttcaaaaatcaactcatttagtcctcatgacaatgaccttaaaataagaaatagtatgcagtaagaagattctgtgccccattttacaggtgaggaaacaggcataaaaactcagacaacttgctgtcccacagctagtgatggataaatcagggttacatgtcatgggtgtcaaaactgtctgtgcatcagaatcacctggggagcataaaaaaaactttctgggctccacccccaaaatttctcattcagcaggtctgaggcttcatcaaaaactgcatttttatttatttatttatttattttagacagggtctcactctgtcacctaggctggagtgcggtggtgtgatctcggcttactgcagtctcaacttcctgagctcaagcaatcctccaacctcatcctcccaagtagctggaattacaggcacgctccaacatgctcgactaattttaattttttgtagagacagggtctcactatgttgcccaggctggaaaaactgcattttaaacaagcgtttctagaaatgcccacatgcaaccagatttggcaaccagggccctggaccccaattcctaaaaggttctcttggttcccctcctgaggagcgaaaaggaaaagaacttcccagtggtcagcagaaagtactgaaggcagtaagctaagagctttctcctcccctcctccccgagctagtccccttcccccatattccacttacttttttgtcaaacagtttgtaagctgtttgtcactgtacccacctaaagaggggcccatgaccatgcccacctggcacaaggaggtttgggtgacccccaaatctccttgccccagggggtggccccagaagccctgaggggctgtttcctcctactcccctccccccagtagatgactccgaggacccctcttcccccgcccttgagggaggcccagcacagtcctgacatccatcacatgaaaccccgattcattcatcactagctgtgggactgagcaagttatttgaccttgctacctgtcgagtagcagggttctaagcactttacaaacatcttagaccataacatccccgtgaggcagatactatcacttcccagatgaggaaactgaggcccagatacattaaacattccaacccaggcaggctccaaagttcgagctcttacccattacgaaaggctgccttttgaacccatcttcatttgcgtttccccggaactcctcccctggtgggatgtctttgaagcccccttttcccacggggggtgatcctcaaacctccttgccccaccgggtggccccagaagccccgaggggctcctactactcccctccccgctgtagatgactccggggaccccttttcccccgcccctgcaggaggcctggccctagcggcggcacctctcggtccccgcggtaactcttgcgcatgggtcccaggtccatggcagcactgcgaccacacaggtgactgaggtagcctggccactcggcaggtcgcccgaacgtcgccgtgacgccccgcagccagcacgtcatggggggccgccggccacgtgacccggctgtggcccggcactgggttcctttgagttcggaaccaatttctcaccctggacttctaccccggggaaggaaggatttgccagtcgcccaaccaagctaacaggtcctaagtcctcggagccaatgagtttccaggatcggaggagggagacagacacggagaggtcattggttggagcttttcggtaacgaggccaattagagcgagaacagaggaacccagcggccaatgggtagcgcctttgggggcgggagcagagagacaaggaaatgctgtcaccgcggttaacacgcacgtggaggttggttaaaggtataggaggatctcttgcagctcaggcggggcggaggatgtgtcccgggggcttgaggggagtagtcagtattaagtggctggcccatagtaggtgcctgtaggtgagcttagggcaggaagtaccccctgggaagggagactagtggaatgggaaaagaaaaatggaaaatggaattaggggccagactctgaggcaaggtgatggggacacatagagaaaagggtaatctggttgtggggagaaattagggcatgagagtgggagaggttgaaatgacttgtggaccatgccccgagtggggaggtgcagtggggtgaggaagagacggtgaggtgagaaggaagatggctgaatgggaagggggaagaaggaaatttgggaccaaggtatcccagaccagagtggttttcctcttctagttttggttttgttttgttttgtttgagacggagactagctctgtcgctcaggttggagtgcagtggcgcgatctcggctcactgcaacctccacctcccgggttcaagcaattctctgcctcagcctcccgggtagctgggattacaggcgcccgccaccacgcccggctaagttttgtatttttagtagagacggtgtttcaccatgttggccaggctagtctcaaactcctgatctcaagtgatctacccgccttggcctcccaaagtgccgggattataggcgtgagccaccgcgcccgccacctcttctagttttaaaccccttccctccagcctcatttatttaagcaagggtcagagcattttactccctttgctcatggtttcccctgccatggtgcactggagttcataggagccagtgtcctggtagatagcaaggctgccaatgtcccatttctccagggtctccccaatctttgtcaagcttccctttttccacattttgcccatgctaggtagtaggagtctagcccctaggtcaatgcaagcaattgccaactgagagtacactgagcaggtggctgtgcatagcctttccaggctgtggatgcaaggctgaaaaatgggaaacccactcatgcccagtccaattctgagctggctggggcggccttgggtcgagacctctctgtagccctgctttccaccagcatcaggaaggggaactgcaagagccatctaggcaggcacccaggactgtgccaggtaaggggaacttcctggcctggccaggtgtctgcattacagctgagcttcatgaagccctacattagatacctgtcatcctttatgtgtacatagcttgagccagatagaatctggaagacaattttgctgcaaagaaataatacatgtctcaaggcttaatgatattggtctatggattctccactggttggatttttttgtgctgccatcattttcctccatcagcataattgagagaaagttgagtagatttactttcctgttgaagttgtctttctttttttttttttttttttttttttttgagatggagtcttgctctgtcgcccaggctggagtgcagtggcgcaatctcgtctcactgaaagctctgcctcccgggttcacgccattctcctgcctcagcctcccaagtggctaggactacaggcgcccgccaccacgcccagctaattttttgtatttttagtagagatggggtttcaccacgttaaccaggatggtctcgatctcctgaccttgtgatccgcctgcctcagcctcccaaatgctggcattacaagcgtgagccaccgcacctggccgaagttgtctttctgtataagaacattgctgt

SEQ ID NO: 1244531 - DNA, 4001 bp, Homo sapiens
agactgaaactccgtctcacaaaaaataaataaataaaataaataaataaaataaaaaatgaatacaaatttgattctggaatggcaccaaacatcaaggtggaatgaatggaacaccataccatgcaggcctgtgacctaatctgacttttttcagaagcagagcactctatgaaaatgaaagatgacccagcccaatactcacctgcccggtctcatattttccattctgttttggcacctcaaacacaccaactgtctccaacactttgccctctggtcggtttctgagtaggaaggaaaagaacaagcaacagaaaagctgagaaggtaatggtagttatccataagaaaaagctcctaggatactgaggggccagggcgatgacagcagagaagggtttggggtagtgggaccagctggagcaggaaaggctttcctcctccttggtgaaaacctccacagtctcccagtgttagatgtgaccgctcccatactactgtcttctctcttcactgggcattcttcatatcatgccctcacactctgctcaaatgtacccctgcccttgtttcttccctaacccaccctcctgacctcccacagcactttaactgtcttgctcactttttcaatttttttagaaggggagtatctttttttcttcttttcttacattttctatatcacaagtcatcaaacaatatcctgctccctttacatttcagttgtgtccatgtcttatctttattaaatactgtaaattccctgggagcaatgcctgagtctgattagctggtactgccccctcagagcctagtgtacaagaggtgctcaaaaaatatttgtcctgtattataattccatgtccatctccccctctaacctgtagcccttacattgcccttgaaaagcttaaacatctctagatttcctacggcacatcgctctctcaataccgtttttgttcatattctcacaggggtcttaaattgcaaatagctatcatctctccccaatgttcagtgtctaatatcagccactaaaatgtcagtcaccactctgaacagggctgctctttctaggggcccttcaaataaaggctgtttttactgttttgaagatgtgaactttatgcttcctcccactgatccaccagcccatttgatccgcctgtcccatccgtggaaacagtttccacaccatccccatggcctcaaacccccttccccaagtcacagatagaaaatcgatctccccaaagtcacttggaaacctggggcctacgagggtccacacccaagagtctcgtttcccacctctagcatctttctgaggcagaccttcaccaaatccaaaggctgagggttcaagccaatgccctagggctgaattaaaaagcttccctctgacatcggtgctggggaccccagccggggaagtaggattcacttggggagggtaacctgttcccccccagggccagccctgtacaaccagggctctgggccgcgctggcttccctgctcctggcacatgtcccagacagcgcaggtcggctccctgctcgggaccctctcccgggtcaaactccagtcaccctcagcaggcccgggcccctggcctccgcactggctaggaacacgctctctgggctccaggcccagttcctcgcgccccctggctccgtccctcaccgggacgagaggtgcctccgcgtcgtcgtggtcgacgctggcgagaaggctccagctccggccgccgcacagagcggccttggccaccgggccccagtcagcgaccgggaccaccagcggctgcccacggccagggcccgccgggctgtacaggctgccatgtcccgcccgagcgcccgcccggctgctgacacagagcccgacccgcggccgggcggcgttccgccccagtcccacactgccccgcgcggcgtcccggccctcttggcccgcctggtcccaccccggagctcagagcaacttccggtgcgcttagcgttacttccggcgcgcggcgggcggaagtccgggttggggtcacctgaccggagagccggctagatatggcgtcctctttgcttgcgggcgagcgattggtgcgtgctttgggccccggcggggagctggagccagagcggctaccccgaaagctgcgggccgagcttgaggccgcgctggggaagaagcacaagggcggtgatagctccagtggcccccaacgcttggtttctttccgtctcatccgggatctgcaccagcatctgagagaaaggggtgagccccagtctccagtccggggtcccctccttgtgtccagatcgattccctcctgaggtcttttcccatcattccccttcttctacggagcactcatctagacaagtcaagagtcactccataaatcccagggccacccactttcttaactcccatgggaatttctcgtggatgacaaatttgcttgtgcagtttctgctcttttgagagccccctcttcacttccaggcacacctaggcccaattcacccttgagaaagtctaggtttttaccaaatacaaatatcacaggttttgtctcttctttttctccactttaggaatcagcttagcatagtgagcttgtaggaatccggatttctttccacctcaaaagcaagagtggtgaaatctgatactttgttttgtttgtttgtttttttaatataggatggcaaaagctgtgttgaaagatctggcctgagagtagcatgtgagttccagtcctagctctgtcactaatcctttgaaggagtcatttctcctcgctgggcctcagttcccttatgtgtaaagggaaggaacaggacaaactagcacataaggtattttgccagaagtaacatagaccagccagaagtgcaaagggtagactgctcaattattagaactagaaaggaccttagaaagagattgcctagtattagtgtcctctgagcatttagcatcactatgacctaaacttatttagggaagagctgttgtggccacagaactgatctaacccaaaggcacaagtaaatggcttacttgttagttataacactggcaggataattgagagctgacagctaaagtcacctgcgcagcactgggagatacctacatggaattatccaaaattcttttcaattgaaaatgatcctggaaatggattaatgtagagatggccctgttttattttggtagaaagaagggctacacccctcttgatcttaacccttcaacctcagctcgtggatcattgtgtttgtgaaaccttttcttctcagattccaaactatacctccatgagctcctagaaggcagtgaaatctatctcccagaggttgtgaagcctccacgggtatgtaagggatatgtttgtgagagtggttattgactgagttgggcttatccatgatacactgaacttataaatcaacttttaggcttgaaaaattgtttttgaaatctttgggatctgggggagccagatattgtcctccccatcagctgtttggaaaattgagatcaaaaaaaaaaaaaacagtttcaaagcactggagttacgactagtatgtgggtctcctgatacctttagcagtgctttacccctggaaccaatgattgtgatgtgctttctaacaagctgggaatatcattcttctcatttgatttttctgcttcagaacccagaactagttgcccggctggagaagattaagatacagctggccaatgaggaatataaacggatcacccgcaacgtcacttgtcaggtaaggacatgctcttcagtacgtggtctaggtagcccctcagagtagggccctgcagtggaagaagatacagagtttagaaaaaacatggaaacttggtttctatactgttcagggaccataggaagtctgcatacaaacaacacagttcccatctcattcactgagactctgggctgagatggt

SEQ ID NO: 1244532 - DNA, 4001 bp, Homo sapiens
actcgggaggctgaggcaggagaatggcgtgaacctgggagatggagcttgcagtgagccgagattgtgccactgcactccagcctgggcggcagagcgagactctgtctcaaaaaaaaaaaaaaaaggaaccaggatctgggcactaggtgtgctcattgctactgagggtcattgcttctaggaactttaaacgaagaaagttaggaaatatatttttaaaaatcatgaggctgggcactgtggctcacacctgtaatcccagcactttggggggccaagatgggcggattgcttaagctcaggagttcaagaccagcctggacaacatggcaaaacctcatctctacaaaaaacacaaaaattagctgggtgtggtggcatgtgcctgtagtccagctacttgggaggctgaggtgggaggttcacttgagcccgaggtcgaggctgcagtgagccatgatcacaccactgcactcgagtctgggtgacagagtgagacccatattcaattttaatttaccaattcatatttaatttaccaatccatatttaacattagtttatacgtaccttcttttacatattatctcttcttttacaatgaatatcttggttcctaataacaactaacccaactatttgaattttttttttttaagacggagttttgctcttgtcacccaagctggagtgcagtggcgtgatctcggctcactgcaacctctgcctcctgggttcaagcgattctcctgcctcagcctcccaagtagctgggattacaggcgctcgccgtcacggccggctaatttttgtctttttagtagagacggggtttcaccatgttggccaggctagtctcgaactcctgacctcaggtgatccacccgcctctgccttgcaaaatgctgggattacaggcgtgagccactgcgcctggccttgatttatcctatgatatacatgaaatagtttcagaattataatttcaacatttttacttagaataaatctaagaaaagttcaaaatgtctgtgtagttccttatgcacttagactacattgcactaaatgacagcactgtgttcagaagttgccccgtgaaattgagagcgttcccaggtccttcggacagattgtttaaggaacagcaatgattccatggaccagttttctccagggtagagcactgttaatatatccgactacttcaaaaagatgagaactaactaacttccttgcatgggaatacagggccagttgcaatccccaagatccagcaagactgcctcgcctttccacccgacacctgttttgaagcatgaaatcgtgaagcataccgtgaagaaggttctcccgtagtttcccagaagtttttaatacgttctcaagaaatgctactagctgttccttactcagctctttgtcttgcaagatttcgcgtagagtttctgcagaaactaacctgaaggcactgtccccgggtagcaaagggcctggtttgtggtggagggcgtccaccgggaatacctgctccctgaacaccaccaccgaggtccaccattctgcggccaggttcttccgcaactctacgcccaagggtccgaagccggggtggcacccactcagaagagaatcccggctaagctgctgcttgcttccacttaggaaatgccttctctgacagatctctaacagcgcctcgcttccctctccagacccgggggcttctgggtgctcgccgttcccctcgagctccgcgtgcgacttcacatgccctcctttggggctactcctttccgtcaacagctccggctgccccgcatctactcgacccccaaacccagacaacaggcacctgcagaccttatggcaggccctgacggctacacgagagcgcatctctctccgaagttaaagagcacactctcccatcactcaacggatcccaacaagccaccactaccgttaacagaatccggagaggccacggcgcaggcgcaacggaggtgagcgtgcttgcgggcggcaggccccaccccggaagcgcatgtctgcgttccggccgcagccgtcccccgcccaccatggcggacgccggctcggatggttctctgctagcttgccgttcgcgtcgcgcccctcccttcagattgacttttttctttcctcgtaagcaccagtaaaggttattcccacctatttataaccgtggtgtagccacttgagtcacttccttctgccactgttttgcagtccagaaaattaaaatacttcagtattatccaaatcaccttctatatacacctcaatcaagcacttggactaaatttggcatttggtttccctttaaacagttttagtcctttacggtgatttgtaagcccaggccttcttaactaggcaaatgctgccgccaggtggcctaggcctaaccccagagccgttgtcttgacgcttaagcttccggggaggggggcgataggcttcgtgactagggtagtggtatggtcactttaaatattgcagtggcttccaaagggcagtccccagccagcagcatctgcctcacctgggaatgcactagaaataaaccaaggggccctgacatgtcttaaaccctcctggtgtcagagaaaaccacgtacgtgcaatttcttccaggggccccttctatgggttcatcaaaacaatgagacttgtgactgttattattaagagactcatgattaaattgcaggtttctgattttgcagtttctatttaaataggtcgagaccttaagacctacccagaaagtggaaaagtggtatacccagactgaggaagtttgattccaaagtccatgatttcttataccagcctcagttacgaaaacctttaaagaggttcagggaaaaaggaacaatctacatttcactgtgagactaccaaactactacctgattaagaggggtaacagcttagcaattgagttaatgtaattcaggagtaaagttttatcattagtaaagtgctgtaccaggttcaggaaatagttcttctttacaagtgtatacaagggtttaaaaaaaggccagctagatagtaattaactgcaaagctgggtactactgccaggtgttttccacattcaggaactcacaccaggtaaaaggcctatacgcaaataaataaaaagagagaatggggagaaaaatcacatttattagttaagacgaccacaggctggacacaacacacatgctaaaaagtggactgtcttttaaaacttccaaggtaaataggtaaatgttttccacagcccaacaatcatttcagtgtttacaaattaaaaggcccacggttaagacattaaacagtaaaatatgtaataaatgctccaacctaccctctcccccgaaagctgcttctaagtttaaaaccatgaatttgactaaccatgccattgaaaaccatccaggttactacaggctgaattagttttcaatgtctaagtcctagaaatatcactccctatcccagccctagcaaattctaactttacatttgacataaggcattaacatcaattaaagcctcagtttaataatcagaatttaaatgaagtctcctgaagacctctcttctggcaaaaaaaaacacgtatcagactctgggaaaacattcagacccacttctagctattactgaaataaatgattagaaagttacgttggtgagccgaagttaaacctaaagctatcccctggatctttctagcaataaacccatgttgaacctaccatgaaaactttcattcactgtgcttttggttacgttgcctcctgattagtcattaattttaatgaggttttttccttgtgttgagtatgaatagaccttacagtttgaggatctctagaattccctgaattattggaaagacattcatgactcccagtgtgactagttaagagccccagggagcctgtgaagactagaatctacaagtaacctgc

SEQ ID NO: 1244533 - DNA, 4001 bp, Homo sapiens
acaaacagccacttaactccattctttccagccagtgggctcctctacttagcgccacaagggaaaaagtccaagtcaccaatagctctcccctagggctgccctcctctctctggtctctcctcctctcgcatcagttcttcatagagcaactacagcagtagttttttcaaatgtgctgtcactctgtttataattgtcaacgactacctactgaaaatggaattaagtcctgactccttaccataatatacaatatcccatgcttctccagcctatttctgtaacactcttctctcatccactaaacctcagccacaccggccgcctttcaccctgtaggacaagcccaagttcatttctccctcaggccctttgcacttgctatttcctctgccggaaaagctctcgccatccaaactatggcttcgacgactggctgcctctcatcatttgggtaatgtcttctaagataggccttcccagaccctgacgccatcccatctaaagtagccccacctcgacgggcgcggtagctcacgcctgtaatcccagcactttgagaggccgaggcgggtggatcacctgaagtcaggagttcagccattgcactctggcctggggaataagagcgaaactccgtctcaaaaaaaaaaaaaaaaaaaaaaagacgggggagaatcacctcagggcaggcgttcgagaccagcctggccaacatggcaaaacccctcctctactaaaaatacaaaaattagcggggcatggtggcgcatgcctgtaatcccagctactcaggaggctaaggcaggagaatcgcttgaacccgggaggcggagattgcagtgagccgagatcgtgccattgcactccagcctgggcgacagagcaagactccgtctcaaaaaataaaataaaataaaaataaaaaaataaagtagccccagctcagtgactctccatgggattaccccttttcactctattcgagacaaatgccattaactgaattatctcattcattcattgtattcatgtttactgcttgccctttcccacagacagtgctcttgaaggtagggtcctggtctgtcgtgttcacctctgtaacccgagtctcctgtgtcttcaacagagcaggtgctcagttaacatttgtattacagaagaggaggaagctacccgggtttggcttcttaaccaaacttgtaaagactccctaggattcgtcggatcgcctttaacgtcggtaactctggagtgtgaaatcagtcatccttctctccctccttctcaccctccagccagccccccatctcggacaaagcgctacgcctgctcaactctttgcaaaatataactctgggaggcccgagactggcgcctacacggccttggcgctgctgagccatgctcctggcccgtcacccataagcagcgagaaagcgccaagtttccgcagcccccgtccggccccgcccgccaggggaggaggggggaaggggaggacagagccgcttaccagttcatccggactcaggactccgaactggactctcttgatggtgcgcagcgggcatgcgctgtcccccgagggggggccacccccgtgcatggcggaggcaggcgcgctgcgcaggcgcaaacctcactacaaaaagcctgcgccgcctccgcctaggtgctcagacctcgtcagggcggccaccgggaaggacctccccgagttgggaggaaaaagccggaggaggggaaggtgggggagggaaggaggcggggaaataaggagcgaaaggagcccttctttcccttaccggaaatttttcagctcccaaaaaggaaaaaaaaagaagggaaaaggaaaaggtttttgggggaggaagaagaaaaagggtaacgaataaataagtaaccgggttcctgaacggcagaggttacggcagtttgtctctcccccttccgggagccgccttcttctccaaccgtcccggccgcgctctcggcgcttctgagcagcgaactcgctgaacgacgcttcttatagattcgccctcgcgtccccgccccttcctttcccgccctcccttgcgctacggggccgcctgcgcaggcccgcaaggggtgcgagccagagtcgtgggtaaaccccccgctcgctggttgggcgaccttttgaagtgacagggagagaagaatttttttctttaatcccaccgcctctcctcgctgctcccttttgcactgaggcttaaggtttgaagactcgagggtaaaattgggccgctttcattctagtttggacaacggtttcatcttcagcaaaagcctctcattcgtagccccccccagctggaaaatggtctgctctgcgaatcggtaatggcggcggggcggggcgggtcctcccggggaagggcggttgctcatgaatatgcagttctcttgctgaatatgcatgaacaaaccaagatggcaggaccagtggcttgtccggaagtagccgatgtttgtcaaacggcccccggagacgggtgggcatctcctggcctgtaatgccgcgctgtaccgagccatgatcctagatccatggcctgagcctctcgaagagacttcagctgggaggcctgctctggaaggagggtggccactgtccgggagagatcacgggaccgcgacaatccgagaaaagcagattagccatggggcgggccacgaaagtcctgggggatttggggtcaaggcatctgaacattaggaaatcctccactttgtagaatatttcaggaataaaatggggggcggggatcccaaggggttctccaatgagaacggtcgtaggactttccactctccctccaaagcagagacgacaccactgcaagccacattcagagtaatccttgtttgatgtcaatgtcacgtcaccaccccaaggggggggcacaagcacgaggaaaggaaacctttgccgtgaggggaggggtggggaggcacgctcccctcccccaccgcagctgctggctctgtctttgccggaacactccagccccaatgctcttctctttgctgctgagtgaagtcctccccgtggcccacggcctccctgcctcagccgtttggatctgctcctcagactttaccccttagttatgccctgattccaggacccagcctggtctccacatcccttggtcccaggctggccccaggtcttccaggtagtccctctccaccaagtccccaagtcacccttgactctgagaggtatccctctcccacaccagttcttttccagtcacttctcctcccatgtttgtcttcagtctttgcctctatttatccctgtccctcccaacccccgggctcccaagttctatctcactcctccaccttcccttccctctcacagctgaggttccaggctgtgatgatggcaatgctgcccagcacaacccctgcccccacgatgtcagaaggtgccacagtctcatggagcatataatactgcagtataagggccaccaccacctcggaatgcaggacagcgcacaccagggcagggtgggccttggtgaccgcatagctcacacatgtgaaggagaccaaggcgaggatccccactgcccccacacaactccaactcgggagatcactgggcaacacggggggctgcagcacaaagaggcctggcacagagcccagcagccccaccaagccagataggaaggccactgttgggaggcaggagggaaagtgcagagaacgatagaccagaagccccagggacagcgccagtcctcccacgaaagcctgcccatagcccagggcggtgtagacacccgtgatcccctcctgtagtgtccagagtccaggtcccacaatgatgattagtcctaggatgctgcccaacagtccacaccagtcgtagccactgagaccctggctctcaaggcagagggtgaggacggcggagcagacggtggaagaacctttgcgaacag

SEQ ID NO: 1244534 - DNA, 4001 bp, Homo sapiens
taaatccataaagaggggcccctgggatggatgggaaacgcctccaacaagcctagtggctggtttttgagtcaatcaactaactcttggcagaaagccaagcaaatggaaaacagactttgaaaccggctaatctacaactctatgacaatacctttctaaaaatgttctgtatttgctaaatctaactcttttctctatgtctctatccctctgctgaaaataaagcaacgttattatgctgccataaacaaggttttttcccaccactggaagtattgtcttctttgctctaacaaagatgcatgccatttattcactgcaatagataagcaattataatgctgtaagatgattctgtaaatgttgggcacagaaatcctgcctgctttacaaacatttaaaaaaacttagatgaaactacaactacaccgaaatttttagacatttaagacctttatttccttctagcatacagtaattccttgccttttcttattttgatgggcagttacaatttataagtactttttaaactaggaacaaccggttgggaactatctgaaagcaatcagctaaggcaatttccaaaaagaaaacccaagcagaatctaacgcacacccttaacacggggccagtttttaagaggtaacaacacgttccgcgtttttagttttcataagcagtacaggtttatgatcctaaaaacatctcaccatcattacaacggaattccttccaaaactttaagttgccggatggttacgtttcagcccttctaaattagcttacgctttactccagcaaccaaccccagcaatcccgggtcaatctggagaactgacaccaccggtaggaggcaaccgagagggataagactttcaggagcagaattatgacagattctctaaggaaacactacagtttttccttcgcctggcccaggtgcaacatcgatttatcttttggccaaaatctggcgccaggtttcaaacacgtttcctctggttgccaccaaagtgaagcagggaagggagtggactgcttcccattgatccttggaggatggaaataaagcaagaataggctgcagggagacggcaatcctatcttccccaaggccgcttggtttgcccggacctccacccagcaaagcgctattacagcttttagtcacttccatcagtgtatactttggttgcgctctgggtgccgggggcccacgcggggctggtgccataaaagccctgaactgcctgaaaaaggggcgggcgccaaacaagccagggaacttacccagtttcttccacatggcaaggtgacaagcgagaaagcctttgcggatggcagcgcaaaccttagccggctcggacgaggtgaaacccttctgcttcttgatgaaaccccacaagtgctcccgggcaaactgtgccgcctcccgcccgccgtgcccgtcgcacacggcgaaaaaggccacggaggaacggcggcggcagcagcggctaggtgccggcgaggccccggcgtccgggagagggtcgcgagcctctcgggctgccaccgctgggcctttccccgagacttcgccgccgggaagggcggccggcgacggccgcggaggcaacggctgagacagcgaccgccgcggcgagggcttttcttcagccgtcggttcgggctccacaacgatttgagtaacgtcctccatgtacttcctcccgccctggtcggagaagacgctcactcccagcgagtacagccccgccatggccggctggccgggatcccgccggtcccacgcagcccgccgaatccggcggcgggagacacactaggcgctcgccggccaactattgtttatcttcgacgacgccgagaagggggagggggcggacccggagaagggggggcgcgcgatgtctggacttgtccgcgagagctgggccggagcgccggagcgagcagagccaggcagttgcgcctgcgcactgcgcttccccccaccgcccgcgcccaccacacaaatcaggcgttctcccccgctgacgtcactcggctctctaagctcgaccaatccggagtcgagtggagcgagcccgccctccgtccccgccttcgctcccgcctgcgacggccgcgctgcctcctcccgccgctggcgctgggcccgcgcatctcctagtttgcttcccctacgccgcgggcgttttcgccctccgggttgtcggcagttgttgatcctttcccgagcggcttggtctgtgtaggcttttggctcagtccagcgttcttaatgcggcctgctggccttggcgtcccgctgcttgctttgctaggaaggtggtgtgggctcgggcccccagcgagtggagaatgaagggagaagagttcaccctcctcctaagcgaaatggcgggaaacctcccttccaaagggcgattgtgagctggccggaacaagtgctgcacccttgagctggatctgggtgggacgtattcgactgggaatggaggagggagggagtccagttctgttgtttaaaaagcacttaggaaatttccaccgtcagctgcacagtctcggttcacataactaggtatgtcagagacgtaagagggctgtattctaacgaattcctaggcagatcttttcagcttttgttaaaggtagtgctcgttccgaccagctctggatacagcattttattcctgcggtatcacttcaagttatcacttgaaaataactgacaaacactgccaagagccccagtgctctaacggtttggtgatcgtcccctctcttcaccgagtcggtcacaatcccaacgctaaaacctttgcacggattttcatggagttaagccgcagagcgaggaatacactagtatttgctcagtagcatacgttttgtagttgaatcactttaaagttcacttttcccgtttttggccatttcttcatcaatctgtactttcctgtaaaacctttgagattttcaaatggcctaaaaacagtatggaaacgggaatggggggaatgtacatacagttggcacaagaaataaaaatagaaaaaatctttatatcaataaaaatataaataagcaaaatcagctcaagaaaatgtagaaaatctgaatagatcaactaagtaaaaataaatacaattgaagatattcattaccccaaaaagcactagaccagatggttccagggcatggaaacgcttgaaaaaaaaaatcccagcttgtttggagaggtaatcataaccctgttagtaaaacctaagcattatgaacactaaaaggaaacctacagaccctgttttgtaacgatgaatacaaaaatcctaaatgaaatattagcattgtaattagggagcagcctccatatcacaagaacggtttgtgtagctctatattattcatcttaccgttcaccacgtttgacccaagagattaccaaaagataattccatcatgctttataatcctttccacctcaatcacaaccagtaggatctgcgtcatccgtttattgctctagtatctccatgctactctctgcttcaattactctgattccatatcccactcttcaccaaatatcctaaccatttcacttcacacttttgatttcaacatctgccatcaaccacttcccctttattcttagcctcttctgtaaatgttcccatcaacttcccattccaactgaaacccggtttatcacttagcaaaactacctcccttgcaacttttcaagtacaggaggttatttttcctctcataggtattcttatctgtggcctattcctcatattacctccaaaccacttctcttccttcctccctcagaaactcaagtgcttttaaaatttatgcagactgctgctactctgagatgctgtcagctactgatccctggtatctccccatcatttttcatagcccaccgtctttgtttcttccactattcgtgtcacttctcatccactttatt

SEQ ID NO: 1244535 - DNA, 4001 bp, Homo sapiens
tatattttacgtttctcaaaaagcatcattaccttgctaattgacggtaatactgtaattgaacagtattttaaaattaaattttagatagcttatattatgaaataccaacacagtccacttctatggaagatttgttaaatgattttcccctattgataaactgctgctttaacaggagaatgatctgatcaggtgtctattagcttggatgaagacaaaacaggtttactttccaggcccttcttttctttaggcttttgagaaaatcccaaaagtgagtttgaacttaattacagcgaatcttgcagtagtaaactttttgggtggccagagtaacacctttcattacaactatcagctgaatggcaaaagacttcccaggtttaccaatgttttcagagacttactagtattctcctctgtcattatttcggaacaattccattgagaaacgcaattgtaaaccgtttctatttcaggcctataaaaaccagaactgggatgaaaggcaaagccttgacctttctattttagactttcatctgtgtagctaagccatctgctttctccccaccccatcccatctacttaatggactgaaaatactgcacctaattgcaatttaatcaaaacagcctgacttttccactttaatgaattatggctctttcacccgaaggcttgcttgcaaaattttgcttacccttccctctcaattccttcccacttccctcaattatggaatgtcaaatgtctaaactaagagactaggcttccctgtgtgaaaacatctaaaaagcccttcactttcaacactgagcacctgacggaaaatctactccattctctcatctggatacggggccggtataaccatcattgttgcagttacgcaggaggcacctcgcagctcagtctagaaaggagtcgcgtctctgccgccaaacaacaaggcactcagcccgggaaaagacagactggggtgggaggaaacctcccggagaaagaagggatctgggaagaagagggagctcaagcctgggaggaaggacctttccaggcaggaaagggaaaggttgcgtgaagtggagctagaagctgggggccgaggtgaaaggggatgaggggcccgggcccggcgggagggcgccggggctcaggagagcggcttcaaggccgggtaggaggcgtgggggccgaggcgggcgtgggggccgaggcgggcgtgggcagctctcagccgaccgcccgggtccgagcagcgggggcgctttcagcggcggcaggcgcgggtgcgggggagaggagcagaaaagagagcagtttgaggggccgagggagccgcgtccgaggccggcgcggtggggaccgcgggcccaccaccagccaagcccagctacttaactatttgtagagctgctgcaggcacaggtccaggctttcgccctccacctcctcgcgggtgatgcgctctgacagcggtcgcgggagcgggggcaaaggcggcagctggggcggcggcggcggcacggccgagtgccccggggctgccgccgccgtcgccgcgccctcctcctcctcctcaccctcaaccgccgcctcctcctcgggctccgggtcttgctcctggtccccctcctccgtcgcggctaccgtggccgcctcctccccgggttcctctaccgaagcctcggccgcctcagcttctaccagttcaggttcgggctcgggctcggactcgggttcgggttcgggttcgggttcgggttccggctccggctcgccgccgccgcacggtccgcgaaactcgcccaggaatagctccaggaagcgccggtaagttttctcctcagggatgcagccggccatcgctgctcatgccccagggcagaccgggaaaggggttgggggaagcccaggaagggtaaggggctgcttttgagcctagggctccggcaagggcggttaacggccgcaccggcacgagcgatcagcactaggttgcctggagagggctcccgcaggcgtgcgcgccgccgagcaccgacgtgcgcggcccgggggcggagcgcgccgcccctctcggatctggagggaaagttggtggcgggcgcgcgcagggtccagcggcggcccaccctttattcctacggagagctcagcccacgctgcctagagactgtcgccatggcaaccggttctaattaagcattgcagggtccctcccgtcgagtccgcggagtctaaaggacactccactcgcccgctctccaactctgaatgtctttattggttggataccctaccctcacgtggttaagagtgagctaagacatctccaagtctagctgttggttcccacttgggttgcttggatcccaattggatgtacttccatttccttatctgttccttgccttagcgtatgttttgaaagataccacactgtgaacaccttttgttgcagtctttgaataagtagttttcaggcagagggagcttcaaatacctaccaagtgataagttcctttgcataggttctctctcacttgattctgtgaagaaagtggtgttactctcatttcttaaaaggaaactgaaaattatgatattaatggtaatttacttgtttcaaggtctccaaacttccagccttggcgttggagaactcaggtcgttcagtcgccaaagctttccgaaagtgcatttttccttaactcaactctgtctccggagattcaatagtgcaattgtctgtataacaccttatttctattgggcttcatagtttacacattgatttcacccttttaattcttaccacagtcccttgaggtataggacgttaccgttatgatttttttttttttgagacaatctcgctcttgtcacccaggctggagtgcagtggcgcgatctcagctcactgcaacctccgcctctcgggttcaagtgattctcctgcgtcagcctcccaagtagctgggattacaggggcctgccaccacccccggctaacttttgtatttttagtagagacggggtttcaccatattggccaggctggtctcaaactcctgacctcaggtgatctgcctgcctcagcctcccaaagtgctgggattacaggtgtgacccaccacgccggccaattattccattttataggtgagaaaacagccttaaagacatggtgactttgctcaaggtcacatgcaagggatgcaacaaggactcaatccaggtcttttcactggattcacccacttcaatggattttacccattagttttcaggcaaccaagactcccctctttagtctctgcataatgcatattatacttcattatataatatgtattttttcttttctctttcttttttttttgagacggagttttgctcttgttgcccaggctgtagtgcaatggcaggatctcggctcactgcaacctctgcctcctgggttcaagcgattctcctgtctcaccctcctgagtagctgggattacaggcatgtgccaccacgcccggctaatttttttgtctttttagtagagacagggtttcaccatgttggtcaggttggtctcgaactcctgatgtcagatgatccgcctaccttggcctcccaaagtgctgggattacaggcgtgagccaccgtgcccggccaataatatgtattttttctacattttgtttgctcttcttccccatccccccaagtctctttttttctttcttgggttggaattgaaatgactttaagtgattctaattttcttaccaaactacacacaaacctattatttttaagccttactgaaggagtgggagagaaagaagctgtgttgttatacagctgtatagatgatagcatcattactgcaaactgccatgtccatggcaacatataattcagcaaaaacatagtgattctttctctactttgaaaaacatgttctcacaaattatccaccccatcctctccatgtat

SEQ ID NO: 1244536 - DNA, 4001 bp, Homo sapiens
ggagaaagggaagcaggaaagaggagaccagtgtgcagatctgtgcaaatgggatgcaaatgggaggggaggccaggggtgaagcccacaggagaaggcgccctggatgagcaggggtgggaggtggtccaccacaggctggtgaagaggagctgcaggtggagtcccttccacgcggatgcctgctggttgtcttaggccagccatctcttttctttcaagcccacaacccgatgttaaggcccatagctgcccattgcagcctcgggactcctgtgttttgcaaggccagactgagaaaaaattggtctttacgttgggttgttgcgccacgctgacagcgggctatgtgtggcgaaacaatccctccccactgacaaaagctcccctagcgtctgcccagttccagggatcaggcggacagccaggaaggtcggtgggggtatagtacctttcagcgaaggtggtgtgtaggcacaggggttgggtctcttcgacttgagatggtgcccctctcctgaggctctctgccaggggaagtgccaggttaaaggggctcagcagaggcccttgccttcaccatccctccattccatcccacccatggccacccaagcagactgatttagccactgctaatgggtcctgcacctaggctgagcctccccaccctgtggctttagggggggccccccataagccatggcctggttcagggcaggactctaggtccaggaggttccaccctgagtctgagcagaggaggatctgctggtggcaccctggcatgaggcactctcagaggactgcccattgatatgctaatgtgtcctcttgggtggcaccccatactggttggttgtcactgcaggcacccgtccaccccaccccaaggggcccaggcatccctccttccagctgccccaggaaactcacctggtggggggaggcttcctcctctgaggaaggccaccaaagccaaccgaaccagaaccaagcgaggaggaaaagagaagagggagagagagaaagaatccgagttattttccccagggtctcaatctctggggacagggaaagtgtgccctctccctcctgcggctgggaggtgtcatgtcaataaataaagccaatagagttgggttcccagaccttatccactccccagtctccagctttgactcctgttcatgggactttggcagggcccctaggaaggcatcagagctagggtggggccagggctaagtgggcagggaggggcctacctggtgaggagtgctctgagagccggaacagcatggcaggcgttggtctcctgcgccggatctaaggagatggagggaggggtgactggatggacacctgcagccctcccccacccccaggcagcagggaacaaacagtgctttggagtccccagggaacctttgaatcaaagtctgtcagagccaaaaggaactctgtagctcacctaaccccctcattttacagaggtgaaaaagcagggctcagagagatttggcaatgtgcttaaggccacacagcacaacaagtccaaaggacgagaaaaaccccagtcactgactcccagcccatgcctgtcccactccatggctactccagaacagacatctcccttcctatcttctcccaccaaggcccttcctctctccagtttctgaaaacatcagacctcggaagccaaagctggctacagctccagctgccacggctgggccctctggggaagatgccccacgggccatggcacccatgtggccctgcccacctaagatcagctcaagggcttcaaacaagctggatccagcttttcagaaggagactgagccagcgcactgcaggcaccccccacctccagctgaggctcagggacccaaaggggcctgggggacctctctgggggccttggtttgggcttcttttccagtctctgtaaggctgcagaactcttcacccagtccttgtgagaaatgaaaagttgccctccttgctacgtgagccaagcagcaactgaccgcccccctccccgccccgcccctcagcttggcaatcagaccaactgtcagttaattaggtccctgttgagctccagggaaatgcacaaagagaaccaggtgagttaagctgaaactgccacctccccagccaagctccccatgacaccctcatgacccaaagctgcttaggcccaggactgtaccccctgccctctatctccccccataatgacttggccccctcatcactgctcagtggggagccagctgcatctcagctcagcaacaagtgacccctgctccactagggatgggaagtggagctctctgtcacagcacccgccagcctttggaagcccctcaacccccaagaaggccctcaggaggactcagtagtctgtgggaagaggtctggctttgtgatgactccccacctctccctccttggggttggggctctggggcctgacagcaggaggccagagccaggttctggagaccccagcccaggcacacacgcgggattagagaggggcagggtagtggattcacccggtggcagcctcatactcctgccctgggtgacaaggtcagtgtccaccgctgctcacatctgaccagctctgggacagagccaggcggagcggtcccggtggtagcctaggagactgactaccctttggggactgtgctgggaccaaaggacgcccccaccccactcctgggcggtctggaatcggcctgtccccccacccccgcacccccagcctcactgccaggaactctcttgccccgggatcaggaccaaagccgcggggaaaagttgcacgagtctccagctaacttcacacgcggccccgcgccccgtcctgaccgaggcagagcccggctctccttgcgcccccacccccaggccagtccggccggggcagcgccttgggagggcgaagaagccccgcggggtgtgtcgggtacgctgccggggtggggcacgggccccttaccatctccacctggcgggggtcgagctggctagggggcgcgggcaccgagaactggatcttcttgcggtccttggggtccatggcgcgcggggtgggcggtggggctggggtgcgcgactcggggtcccggcggcggtctgtgctgggctcccccgcgcaggcggcgggctgtgcggcgagaggaggaggagggctgttcgcgcacggataaaaataccgtgcccgccgaggggagggcgcgggagcgggaggagggtcggcgcccgggctgggcgcgcccccaggctctcgggactcggggctcgccccccgcgctcgctgagccaggtctgtgcctcgctccctcgcgctccccggcctgggtgtctctgcgtctcggtgtctctcccctcctgagtgtctctgcgtctcggtgtctctcccctcctgagtgtctctgcgtgtctcctctctctgcctctcccgtccttctccacctccctccctcagcctctcctcctctccgcgtgtgtctctgcctctgccgggctcaccctccggtcccagctttggggtccccagcccgtcccctccgcctgggactggcgcccgggtgctcggagggagggtttaggggaaactggccaatgagcatggagaatcgtgttctcctggggctgggaggagggtgggagttagagccaaggcctggggagccagctggggggccccctgcggtctccccagaacttgaagctgcattattgatggagtccagcagagaggataaagggggagggagggggagaggggcagcggggaggcaggactctggctttaaccccttcgtggtcctggtactgggagtttcagagaggcctgcgaggtcgtggggagagtaccagcctgtcacgctgtgaatgggggtgtcctggaaagggagcgagtgtgaccgagttgtgtgtgggaggacacgtgtcagtcatcgtggcaggga

SEQ ID NO: 1244537 - DNA, 4001 bp, Homo sapiens
ccccagtcactgactcccagcccatgcctgtcccactccatggctactccagaacagacatctcccttcctatcttctcccaccaaggcccttcctctctccagtttctgaaaacatcagacctcggaagccaaagctggctacagctccagctgccacggctgggccctctggggaagatgccccacgggccatggcacccatgtggccctgcccacctaagatcagctcaagggcttcaaacaagctggatccagcttttcagaaggagactgagccagcgcactgcaggcaccccccacctccagctgaggctcagggacccaaaggggcctgggggacctctctgggggccttggtttgggcttcttttccagtctctgtaaggctgcagaactcttcacccagtccttgtgagaaatgaaaagttgccctccttgctacgtgagccaagcagcaactgaccgcccccctccccgccccgcccctcagcttggcaatcagaccaactgtcagttaattaggtccctgttgagctccagggaaatgcacaaagagaaccaggtgagttaagctgaaactgccacctccccagccaagctccccatgacaccctcatgacccaaagctgcttaggcccaggactgtaccccctgccctctatctccccccataatgacttggccccctcatcactgctcagtggggagccagctgcatctcagctcagcaacaagtgacccctgctccactagggatgggaagtggagctctctgtcacagcacccgccagcctttggaagcccctcaacccccaagaaggccctcaggaggactcagtagtctgtgggaagaggtctggctttgtgatgactccccacctctccctccttggggttggggctctggggcctgacagcaggaggccagagccaggttctggagaccccagcccaggcacacacgcgggattagagaggggcagggtagtggattcacccggtggcagcctcatactcctgccctgggtgacaaggtcagtgtccaccgctgctcacatctgaccagctctgggacagagccaggcggagcggtcccggtggtagcctaggagactgactaccctttggggactgtgctgggaccaaaggacgcccccaccccactcctgggcggtctggaatcggcctgtccccccacccccgcacccccagcctcactgccaggaactctcttgccccgggatcaggaccaaagccgcggggaaaagttgcacgagtctccagctaacttcacacgcggccccgcgccccgtcctgaccgaggcagagcccggctctccttgcgcccccacccccaggccagtccggccggggcagcgccttgggagggcgaagaagccccgcggggtgtgtcgggtacgctgccggggtggggcacgggccccttaccatctccacctggcgggggtcgagctggctagggggcgcgggcaccgagaactggatcttcttgcggtccttggggtccatggcgcgcggggtgggcggtggggctggggtgcgcgactcggggtcccggcggcggtctgtgctgggctcccccgcgcaggcggcgggctgtgcggcgagaggaggaggagggctgttcgcgcacggataaaaataccgtgcccgccgaggggagggcgcgggagcgggaggagggtcggcgcccgggctgggcgcgcccccaggctctcgggactcggggctcgccccccgcgctcgctgagccaggtctgtgcctcgctccctcgcgctccccggcctgggtgtctctgcgtctcggtgtctctcccctcctgagtgtctctgcgtctcggtgtctctcccctcctgagtgtctctgcgtgtctcctctctctgcctctcccgtccttctccacctccctccctcagcctctcctcctctccgcgtgtgtctctgcctctgccgggctcaccctccggtcccagctttggggtccccagcccgtcccctccgcctgggactggcgcccgggtgctcggagggagggtttaggggaaactggccaatgagcatggagaatcgtgttctcctggggctgggaggagggtgggagttagagccaaggcctggggagccagctggggggccccctgcggtctccccagaacttgaagctgcattattgatggagtccagcagagaggataaagggggagggagggggagaggggcagcggggaggcaggactctggctttaaccccttcgtggtcctggtactgggagtttcagagaggcctgcgaggtcgtggggagagtaccagcctgtcacgctgtgaatgggggtgtcctggaaagggagcgagtgtgaccgagttgtgtgtgggaggacacgtgtcagtcatcgtggcagggagagtgtgcaggggtgtgccggggccctgtggtgcccatagccagggagtgtgttttggggggtccggtgtggtgtgagtgtgtctgtgtaagtgtgtcagagtgtcaaagatgcaggtgtgagtggcagggtgtgggaggactgcgtgtgtgcgggggagggtgtgggtgtgggggaggatgtcagaggctgtcaaggtgatgggcaggcgtgtgccagcttgcagggggtgggggactgtatccacagctccgctgtgcagttgctggggtatgaggttgtggatgtgtgagcgctcctgtgagggagaaggggaatgtgccctgccatgatgtactgtagattcacgtggctcctgtctttcctctccggatctaatggggtggggaggacagggccggcccagagttggggtgggtttgggggctgcctgtacacgtgccatcacgtgcatgaatttggtgcattcagaagcagggttgggggagacaggtgtgagcctctctctctccagaggtatttgtgtgtgtctctggagcgggagcgggaggagctggccctgtgggtggaatgtccctgtctatttggtctatttgtccgggccttgggtgcctttgcaggagctgctgtttccctccttggagctgtgcagagggtctgaatgcttctgtctagcactgagagggtgtgtgtagacgtgtacatgcatgttttcctggggctctgtttgtgttggcgtcctctctcctggtcactctcaggcctgaaacccccaatcctcctgcagcttttccactcccagccccagcatctgggtcctgggtggagtgaaaggccagaggaatcttctggaattggggtcagggcccactctgggggtgagggaaagggtggcaggaggtccagagtgttgctcataggagtgggatgtcctggccatccagctccacatcagcccaccccaggcctggctcaagtccctgtatgtttgttgacttatatacttgttgggaaacagctggatgataagttgttggcccaggggtgtaggcatctctggcagcccctaggcttggcccagaacctctgtcgaagatggggtgtggtggggagtggcaaagacctgtttggcagtgccttcggagggtaaataaggaggtcctgaaaggaagaaggggtatgggaagggcatggcccaggcagtggcccggacagccactgggtgggcagaggtggggaaggggcttgtggcttccagtgctggcagtgtggggaaggatcgtggggatgaaggggacagaggatagctgggagggtgatgagagggtggagacagggaggcatcagcaccagttgcacctcagagcccataggagctgaaaaggcctcagggaacatggcagctgagccccatttgagcaggagggcttatttacggaggctctgctgaacttattggagctctgggagaccccagatcaggaaacattccccggatcccaggctggggcagctgagaagggagatgagggcagagaagcctccctctcagctaggcctggaagatgaggtct

SEQ ID NO: 1244538 - DNA, 4001 bp, Homo sapiens
tcctgcaggtgccgggcggggaacgcgggcccctccctcggaccccggctgcccggccactcccccgcgcccggccccgcccggccctgcagggcacccgcggccgcgcggcgacaccagggcggggcccagccgcgcccgccccgccccgccccgtccccgccgcccggcgccgcacccgcctcacctcgccccgacccgccgccaccgcctcttccagctgggaggccccgccggaagtgacgccaccgcgggctgcacaggcgcaggcgcagcgcgctctcacgtgaccgcccggctggcggagggcgggggcggccgggattcccgtgcggggttggggctcgtggcggaagctccggacctccctggcccgaacggtgagcgccgccggccactgggagcggccagagcccagtaatcaggacaccaccacagggaccacgtgtgtagacccaggccccctcacctgggagtcacgtttattgaaaaagtaaaaagtgtcacagtaaaaaattcacctggggacaaagccaggcctaggaggggtggcggggtcgtggagggacgggtccggccgcccctggcccacgggtggggcacgtgctggcccatgggcgacgcgcggcttctccagggaggcggccctgggcgcgggggcgggcgggcaaagctggctcagtccatcgtggtccctttgaagagctccaccagctccttgtagtccgggtcgatgaggtcggagggcaggtcgccatcgtcgttggttgcatccctgtccgctcccagggagataaggtacctggggtgtaaaggtcgctctggctgaagcggggaggagccaggagagtgctcgccccaacccgggtcagagggccagagtcctggggtcacctgtgtgtcccccaccttggggtcctaaggtccgggtagggtgaggaggaagaaacctgaccctttggaagctgtggccagcttttcaagttggttctattgaggacaaaggcagaaacaggattccagaagcctctagggtttgcagggttctttttttgttttttttgttttttgagacagaatttcgctcttatcacccaggctggagtgcaatggcatgatctcgactcacggcaacctccacttcccgggttcaagtgattctcctgcctcagccttgagtagctgggattacaggcgcgcgccaccacgcgtggctaattttgtatttttagtagtgagagggttcttgtcacgaactcctgacctcaggtgatccgcccacctcggcctcccaaagtgctgggattacaggcgcaggcgtgagccaccgcccccagcctctagggttcttgccgacaccacccgggctacattttggggctcccatcctggggacccactgaggcccggaggggtcgggttcaagcctgtgtagacccagggccccctcacctggctatgtcagggtacccatcgctgcaggcaatgtgcaggggtgtccagcccgcctcatctcgctggtgaatgtcagccccgtatttgaccagcagcttcacgcattccaggtttccagagagcacggcttcatgcaaggcggccaggcctgggcagggaggacgggaggggtcaagactgagccccaggtcaggtcctccttgctggcctctcccaccaccccacaggccctggccagctcttccaggctttgctcacctgaggggtggatggtggccagggagactttccgagtccggatgaagcgccccacctgctccaggtcaccctgccggatgtggtccaagaacaggacatcattagggaaacgcacgctgcgatcagccagcatccgccgccgccgctgccgtgggctgtagcgggcatagcgggcagttctgctaggcatcttgggcgctgtggggcaggttgcccctggggaccctactgcactggggttaataatgtatccggtcccgaccagatcagcttgagggctcctgtcggacgagccccggcctctgacttgcttatatagggctcaggggctatataaagctgcacggtcatcctccccggcgcgaggggctgaaactgagctgcacccccgccccgcaccccagatcatgtttagtgactcatctttcagcccatctgtcaccgtgcccggccaaaggggtcagatcattcctgcctgtcgctccctgccccacagctggacctagaaggtgccttaccgagggcaggaggaggcaccggtgcagaacccatgagatagctaggaacgcgagatcaagggcacagtaggtaccaaggtcattggaagggcttttgctctctacctcctggaaagtgaggggcggccaccccctccacatctgcagaagcacaggtccaccgtgctgtggtgaaacaggccttagcccctccatctccctacctgtcagttttcaccttccagcgtggcttgcctcactctcagtggttttcccaaaactactctgatggcctaggcaggcggatcatgaggtcaggagatcgagaccatcctggctaacacggtgaaaccccgtctctactaaatatacaaaaaattagccgggcgtgatggcgggcgcctatagtcccagctacttgggaggctggggcaggagaatggcgtgaacccgggaggcggaggttgcagtgagccgagatcgtgccactgcactccagcctgggcgacagagcaagactctgtctcaaaaaaaaaaaaaaaaaaaaaaaaaatgactctgatggtgctgcttcctgctcagaaaccccgcaggcatccttggctgggatctcagtgcctcaggctcctgctcagtcagtcctgcgacttttcctccacgtgcctggctcccctgcctcacacacctgcaggggacagggtattccctacacactcatgggttcaccctgcatagtgtctctgcattccaggtttgacacacatactcacacttaaggtggtgtccagtttgctctccacgttcagggaccatcacaccctgggtggtgtgctctctctgccccggcccctgtgatcttacctctagaagcacagccaagggaatttttttgtttgtttgtttgagtcagagtctcactctgtcgcccaagctggactacattggcgcaacctcggttcactgcaacctctgcgtcccgggttcaagtaattattttgcctcaccttctcgagtagctgggactacaggggcatgcaccaccacgtctggctaatttttgtatttttagtagagacggggtttcaccatattggccaggctggtctcaaactcctggccttgtgatccgcccgcctcggcctcccaaagtgctgggattacagacgtgagccactgcgcccagccaagggaatttttaaaactcgtgttccaacaggctcttcattgctggctgcctttacttttgcaacagccccagtggaggtccaaagtagggcttggactacaggacatgagcaagtggatgggatgggacacagacacagagttgaccagggaggtctttgttgtcagggacagcgatcgattgtgctaggagcactgcagcacttgaagctggatggatgagtctgccggggctgtcttcacagaccacagactgagtggcttaaaaaacagatggttggccaggcgtggtggctcaaccctgtaatcccagcactttgggaggccgaggcaggtggatcacctgaggtcaggtgttcgagaccagcctgaccaacaaggtgaaaccccttctctactaaaaaatacaaaaattaggccgggcacggtggctcatgcctgtaatcccagcactttgagaagccgaggcgggtggatcacgaggtcaggagattgagaccatcctggctaacacagtgaaaccccgtctctactaaaaatacaaaaaaaaaaaaaaaaaattagccgggcgtggtggcgggcgcctgtagtcccagctactcagga

SEQ ID NO: 1244539 - DNA, 4001 bp, Homo sapiens
cacggcgccagccagtcacatggccacagaccagctcaccctcacgatctgcttccctctttcacttctgcaaagttggggtgggggtacaaacagaatagaggaagggctgcctgcggtcccctgcagcttcgttttgagaagttcctggctttcccctttctcacctcatccagctcccatacagggggaaagcaccccggccccctctctacccagtgaagggcaaatgtctctcctgaagacacacacaccccttcacactacccaaccccagcctctggcagcctctggaggaaggaatgtccgggtgaggaagggaaagcaggtgtcccaggacccgcgtggggcagggcgggttccgcggagcggcggggcggggcagcaggcggaggaacctgagggcaggtcggggcaggccacccccctcgcacacctgaaaatccctctctgacaaacagctggaactcccccacgcccccctgagggtgggaacttctgggaagggggctgggtggcaggggctgactcagcctgccaaacccggctggctggctggcgagcgggggcggccgcgtgcacgtggcaggggcggcgcgggggcagggcgggggggctcacttacttggatgggcgccgtgctgaaatggatcttccggctcggggctgggtcctcctcctccgacagccccgggatctccacgcaccccgactcgggctcgtaggggggctccccatcctcctcgtcgtcttcgtcgtcctcctccagggcactgcccgcagagtcctccccgagcccactgtaggcgctcacgtccaccaagtccgcctccgagaagtcctccttcttggattcatctacctcctcaggggccacgtccggggcccggccattgcccacccccctctctggcggcgctaccgccgccgcctccttctccggggccgcttgggcctttggctcctcgggcgcggggctggctgcagttgccacggtgctgccattctccagggccgcgtggaccgtaacctcggcctggatcacctccccgggcgccgactcggcctccgactccccgctctcctccacctccaccggcttaatcttgcgcacctcccggggcttggggggcggccgggcaggggccactcggtgctgcgggggctgctgccctgcggggcatcgctctttctcggccggggcatcccccgacggggcgggcggcggcggcggcgggggctggaacacccgggaccgcttgctgaccagcttcgagttgacctggggaacccctgcggccctggggagcccgggcccgcggtggaggccggtcctcgagtcggccttctcgaagacggcgctgagctggctgaccgtgggggacacggcgtcagcgtccagcttgtccagcgcctcggtgctgccgttgaagcgcaccacgacgtccagcttccggtcctgcaggccggcgcgctcctgcctcagcagccgccgcgccgcggcctccttgtcgccgcctgcggccgctggggcgctccgttcgaacagcttccgcgtctcctgcagccgggacggcgggtgcggcggcggcgcaggctgcgcggagggcgcgggcttggagtcgaagcggctcacgcgctccgacacgctggtgcccagcttcagcagggcgctgtggtccacgttctcgttcaggctgctggcccgcggcagcgacaggcgcacgccgcgctcggacgcccgtggggcctcggccaggcccgcgccgccgcccgcctcgcccgagggccccgccgtcgtgcccatctgcaggaacatacttttgatgcggtggacgttggagccatatttcttgtggtgggcccccttgggtgcctcgtcgggcccgggcgcgtcgggcggcttcagcgcctggatgcccgcctcgtaggcgctgcggtgcggggaggcgctccggaggggacccccgggcccccgtggctccgtcttcatcatggtggggggagccgggttcgcatgcccctgctccccgctcccccgcttcaacaggcggctggccaagtcgggaccaccgccccctccccccgataaaagaaaccccgaaggccttttttagggtccccccaaaaccaagctgccaaaaacagttaatcccgctttaaaaaaaaaaatgaaaaaaaaaaaatctccaagcgccctgtgtgtgggtcgcctcccccaatcaagctgccgaagacagccagccccgcttcaaaagcccgagcggcctggtacggtcgcccccacccaaattagcaaagcggcgtctggggccggtgggagcgcgcgccctgcccgcgaagcagccgcggtgtcgccggctcacatcgtccgagacggtgtcagcggggctggcagcccgggcgtcccccagtccggccggaggcctcggctctcggggggcccggcaccccaacgcccatggctgctccgccggcccgggccgctccgccgccgcgcctccctccctccctccctcccccccgtgccccgagcctcggtctttctctggctttgcccgagcggcggctgccggagaccgagcggctgcccttctcgcagccgccgctgggggactggcacctctgggtcctaaagggatcggatttccggggccggagcctgtgagccctccccttcccctccacccgaacggatcccctcccctccccagccctcgcggagagccttccgctgcccccggacgttggccagcactcttcaacctgcttccatcacaacttctgactgcggtcacaacccacagaaccgcacctccatgaaatattggggggaggcagtacatccacgatggtctcagtgtgaggggagggggtttgtagggaggggcagaggttcattcttcagtgtcctcggagctagctcttcggtgtgcttcaagcctttagcatcagaatcgctgggcacttggtaaaaatgcagatttctgggatctctctcgaaccttgtgaaggagaatctccgaggctgaacccaggaatctgcattttaacacttcactacaggcaatctttggcccccttggaggtgtgaaaccttggtccagcgctggtgacctttcgatggtgggggaggggtggtgaagaaaggaggtgaaccccgtcatccaagtagcaggggatcaccaaaactgccgaagtctggaaaggatgtcctgtcgcctgtctgctgtgcacccgtcttcaggcccctaccctggcactcctgcctctcaaaccggaaggaagggtttgggagcaggaattcgagaggcctggggccaaagtttcgccagtgagagctctaacttgggtctctgatttaaaggatcctggccactgtgttccggttggggtgggggggtggggagggtgacagtgacttacacatcccctgtcctggcaacccagaaagctgtttgatgccctctgcaccccccgcatacacagctagggtgctggcgctgcctgggccctgggtgtgagagtccgccctctggacaggtccaggtgagctggttcattccacacatcccagaaactggtgaacacaatgggccctaggacccagagaacaactcaggcacaaagcctccccccactcccagctgcttcctgcatctcaggcctttctgcggcctctgcctcctcccccgccctcttcccctccatcctcttcctccttttcctaatctcccactctctcccccctggcctggaagggctggcaaagggagccctcctaccactccactgcaggggtgtgtgtgggttttgtgggatattaacgcgttaccatgtgcaaaagagcttagagtacagcgtgggggatggggtgtggggaagccgcctgggaaccctggatattgggatcgggaggggccaggaaccgcaggactgatcctgaggctggtgctaaggaagagggaagatctaggttgtgagctagagccggaagtgaa

SEQ ID NO: 1244540 - DNA, 4001 bp, Homo sapiens
taggctgcagtaaggcactggtgaggggtgcacttggggaagggttgtcatcaggctgtgtcgggaaggtctatgggtactgaactgggaagattcaagactgccacttcacagacttgctgaaggaccatctgctcagaggagtccctgccttcctctggccaccacttttccctctgcgaaggggagaggatgagttgagtgactctgatgacccccgccaacgttctggatgatccccttttcctctgccctgccctgccctcccctttctctcccatgcatttggcacttcctgctgcccccaccaggggtccacagagacacaggacaggctgtggctttgacttgctttattgagcctgtgtgggagcagggagcaagctttggccagagccaagggtgcagaggggagagctgggctggcgctgctcatggagtcgtaggagacagaaggtggcattataagtccagcgggctgagctccctgtgaggacagggcagaacatggcagtgtagggggtaggcctcgtgccctcaggaggcctcaggctggccctgggctcctgttctccctcttccaccccccactacacctttccaagccctgattcagtcccaccacccccatttcagctccagggagctggacagacagggcagggagtcaaactcacctggggacagcagcatgcggggacccccactccgagaaggccagcgtgtcctctttgtgtcttttcccatacctgggagggaagaggcagcaggggcaagcactgtgcccaggtgccagcccacctgtttcatatctgcctgtaggcaccatcttgcccagggcacattggtctaggcctgttgagcacagatgccctgttttcccaagagcaggcctggaaggggctggggctggggctggggatagggtgtggccaggaatgtggagtgggcccagggtcccaggggctgggatctctctccccaactgtggcacacacctaggcctggtcagcatgttgatgtatctacggagatcagctgcatactgggccatctgctctggtgtggcattgtcccctgggtacactggctccagtggggctccctgggcacccagcagtggctgtagtaacagagccacgcaggtggacaggagcagcagggagaggcagaggcgtgcggcagccatctgaggagcaagcagaggggaggtggagagcccgggctgcagattttcccgtgcccaggaagcagggcccaactatccagccccttagcccatcatccatttctccaagcctggggacaagggggcagagcaaagggccactccaagctggccactccacctcctagacactgctctgaaggcacggacagcctgtcctgtgagcagcccagcaagccagggcctcgcaagttagaaaagtatagcagagaaaatggggatgtgagtcctggagacacgggactcatgacatccagggcctcatggctcccaggaggcagcagctagtgggaataagggcatgccaggtcacccacagggtgggggacacagaatgaactcgggaagccaaggacagaaatccatggccttgtgggtctggccctccaccctgcgatagagacacagatatcggtcctggagaagacgctactgtccatgtcgtcctgcacagaccagcaaaggcactcacacagggaccccagtcactcacaaggtcacagtcacacattccagttcacagccatgcacacgagtgtgcacacacacgtgcagtcagcagacggctcttctagcgtgacaggtctgtccagatgcagaaagcaagacccaagcaggaccttaggcctcccaaggcccctggccctgcaaagcaccacctcctctccatcccaggccccagcctgggggaggcccccagagccccaggcaggctgagcccacttacccggagtccagagtaaatgggcactagaccaagcgagcacctgcctcaggccggatgggcccctgccctcggctgggccgctttatagtcctcagccccccagagtccccgcctcctgtcagcctctctcactccgaagccctcacccctcctctcactgtctcctcatactggcaacgccagtactgaggccagagacgggagggggacagggcagttctgtgggtgccagaccagcagcataacagataaaactggaccacagtaaaagtctcctgtgggcccccatcactgacaccccttccctttgggcaccagagcaggcttggttcaagaaagatggggttctgggactcgagagtgactgaaaggttttggtcacaggccttggaactagctctcctgcctcccaaagatcaacccaaatcatccaacggattctcttggggcagaagattgaggctgcagctggaagactgaggctacagccagagcctccaggctgaagaatggaaactcaggccatcctctgcagcttgcaactagaacaaggtgggaagagggaaggggcctcaggtcctcaggcaaggtggaaaggagtggggtgccaggcttggagaaacccatttggtgggtgcataggatgcagaatgagaactcatgtgcctgggttcaggggaaatgttgaggggggtgccggtttccagtatccatttccctccccatctcagagcccccattccagggaagtgctaaaaaccagcttcatttgtaaagcctcacattttccaaagtgctgccagctcagtcacctcactaaatccccacaacaacccattttacagattcaggatctgaaatctgctcagagatgtcaaatcactggccccaaaccccacagccagtcagaccccaaaatttaactccaaacctggactgttttttttcctaagtggggccgtcaaagtattgttataatttcccactttttggctgagaaacctgaggctcacagaggtaaagacgcttgctcaagatctcatagctaccgaggttccgaattctggcttagattctcaaccccactaatccatccccaccagaagcccctgagtctcccctgcccagcgtctcttcccaacccccagtctccctcccctgcttaggccaaggagtggtaactggctgtgtctgaatgacacggtgacaccaagtacggagctaaggacttatgactgctgacgttctgctgtcccagatcagtataccaagaagttgggagatgggggggactgttggggaagaggggactggaggtgaaactccagggatctggcagggtgggcttagagtcagacagacctgggtccaaatcctggctctgcattggctggctctgtgagcctgggaaagtaatttctttagcctctctgagcttcacttttcctctcagtaaaataggctcatcacacccatctgaagatagggagaataaaggaaggctcagcaaacatcagtgttctgccttgaccctctcaattttgattttggttaacaagaagagcaataatgcttcaccagacaacttacattccacaaagcaaatacgaaagtcattctgtctcagcaagcccgggcctttctctggactgaggttttccacttgcaaaacaagggtgtgaattggtggctggtctcagcctggccttgggtttggcgggtagaggttgcagctcgccgccagagggcgccaggctccaaccctagttaaaaggatctgagctcccacaggaccatggccttggagggacctgttctggctgctactcatgtggggacccagccccacccaacagacaatggatctagggattgactcagatgccagggccacttacagttctatcctgtcgcagaggtaaacctaagtgcctaagaaataacaggcactccacaaatgtcaaccaaaccgtagctttcatttttctcctttgcaaacaacagattcctcttctgggtcctctcagggatgtggtgacaatccag

SEQ ID NO: 1244541 - DNA, 4001 bp, Homo sapiens
tagtcatttggtcatggaataaaatcctctggcctcaggtcacatatggggaagctgcagacccaagatttaccagcataggagtcaggcctggtgggaagggagagcatatttccaactctttcctcctgtcttccacccctagtggaagattttgcatactcaattaatgagtagttggttgacaaaaatgtccacacgtgtttaatcccctgtttgcatatatgcagatctgtccagtgcctgaggaggggctgggtctagggtgtttgggtgcacctgtgtgatctcagctgggtgactccggatggaagcaggtgcttgttagtgtctgaagggccttgcagggagaggtatgttgacaatagaggagtccctgggctttctattttttcagttggtggtagaggttaagcgctcctgttttgggacccagatcaagtaacttaccctcttagtttcaatttctttaggttataaagtgctcactcaattgtgggttttgtcattatgggagggggaactggcagggaaggagccagctgtggggagaagagagttaggtgagtcctgagtgtttttgtggattactgtgcccaccccaagaccaatgacttggcaatatcagtggttggctgaagatgtgagcatgtggtccccagcctgcttctgtactggacccagagcccctgtgcgcacacatgcctgctgtggcattgatcccacacttggcaaggcagagcttctgagagggtgcaggaaagggaataaggaagccaggggcccagagaaaaaggtgcaattattattattattattatttgtcacagagtctcactctgtcacataggctggagtgcaatggcataatctcagctcactgcaacctccacctcccaggttcgagcaattcttgtgcttcagcctcttgagtagctggaattacaggtgtgagccaccatgcccagctaattgttgtatttttagtagagacagttttcactatgttggccaggctgatctcaaactcttggcctcaagttatctgcccacttcagcctcccaaagtgctgggattacagccatgagccactatgcctggcccgtttttatttttttaaggcccagagcttttgccttaaggatgagttagtttaaaaaagaaaaattgttataatcacagttaactttcacccagtttccttttttaaaaaaattttattgtataaatagagacagcgtcttgctacattgcccaggctggtctggaactcctgtgctcaaggaatcttcctgcctcggcctcccgaaattccagaattacaggctgagccatcactcctggtctcgcccagtagatgtttcaaagtagatgttttctaaaatattttacaatatttacaaattttaaataataataacgttatcaatattaattttgcttatgccaggactccatcccattggagacaaacattaagtcttatggcagaccttacagcgggtgctagttcccactcccaagcctctcccccgcctaggtcctgcaggtcccgcgtgctgcgaaacattttctttgtccctttctgcccagggcggctgccggtctctccaggaaccgcgagtaggtgctcccgccaggtggtatcggtgaaagcctgctgctcacccttcccttgtttcccaaaacttctgaaggctcccaaattcctgggagaccctctcccagggcctcctgatgcagctaccatactgagcgatccgtcgataacgcccttggcccaccgatcagtttaccttattagagagaaaagcactcttggaggtagtaagatgggccggtccttgatctgagaaatgggcgcacaacatcgctgttctctctgcaaaggtggggaccagaatccagcttgcctgaccttgcaagcaagcatcggcctaaaggtttcagcctcccagtggcgctctgtttgcacgccttaggctaggagaggaaggacgggagcacagcactgggtgcccctctccctgtagagtctggggcggggctcagtaagaaggcctgcggttggtggctccccacctcatagctgcaagtaggggcgaaagctggagtgtctcctcccagcagcctcctcgcctccccgcaaacctccgaatctccctggacctcctggttgctgtggcccttcctcccctgattggcttcctccctctttcccaaggccagagaagtcctctcttcccctcaccttcctccctcttcccataaaacttttaggaaaatgggggcgggggcggtggagaccaccagcctggaacttcaagttcaatggcaaagtccctgaccctccccccaggctgggcgccagcattattctaggggcgattaaactcttttgctgccccctgtgcacctcccagttcgggggcagtttaggggaggagagaaggtaatggtggaattctttccctcactctcccccgaccacttcgtcccctccccctcatcccctctacacagaactaactggtagggagagaggaagaaaggctggcatcggttcctcattggatgttttaaatctgtctcaggcccaggccagtgcctggggggaggggcggggtgtcctgcttttgggctagaggcccggggccgctcccgagctttctcccctcttccctggagagcgactgttcgggagggtgagaatggtataaatttcaaaaacaacgaaaccttcttttgccccctccgcagcagtcgcctccgggctttattgcaagtttacggtaacgagttcatctatttaattcgcggttgcagctcggggatttctattagacaggacgggttggggccggggggcacagggtctcccctgaaggaaacccaattagagtgcagcacttagcaccttcaatataactttaatgaagggggggaggggagctgcagggaagagaagtttgctctaggttggggaaggaaagctggagctgctcccgagaactggggggcctggatgaggctttttcctgcttcgagggctttccagcttccggcccgggaactactatttggagtagggatcgcctgcagggaaggcggggcggattctcggctggcggcggcctcgcagggttcccggaagcgctagccagccggagtaaaacccgaaagatggagcctcaggttcgcgctctgcgttgcgggtgctggaaccgagattcaaaaagagcttccggaggtagtttctacgcattgcgccactactcccttattcggcttctggaggcctaataaaatccacttgctttggagttagaaattatttcgggcctggagcccgcgtagacgcgaccctgtgatcccatttcgtagcttgctgagagattcgctgcgggagtttggctctgagggaggggaacggtctggagggcagctcagggtacaattgcgccttgttagtgaaaaggcgccctgcttattttccggagtatatgtgtgtgcctctgcgtttattcgtctgtgagctcattgtctggattcacctattgtgacattgtgttcacacgtttgtccgaatggtaagcaaaacatttcctcctgtagcttaacatagcccttatgtaaaaataaatatctgcaggcgaatataggtttgtagattttgttgtgatttaaacacaaataagtgagagatttcaatgtggtcgtccagggataggtgggagactaaaattgggaagggattcccaatgaaagcgtttaatacaaaacgaaattaaatattttttgcacaggttccatacaagtaaatccgaaaaaaagtgtgtgtgggggggtccacaccactaattattatggcgaggaagataaagaagacatggacagaaggcggatggctctgcggcctggctcccgcagaccgaccgccttcttcttccattcgagatggctcgtaccgaacctccttgccttcttcctgggtctctcg

SEQ ID NO: 1244542 - DNA, 4001 bp, Homo sapiens
ttctgccttccacgtcctccttcaaggaagccccatgtgggtagctttcaatatcgcaggttcttactcctctgcctctataagctcaaacccaccaacgatcgggcaagtaaaccccctccctcgccgacttcggaactggcgagagttcagcgcagatgggcctgtggggagggggcaagatagatgagggggagcggcatggtgcggggtgaccccttggagagaggaaaaaggccacaagaggggctgccaccgccactaacggagatggccctggtagagacctttgggggtctggaacctctggactccccatgctctaactcccacactctgctatcagaaacttaaacttgaggattttctctgtttttcactcgcaataaattcagagcaaacaaaagatgtggaatcttagagatttattccactggtgtgttaggaccattaaaaagacgtgggcgcccccttccgacagaggctcaccactccaggagaacctgcgggcaggctttcatcgtccgcggagctacaggcttccagcggcctggggcctcgtgggtactgagctgcgtgtgggggtccaggacccgatgtcgcctgccattcggccagggcatcggcagatgtattggtccagcccccgagagacccaggaagaaggcaaggaggttcggtacgagccatctcgaatggaagaagaaggcggtcggtctgcgggagccaggccgcagagccatccgccttctgtccatgtcttctttatcttcctcgccataataattagtggtgtggacccccccacacacactttttttcggatttacttgtatggaacctgtgcaaaaaatatttaatttcgttttgtattaaacgctttcattgggaatcccttcccaattttagtctcccacctatccctggacgaccacattgaaatctctcacttatttgtgtttaaatcacaacaaaatctacaaacctatattcgcctgcagatatttatttttacataagggctatgttaagctacaggaggaaatgttttgcttaccattcggacaaacgtgtgaacacaatgtcacaataggtgaatccagacaatgagctcacagacgaataaacgcagaggcacacacatatactccggaaaataagcagggcgccttttcactaacaaggcgcaattgtaccctgagctgccctccagaccgttcccctccctcagagccaaactcccgcagcgaatctctcagcaagctacgaaatgggatcacagggtcgcgtctacgcgggctccaggcccgaaataatttctaactccaaagcaagtggattttattaggcctccagaagccgaataagggagtagtggcgcaatgcgtagaaactacctccggaagctctttttgaatctcggttccagcacccgcaacgcagagcgcgaacctgaggctccatctttcgggttttactccggctggctagcgcttccgggaaccctgcgaggccgccgccagccgagaatccgccccgccttccctgcaggcgatccctactccaaatagtagttcccgggccggaagctggaaagccctcgaagcaggaaaaagcctcatccaggccccccagttctcgggagcagctccagctttccttccccaacctagagcaaacttctcttccctgcagctcccctcccccccttcattaaagttatattgaaggtgctaagtgctgcactctaattgggtttccttcaggggagaccctgtgccccccggccccaacccgtcctgtctaatagaaatccccgagctgcaaccgcgaattaaatagatgaactcgttaccgtaaacttgcaataaagcccggaggcgactgctgcggagggggcaaaagaaggtttcgttgtttttgaaatttataccattctcaccctcccgaacagtcgctctccagggaagaggggagaaagctcgggagcggccccgggcctctagcccaaaagcaggacaccccgcccctccccccaggcactggcctgggcctgagacagatttaaaacatccaatgaggaaccgatgccagcctttcttcctctctccctaccagttagttctgtgtagaggggatgagggggaggggacgaagtggtcgggggagagtgagggaaagaattccaccattaccttctctcctcccctaaactgcccccgaactgggaggtgcacagggggcagcaaaagagtttaatcgcccctagaataatgctggcgcccagcctggggggagggtcagggactttgccattgaacttgaagttccaggctggtggtctccaccgcccccgcccccattttcctaaaagttttatgggaagagggaggaaggtgaggggaagagaggacttctctggccttgggaaagagggaggaagccaatcaggggaggaagggccacagcaaccaggaggtccagggagattcggaggtttgcggggaggcgaggaggctgctgggaggagacactccagctttcgcccctacttgcagctatgaggtggggagccaccaaccgcaggccttcttactgagccccgccccagactctacagggagaggggcacccagtgctgtgctcccgtccttcctctcctagcctaaggcgtgcaaacagagcgccactgggaggctgaaacctttaggccgatgcttgcttgcaaggtcaggcaagctggattctggtccccacctttgcagagagaacagcgatgttgtgcgcccatttctcagatcaaggaccggcccatcttactacctccaagagtgcttttctctctaataaggtaaactgatcggtgggccaagggcgttatcgacggatcgctcagtatggtagctgcatcaggaggccctgggagagggtctcccaggaatttgggagccttcagaagttttgggaaacaagggaagggtgagcagcaggctttcaccgataccacctggcgggagcacctactcgcggttcctggagagaccggcagccgccctgggcagaaagggacaaagaaaatgtttcgcagcacgcgggacctgcaggacctaggcgggggagaggcttgggagtgggaactagcacccgctgtaaggtctgccataagacttaatgtttgtctccaatgggatggagtcctggcataagcaaaattaatattgataacgttattattatttaaaatttgtaaatattgtaaaatattttagaaaacatctactttgaaacatctactgggcgagaccaggagtgatggctcagcctgtaattctggaatttcgggaggccgaggcaggaagattccttgagcacaggagttccagaccagcctgggcaatgtagcaagacgctgtctctatttatacaataaaatttttttaaaaaaggaaactgggtgaaagttaactgtgattataacaatttttcttttttaaactaactcatccttaaggcaaaagctctgggccttaaaaaaataaaaacgggccaggcatagtggctcatggctgtaatcccagcactttgggaggctgaagtgggcagataacttgaggccaagagtttgagatcagcctggccaacatagtgaaaactgtctctactaaaaatacaacaattagctgggcatggtggctcacacctgtaattccagctactcaagaggctgaagcacaagaattgctcgaacctgggaggtggaggttgcagtgagctgagattatgccattgcactccagcctatgtgacagagtgagactctgtgacaaataataataataataataattgcacctttttctctgggcccctggcttccttattccctttcctgcaccctctcagaagctctgccttgccaagtgtgggatcaatgccacagcaggcatgtgtgcgcacaggggctctgggtccagtacagaagcaggctggggaccacatgc

SEQ ID NO: 1244543 - DNA, 4001 bp, Homo sapiens
cgtgctggtccttcctgcaccttaggctgggggtggggggcctgccggcgcattctccacgattgagcgcacaggcctgaagtctggacaacccgcagaaccgaagctccgagcagcgggtcggtggcgagtagtggggtcggtggcgagcagttggtggtgggccgcggccgccactacctcgaggacatttccctcccggagccagctctcctagaaaccccgcggcggccgccgcagccaagtgtttatggcccgcggtcgggtgggatcctagccctgtctcctctcctgggaaggagtgagggtgggacgtgacttagacacctacaaatctatttaccaaagaggagcccgggactgagggaaaaggccaaagagtgtgagtgcatgcggactgggggttcaggggaagaggacgaggaggaggaagatgaggtcgatttcctgatttaaaaaatcgtccaagccccgtggtccagcttaaggtcctcggttacatgcgccgctcagagcaggtcactttctgccttccacgtcctccttcaaggaagccccatgtgggtagctttcaatatcgcaggttcttactcctctgcctctataagctcaaacccaccaacgatcgggcaagtaaaccccctccctcgccgacttcggaactggcgagagttcagcgcagatgggcctgtggggagggggcaagatagatgagggggagcggcatggtgcggggtgaccccttggagagaggaaaaaggccacaagaggggctgccaccgccactaacggagatggccctggtagagacctttgggggtctggaacctctggactccccatgctctaactcccacactctgctatcagaaacttaaacttgaggattttctctgtttttcactcgcaataaattcagagcaaacaaaagatgtggaatcttagagatttattccactggtgtgttaggaccattaaaaagacgtgggcgcccccttccgacagaggctcaccactccaggagaacctgcgggcaggctttcatcgtccgcggagctacaggcttccagcggcctggggcctcgtgggtactgagctgcgtgtgggggtccaggacccgatgtcgcctgccattcggccagggcatcggcagatgtattggtccagcccccgagagacccaggaagaaggcaaggaggttcggtacgagccatctcgaatggaagaagaaggcggtcggtctgcgggagccaggccgcagagccatccgccttctgtccatgtcttctttatcttcctcgccataataattagtggtgtggacccccccacacacactttttttcggatttacttgtatggaacctgtgcaaaaaatatttaatttcgttttgtattaaacgctttcattgggaatcccttcccaattttagtctcccacctatccctggacgaccacattgaaatctctcacttatttgtgtttaaatcacaacaaaatctacaaacctatattcgcctgcagatatttatttttacataagggctatgttaagctacaggaggaaatgttttgcttaccattcggacaaacgtgtgaacacaatgtcacaataggtgaatccagacaatgagctcacagacgaataaacgcagaggcacacacatatactccggaaaataagcagggcgccttttcactaacaaggcgcaattgtaccctgagctgccctccagaccgttcccctccctcagagccaaactcccgcagcgaatctctcagcaagctacgaaatgggatcacagggtcgcgtctacgcgggctccaggcccgaaataatttctaactccaaagcaagtggattttattaggcctccagaagccgaataagggagtagtggcgcaatgcgtagaaactacctccggaagctctttttgaatctcggttccagcacccgcaacgcagagcgcgaacctgaggctccatctttcgggttttactccggctggctagcgcttccgggaaccctgcgaggccgccgccagccgagaatccgccccgccttccctgcaggcgatccctactccaaatagtagttcccgggccggaagctggaaagccctcgaagcaggaaaaagcctcatccaggccccccagttctcgggagcagctccagctttccttccccaacctagagcaaacttctcttccctgcagctcccctcccccccttcattaaagttatattgaaggtgctaagtgctgcactctaattgggtttccttcaggggagaccctgtgccccccggccccaacccgtcctgtctaatagaaatccccgagctgcaaccgcgaattaaatagatgaactcgttaccgtaaacttgcaataaagcccggaggcgactgctgcggagggggcaaaagaaggtttcgttgtttttgaaatttataccattctcaccctcccgaacagtcgctctccagggaagaggggagaaagctcgggagcggccccgggcctctagcccaaaagcaggacaccccgcccctccccccaggcactggcctgggcctgagacagatttaaaacatccaatgaggaaccgatgccagcctttcttcctctctccctaccagttagttctgtgtagaggggatgagggggaggggacgaagtggtcgggggagagtgagggaaagaattccaccattaccttctctcctcccctaaactgcccccgaactgggaggtgcacagggggcagcaaaagagtttaatcgcccctagaataatgctggcgcccagcctggggggagggtcagggactttgccattgaacttgaagttccaggctggtggtctccaccgcccccgcccccattttcctaaaagttttatgggaagagggaggaaggtgaggggaagagaggacttctctggccttgggaaagagggaggaagccaatcaggggaggaagggccacagcaaccaggaggtccagggagattcggaggtttgcggggaggcgaggaggctgctgggaggagacactccagctttcgcccctacttgcagctatgaggtggggagccaccaaccgcaggccttcttactgagccccgccccagactctacagggagaggggcacccagtgctgtgctcccgtccttcctctcctagcctaaggcgtgcaaacagagcgccactgggaggctgaaacctttaggccgatgcttgcttgcaaggtcaggcaagctggattctggtccccacctttgcagagagaacagcgatgttgtgcgcccatttctcagatcaaggaccggcccatcttactacctccaagagtgcttttctctctaataaggtaaactgatcggtgggccaagggcgttatcgacggatcgctcagtatggtagctgcatcaggaggccctgggagagggtctcccaggaatttgggagccttcagaagttttgggaaacaagggaagggtgagcagcaggctttcaccgataccacctggcgggagcacctactcgcggttcctggagagaccggcagccgccctgggcagaaagggacaaagaaaatgtttcgcagcacgcgggacctgcaggacctaggcgggggagaggcttgggagtgggaactagcacccgctgtaaggtctgccataagacttaatgtttgtctccaatgggatggagtcctggcataagcaaaattaatattgataacgttattattatttaaaatttgtaaatattgtaaaatattttagaaaacatctactttgaaacatctactgggcgagaccaggagtgatggctcagcctgtaattctggaatttcgggaggccgaggcaggaagattccttgagcacaggagttccagaccagcctgggcaatgtagcaagacgctgtctctatttatacaataaaatttttttaaaaaaggaaactgggtgaaagttaactgtgattataa

SEQ ID NO: 1244544 - DNA, 4001 bp, Homo sapiens
gccaatcctctggggttactgagcctcccgagtgacttaataggtaggaaacctctggagaaaactaaagcacaggtcccgagcatgaaacaagacagctgctagcatttatggagcaatcactctgcaccctcaccaaaacctcacaaccactgttattaatcctagtttacatataaataaactgattgcataaatttcccccatagtctttccattagtaagagggaagccagaatttaaattctccctgcccaactctagacccgggctcaatagcgtggaccacccagcatttgagggcctcctatcgggggaggcccaggggtggtcattgtagctgatttaactagtgatatcaattaggcactattatgatgatgccagctggcctatcgagttgaggtgtcgcagaaatgcctccgcttcctgtacaggcccagggcttcccattgggccttctgatcatcagaatctcaggactcagaatcccaggactcagacgacaggagacagaaagacggaagttctctcggttgccagtttccgcatatctaagggacacattgctggcaggtccccactcagaaagagacatggatggtcacagtacccgccacctgagtcttccctgtgtggagacaccctcctgccagtgcgccctgacccaaagatgtcatcggatcttttttactctttgtttcactgggagcaaaaaagtcactcttcagacaggtctcccacgctaggtgagtccataggcacagaaggaacccctcatgcatgggaacttcataaagatttgctgattttttccagtgtttggttgggataggcgcccctatcatcgaacgacactggtcacccagggaaggaaaagtctggaagttcccccaacttcaccccctaaagaccacatggctccagcctagggaagagttaactttctggccactggagacagcgtcctgcccgcagggtctgcccagccaatggcactctatgctgatgatgtcatgctcctcccgcgccttctattggggactggacagcgaatcctgctggaggctcaggcagcctagctgaggcagggcgggggcagaggaggaggagggggaagggcaaggaaaggcgagcaaagccacacagagctactcctgcctcatccctccttccactcccctgtgccttctgacagaaggtgccccgggggaccgccccgtgctggagatgagaggcacagcggctttggtccagaggagcgagctgagggttcccattcccaaccgcagaaaacagacatccagcctgcccagcaggcggacagggagcagggtgcttagggcaagggccaggatacggtgcacgcacaggcgcgcacaggcacacacgtgcacccccaggcatgcacagccacagcttccttggcagcaccctccctcccccagcccagactcctgccttacctgcctgaggactgagggtccgcatccaagctgctgcccctagctgccccatccacgtcgctgggctctctgtgggaggcaagagtagggaggaagagctatggctgtgcccagcccctcactgtccctccacaggtccaggccgcattgggctatgggagtagaggctgcaactagagcctttgaagctctaagtccccctgctctgagactgtgctctctcaagggttcctcaaaatgccctcccagccccgctgaaggttcacgcagcccctgcccaccttcagcttggtggcagcccagccccatgccccccccccccgaccaaccgccagccatagcccggtcagtttctcacggttggactcggttggcaaatcggcggcgccagagcatggccagggtgctgagcaggaaaagggtggtgcacatggcgcagctgccccatcccctcccaggccaagtctgcagaaggccacaggcgaggggccaaaatggccccagccagctctcaggagccactgccgtctgtcctgcggttcctgctggggatggattaggaggctcaagctgattagtgggtcagcggccccgaccttgtgaggactgattaagctcactgggcccaggttctcccctccagcggtagggtcaaggcatgcactgtggcattgagcacgtattcggagtctcgatctgatgagactgggccttgcttgcaaggagctgccactctaaacaaatgtgctgtcaagtacaatgactgcagtagagtgacccaggagttattcaaggcgcctacagggcactttcagagttgcaggcatcagggcaacgtttaaagaggagcaagggcctctgaatttgcagtgcacaaggcaggatgagccctcagacagaagacgctgccgaagctactgacatgaaagcatggagcatctgccagtaactgcaaggtgaatggaggtgaagcaatgatgtcaccgtggaagcatcaggagaggaggaagaaaggggaggaatattggataatgaagccagagagacgggagactcaacagtgaagggctggcagttttaccctctggacaatcctctccaaacttttctgattacacgccctcttcagtaaaaggcagaattcaagtgtgcactcacaaaatagacaggtgcagccacttacaaattatatgctagactactgtacagattcattcctacaccatacgactatattacatttgcaaaggatgagatgaaaagaaatagttacacgatttctcctattttctttccacatcccaaggggacctgttgggcagccacttggtcacaccaactttgagaagctgttcagtgtgtgtgtggagcatggagccagccatggccacgctgagacatgggtctgggagtggtgtgagaacctgaacccacccgctcccctccagcccctccaagacccccaggaggcattagattttcattccctcaacaagggggagacagtgtcagaggcactgcctcagggtcccccaggcacctgaaccctgagctcccaggaggggcccaggctgcagctgaggctggccagggtgagttctcctcgcctcccccggaccttaaagtcggattttaagaataaatacatgaaccatagtgaaagcgcagagccaacccttagcaatgcttgggcaatgggacatcaagtcttgagcgaggacaggggtcgccgggagcctgagtgacatctcttcccaacactgccaggccctgtctggcctcaggctgtccccaggactgagcagccgctgcagggcaggcaccatgggattctccccccacctctggcccaatctcacactgccctggatagggcccaccaggaggaaggatttgcctcccccaggcccggaatcgggcccttggtggcggctgagatgtccccagcagcctgcgccttcctcaagactttttgtctgccaggtcctgtctgccctatccggtgcctctctggacttcctccgccaccagctgggctagaattcagggcagcggctggttcttgcctgtccgtgtcattcataagccacgggggacttctggccgccgccgccgcgttcgtgcaccgagggcatggaggtgctgggcggaaggagagggggcgcaggcctctggcgcccgaggtcggaggtgcgctcaagttccgacagccggggcggtgggcgggcagggggacgacccccgtgctaaccccccagagcctgggcgtccagagccgtgggagtggcgccgcggcccccagcggctggctcgggggcgcggggagaggcccgggcgaggggagcccagctaggtccacggcggccgccggaggggctcctgttcgcccccacgggcgggctggcggtcggcctcgccgcgaaagctcgggagtgttggactttgagtcagttccccgccgcgggaagggtccgcacgcgcacactcgcgacgccgcaagcactgggacccggaacccagcgctcccggcccgcg

SEQ ID NO: 1244545 - DNA, 4001 bp, Homo sapiens
caagagtgtggtcccctccactcagcaactgaattcaatactaatcagacttttccaattataatgcattgtaaactattgagatgaaactgtaaatttaaaagaacttatagaaagaattaacagagtaaagagctattctaaagtgctacactgttactcattttgttttgacaactttcaccataaaggtcaacaacaagtagactaattaacagaccattagaaagttcgtggctccaagacaagcacataaattagaagccatggaaaaataatcatgctgctactttaaacaggcaaaacaaaaacaaaaacgcgcatttactttaggatagatttatacaagccacttctccaggtcaggcaatcatatgaactgaagatccacttcagtagaattgtctgcatttcaaataatacttaaaggccaccaagaacaatcataaatcagatctttcatgcttcaaagcattgtcatattttaagaacattcaaatgatcaatcattctaagatcaggtctttggctggtagagatgagagaactgggcctaaggagtgaaactgtgtttttgtttgaaacaactaatgtattacgaaaaccaaaaagatagccaccggtaataggacagtatacgaacagaaatgtaccaaaattaatgcagtcaccatgtaaatccctgaataaccagacttcacagtcttaatatttttaatcgagttacccggattctctatgtgtacttatttgtaaagcccaacaacctagccttccctccccacacacaattatttaactgctttaaaactttcgctgcattgtctctatgtaaaacaaaacactcagattcattcttttgaaaattcagttgtgacaaaattgtttcgaaaggattacattctgggaaataaataaaaacactttgagaaactgttcctgattcagaccgcacccccttagaccagccaagttacggctcccctagggtcatcttgagtaagtgtttgctttcctcgctctgctaaaaagacggatctcttgggaatctctcaaggagtaggacggtcgtcaccacaggctctgagctgaagaggttaataggtaccgtgtattttctagaagaagggcaggaaaatgcccttcacttcacgtaggccacggtcatgaccacaaaatgaagggaagccgagacttcaagctacgccagtcggaaggccacagtggtggcgaggaggcctcaggggggcaaaattgggaaagggagagaggtgaaaggggacaagaggaaattcaggagcccgactaagaccgtcgtgttgggggaaagatcactccgctatgaagaggaaaggctactgctagcaatgacgagtcgtcaaaagtggagaggaaaactaccggcttacaagaagagccaggaccggcggacgagacgatggcggaccccagtaaaatagagccgttgtccttcaggaaatgggggagggtgagcgaagaggccgcggcgcgcgggggcgaaggcggccggggagggccgcggagggcccagggccccaggagccgtggggtgggggcagcgagcgcgagcggggcggctggggagccccgcaccaaagccaacgcccagacggccttgaggatgcagactcggagccgggggcgtgaggcctgcggggaggcgcccgccgggccggggaggggcagggggtgcggccgtccccctgcaggtcgctccccgtgacgccatcttggatcggtccagctcccgcaaaccggctgcgaagcgacgaagctcacctcgcctgagcccccggccgaccccactcacctggggacgggcggcggcgggcgcgaggctgcgggtgcgaggcggcggcgtaccgagctccctcagcgctttgctcccagccccgctccactctgcgatagcggctaggcgacagctccaccggaaacggcctggccgcagccaatcagcgttcggctactgacgtcaatgcgcctcgctctggccagaaccgtcgccttagcaaccttaagggcgcaacagccccagttcctcccccctggtcgctcttggaaggaccctcactctgcggtcgttcgtcttccgccattctttccatcttactcgtcccttatccacagcagtttcctcacgcccgccacttctcctttccgcagtctccctagcccggttctctcctccttcctgctcacctgcccctccttacctgtccctctctgggtgtcttgggtcgcctttgttcctccgcctgctcttcgctctctctccgcgcagctatcgtgcgcttccctctcgtccctccgctcctctgtccaccccactctccctccggcctcccttgacgcctctgccttttctccctcctttccaccccctccctggccgacccacgtggggcgtctcagatgacaggtgggcgactcctccccgcagcccctgcaagggagggccccgggccggggcggggagagtcctgtcgctgccagcccccggaggaggtggcggcccccgcggatctgcagcagctgcgctgcggggccgagcgcgggcggatggccgggatgcgctctccgggccgcgcatcctgtgcccggccagcgccgcccgggccccgggctcaggtcagtcatccggtccaggaaacctgagccctgccgagtctccgctggggccgctctcccccgccgggggtgctgtcgtctgtgcaggcaacaccgtccctgtggaaaccaggcacgggaaaggactttgtcagggtccaagaggaggcctgagtccttctagaacctgaagtgcccccccatcactcctgacctcacagagggagaagtgcagagcgtgcagattgtcaaaaatgccctgtgacccaacaagaaatcgcagctgtccagacaagctgcactaatggggaaaattcggaggaaaagcgactttactctttcagccattttttttttccatcagagtatctgtctaaggaggaagaaaagggagacggtacaattttagacacatcaagtctgtaactcaataaagaaggcccatcaaggaaacatgtccaagtgtctggctaggggctgctttagtagcattgtatatatttctagggccgtgtgcttaaaattcataatggattcaacacaatacaaaaaagcaaaatacacacatatgcaagtgtccaggagctgttgtagtaacattgtatatacttcaagggctgtatgtttaaagtaaatcatgaactcaacacaatacaaaaaagtagctcaatagtgtttatattgattccagattgaaatgataatatttttgatatattaggtaaaatattaaagttaatttcacttttgttttttaattcttagtgtagctattaaaaagtttaaagttacacagatggctcccattatattcctattgggcagcgctgccctcggaggccgactgctcccccaaatccaccaggctctaagggtactgtccatcagatgatttatttagttatgttattcactgccttctgatagggatacataggcgatatcaaaagggcaatcaggcttacaggggggaatggaaaagggaagtttctcctttcactgactccccaaatgttgaccattggcccttctccagggttgatcagaaatggggataaaagagcctcagtcagataggatttcactcttgacagtacaaagaagggttgataaactgaaccctacgctggcaagcagcagagggaatttgatagcattgagcaggcccggtcatgttatgggaagaaaatattgcagtcaggtaaatctgagtttggtttcaggctctgccatgtccggtaattgacttaatctccatgggtgtccgtttcctcggtcataaaaggatgaacaggactttgttgaagttaactactaagggtataacagcaaacacacgtatagcacttactgtgttccaagcactgatc

SEQ ID NO: 1244546 - DNA, 4001 bp, Homo sapiens
ttcctttatgaattacccagcctcggtatgtctttattagcagcatgacaacggactaatagactaacatacaaattaacacctaatacacagaactatgacccactaacaagttgaaaatctaattacttaaaggtccaggtatctatattcaaccctggaaggaatgtatacatgtgaacaaagacccttgaattacagcaaaaaccatgttgaactgtgactttaattattaaaagttaaagaagctgaaacacattaaatctaaaaattccatctgcaaagaaaccattttaataattatttattgctttccacctttgttagtctttaaacagtactgtggcaactacaagctttgaaactagcatcacacattcaacactccctataaaaagatacacacttaatgtctcaccaacttaatcctctcatttgatggtttctattgatgtccaaagaagagggatcaccttacagtgacccatttcaaaaccggatctccaggaatgcacttgacttcaaaacaagctacatctatgacctggctctacaatacttccatgatttggaaattgcataaataagagaaagccagaatatctactataattccaagacagcaaagcaacattcacagtgactagttgtttttgttttttttttaattattctgatcatggtactaaatacaaattttaacaatcagtttttaaagaaaatagaaaatacctgatcaatgagctacccaaatactttttaaagcttagtacagattcttttactaataaactatactgattataagaaactataaaaaccaatggaaaataaagcaaattatttctattatacaattagataatcatataccaaaagaaatgattcatttcttttggtatatgaatcatttcttttggtatatgattcatttcaattaattcataatcattatgaaccacctcataacttccacatgcacaagaaaatcagtaagtttctctcactgatttacagaagcgaatcacataaactattcaaaatatttggtaacccagactttttcattcatcgtttcttgagggagatgaattgaagcattcatttgcttcaattatccctgatgtaaaattatcactttgcttagaaaaacatatgccatatacgtaggtcacaatgacatacaagcaaggaggaagagcaaaaaagaataaaaattggattaatttttttcaaggcgcaacaagtcctgaccaataaaatggagtaaaatttttgaggaacatcaatatcaatatctctacagtaatttatcagatatactctatactaaaatagaccgaatctaattgaaaatttctgatatatcagtcacaagctagattcatgtttcattacactagttttaaaagtgggataagatttactacgcttacttgctttgttcaaaacgggaggagcattaactgcctttaagaactatagaatttcttattcatagaactgctatactagttctgatcagttttatctgttatagttctacgcactaatttaaaaagttacaaagaattgtttggaaaccctttattagccaagtacagttagcatacaggttcatttttctgataaattctactaattaagaatttttaaattactacaaatgccttaactgtatttcttatttgaaattgttttagactttttatttagtcagattccttttcttccaaaaaatacaaattagtaacattccagttattaaatgtaacaactgtcacaatcacctcatcatctccccacatttatttttaccttctccaacctctcaaagtattccctgaggaatgccatgggtctctcaggtcgagcagtgcacaactgcacaatagaatctttgagcagcgcttgaatgttatgcttctggacgtagagctcacattctcgaaggctgcgtgcctcctcactggcggcggtactgccagactccatggttctctgcgagaaaaaaacacacacatgcttgtataaactataaagcaaaatgtcaatctggcatttaacttgctaaattcattagacaactgattcacagggatttttttctaagtagattttgtttttaaacagggaagtggggactagggaataaaatatgtacagaattagcattattccaagtaaatgtttcatttagttcaggatctgtgctctgtaggcaacagtgagagtcgataacctcagctcctgggaggaagtatgagccactaacctctgcagagacgggtgctgaagtcaggcccttaagggaatttcattcagttctccctcaaaagaaatcatgatgacgtgggaagtaggtaaacggtaaacaggatacagaattaccagggcacaaaagtcaactgtaagcgaaagcaagtcagcacaatgaagaatatctgacattccctatacgtaacttctatcccatgggagtatcctaacgtcacagagcaaaccactggagtgaggatctgattagccaactactagcataatcaaaatttttaaaaacacacaagaaaattagatgagttttaaaagcaacctttattccagactcgtttgccagattccacccctaaatgataatacactagtggtaaaagaaggaaaatccttagttgggggaggggagaattcttaccacataaactgtaaaacatttggacagaaaattgtcaaaatattttcttcatcttgacaggagaatgttaaaacacttaagtttcaaacttgcatgaagattcaatagataaattgcatttaatggattacatttaatggataaattgcatttaatggattttagaggattcgaattatggtacctttatgtaaagtaaagcaaacagagataatgatgagcagctaaccttaccctagaattaaaagtttactaatttaacaacagggtcatatactgttttccttccaactcctaattactaagcacttaagagtagaagacaagagtgtggtcccctccactcagcaactgaattcaatactaatcagacttttccaattataatgcattgtaaactattgagatgaaactgtaaatttaaaagaacttatagaaagaattaacagagtaaagagctattctaaagtgctacactgttactcattttgttttgacaactttcaccataaaggtcaacaacaagtagactaattaacagaccattagaaagttcgtggctccaagacaagcacataaattagaagccatggaaaaataatcatgctgctactttaaacaggcaaaacaaaaacaaaaacgcgcatttactttaggatagatttatacaagccacttctccaggtcaggcaatcatatgaactgaagatccacttcagtagaattgtctgcatttcaaataatacttaaaggccaccaagaacaatcataaatcagatctttcatgcttcaaagcattgtcatattttaagaacattcaaatgatcaatcattctaagatcaggtctttggctggtagagatgagagaactgggcctaaggagtgaaactgtgtttttgtttgaaacaactaatgtattacgaaaaccaaaaagatagccaccggtaataggacagtatacgaacagaaatgtaccaaaattaatgcagtcaccatgtaaatccctgaataaccagacttcacagtcttaatatttttaatcgagttacccggattctctatgtgtacttatttgtaaagcccaacaacctagccttccctccccacacacaattatttaactgctttaaaactttcgctgcattgtctctatgtaaaacaaaacactcagattcattcttttgaaaattcagttgtgacaaaattgtttcgaaaggattacattctgggaaataaataaaaacactttgagaaactgttcctgattcagaccgcacccccttagaccagccaagttacggctcccct

SEQ ID NO: 1244547 - DNA, 4001 bp, Homo sapiens
tcaatactccactgacagcactagacaggtcatcaagaaagaaagtcaacaaagaaacaatggatttaaactataccttgtaacaaatggacttaacagatatatacagaacattccaaccaacaactgcagaatacacattctattcagtagtgcatggaactttctccaagacagaccatacaataggccacaaaatgagcctcaataaatttaagaaaattgaaattatatcaagcactctctcagaccacagtggaataaaactggaaatccattccaaaggaaccttcagaaccatgcaaatacatggaaattatataacctgctcctaaatgatcattgagtcaaaaatgaaatcaagatggaaatttaaaagttcttcaaactgaataatagtgacacaacctatcaaaacctctgggatacagcaaaggaggggctaaggggaaagttcatagccttaaatgcctacatcaaaaagactgaaagagcacaaactgacattctaaggtcatacctcaaggaactagagaaacaagaacaaacaaaacccagcagacaaaaggaaataaccaagatcagagcagaactaaatgaaattgaaacaaaaaaataaaaaagataaatgaaacacaaagctggttctttgaaaatatgaataaaattgatatgctgttagcaagattaaccaagaaaagaagagagaaaatccaaataaactcaataagaaacaaaacaggagatattacaacagacatcacaaaaatacaaaagatcattcaaggctactatgaacacctttgcatttaaactaaaaaacctagaagagatggataaattcctggaaaaatacaaccctcctagcttaaatcaggaagaattagataccctgaacaaaccaataacaagcagcgagattaaaatggtaatttttaaattaccaacaacaacaacaacaaaagtctaggaccagatggatccacagcagaattccaccagacattcaaagaagaattggtaccaacccttttgacactattccacatgacaaagagggaaccctccctaattcattctatgaagccagaatcaccctaatactacaaccaggaaaggacataaccaaaaaagaaaactacagactgatatccctcatgaacatagatgctaaaatccttaacaaaatactagctaactgaatccaacaacatatcaaaaagataattcaccataatcaagggggtttcataccagggatgcaaggatagtttaacatataccaataaatgtgatatgtcaataaatgtgatacaccacataaacagaattaaaaacaaaaatcacatggtcatctcaatagatgcagtaaaagcatttgacaaaatccagcatcgctttatgattaaaactcagcaaaatcggcatacaagggacatacctcaatgtaataaaagccatctataagaaacccacagccagggggaggagccaagatagccgaataggaacagctccggtctacagctcccagcgttgagcgacgcagaagacgggtgatttctgcatttccatctgaggtaccgggttcatctcactagggagtgccagacagtgggcgcaggtcagtgggtgcgcgcaccgtgcgcgagccgaagcaggacgaggcattgcctcactcgggaagctcaaggggtcagggagttccctttcctagtcaaagaaaggggtgacagacggcacctggaaaatcgggtcactcccacccgaatactgcgcttttccgacaggcttaaaaaacggcgcaccaggagattacatcccttacctggctcggagggtcctacgcccacggagtctcgctgattgctagcacagcagtctgagatcaaactgcaaggcggcagcgaggctgggggaggggcgcctgccattgcccaggcttgattaggtaaccaaagcagccgggaagctcgaactgggtggagcccaccacagctcaaggaggcctgcctgcctctgtaggctccacctctgggggcagggcacagacaaacaaaaagacagcagtaacctctgcagacttaaatgtccctgtctgacagctttgaagagagcagtggttctcccagcacgcagctggagatctgagaacgggcagactgcctcctcaagtgggtccctgacccccgagcagcctaactgggaggcaccccccagcaggggcagactgacacctcacagggcccagtactccaacagacctgcagctgagggtcctgtctgttacaaggaaaactaacaaacagaaaggacatccacaccaaaaacccatctgtacatcaccatcatcaaagaccaaacgtagataaaaccacaaagatggggaaaaaacagagcagaaaaactggaaactctaaaaagcagagcgcctctcctcctccaaaggaacgcagttcctcaccagcaacggaacaaagctggacagagaataactttgacgagctgagagaagaaggcttcagacgatcaaattactctgagctatgggaggacattcaaaccaaaggcaaagaagttgaaaactttgaaaaaaatttagaagaatgtataactagaataaccaatacagagaagtgcttaaaggagctgatggagctgaaaaccaaggcttgagaactacgtgaagaatgcagaagcctcaggagccggtgcgatcaactggaagaaagggtatcagcgatggaagatgaaatgaatgaaatgaagcgagaagggaagtttagagaaaaaagaataaaaagaaatgagcaaagcctccaagaaatatgggactatgtgaaaaaaccaaatctacgtctgattggtgtacctgaaagtgacggggagaatggaaccaagttggaaaacactctgcaggatattatccaggagaacttccccaatctagcaaggcaggccaacattcagattcaggaaatacagagaacgccacaaagatattcctcaagaagagcaactccaagacacataattgtcagattcaccaaagttgaaatgaaggaaaaaatgttaagggcagccagagagaaaggtcaggttaccctcaaagggaagcccatcagactaacagtggatctttcggcagaaactctacaagccagaagagagtgggggccaatattcaacattctcaaagaaaagaattttcaacccagaatttcatatccagccaaactaagcttcataagtgaaggagaaataaaatactttacagacaagcaaatgctgagagattttgtcaccaccaggcctgccctaaaagagctcctgaaggaagcactaaacatggaaaggaacaaccggtaccagccactgcaaaatcatgccaaaatgtaaaggccatcgagactaggaagaaactgcatcaactaacgagcaaaataaccagctaacatcataatgacaggatcaaattcacatgtaacaatattaactttaaatgtaaatggactaaatgctccaattaaaagacacagactggcaaattggataaagagtcaagacccatcagtgtgctgtattcaggaaacctatctcacctgcagagacacacataggctcaaaataaaaggatggaggaagatctaccaagcaaatggaaaacaaaaaaaggcaggggttgcaatcctagtctctgataaaacagactttaaaccaacaaagatcaaaagagacaaggccattacataatggtaaagggatcaattcaacaagaagagctaactatcctaaatatatatgcacccaatacaggagcacccagattcataaagcaagtcctgagtgacctacaaagagacttagactcccacacattaataatgggagactttaacaccccactgtcaacattagacagatcaacaagacagaaagtcaacaaggatacccaggaattgaactcagctctgcaccaagcggacctaacagacatctac

SEQ ID NO: 1244548 - DNA, 4001 bp, Homo sapiens
gaaaaccaaaaagatagccaccggtaataggacagtatacgaacagaaatgtaccaaaattaatgcagtcaccatgtaaatccctgaataaccagacttcacagtcttaatatttttaatcgagttacccggattctctatgtgtacttatttgtaaagcccaacaacctagccttccctccccacacacaattatttaactgctttaaaactttcgctgcattgtctctatgtaaaacaaaacactcagattcattcttttgaaaattcagttgtgacaaaattgtttcgaaaggattacattctgggaaataaataaaaacactttgagaaactgttcctgattcagaccgcacccccttagaccagccaagttacggctcccctagggtcatcttgagtaagtgtttgctttcctcgctctgctaaaaagacggatctcttgggaatctctcaaggagtaggacggtcgtcaccacaggctctgagctgaagaggttaataggtaccgtgtattttctagaagaagggcaggaaaatgcccttcacttcacgtaggccacggtcatgaccacaaaatgaagggaagccgagacttcaagctacgccagtcggaaggccacagtggtggcgaggaggcctcaggggggcaaaattgggaaagggagagaggtgaaaggggacaagaggaaattcaggagcccgactaagaccgtcgtgttgggggaaagatcactccgctatgaagaggaaaggctactgctagcaatgacgagtcgtcaaaagtggagaggaaaactaccggcttacaagaagagccaggaccggcggacgagacgatggcggaccccagtaaaatagagccgttgtccttcaggaaatgggggagggtgagcgaagaggccgcggcgcgcgggggcgaaggcggccggggagggccgcggagggcccagggccccaggagccgtggggtgggggcagcgagcgcgagcggggcggctggggagccccgcaccaaagccaacgcccagacggccttgaggatgcagactcggagccgggggcgtgaggcctgcggggaggcgcccgccgggccggggaggggcagggggtgcggccgtccccctgcaggtcgctccccgtgacgccatcttggatcggtccagctcccgcaaaccggctgcgaagcgacgaagctcacctcgcctgagcccccggccgaccccactcacctggggacgggcggcggcgggcgcgaggctgcgggtgcgaggcggcggcgtaccgagctccctcagcgctttgctcccagccccgctccactctgcgatagcggctaggcgacagctccaccggaaacggcctggccgcagccaatcagcgttcggctactgacgtcaatgcgcctcgctctggccagaaccgtcgccttagcaaccttaagggcgcaacagccccagttcctcccccctggtcgctcttggaaggaccctcactctgcggtcgttcgtcttccgccattctttccatcttactcgtcccttatccacagcagtttcctcacgcccgccacttctcctttccgcagtctccctagcccggttctctcctccttcctgctcacctgcccctccttacctgtccctctctgggtgtcttgggtcgcctttgttcctccgcctgctcttcgctctctctccgcgcagctatcgtgcgcttccctctcgtccctccgctcctctgtccaccccactctccctccggcctcccttgacgcctctgccttttctccctcctttccaccccctccctggccgacccacgtggggcgtctcagatgacaggtgggcgactcctccccgcagcccctgcaagggagggccccgggccggggcggggagagtcctgtcgctgccagcccccggaggaggtggcggcccccgcggatctgcagcagctgcgctgcggggccgagcgcgggcggatggccgggatgcgctctccgggccgcgcatcctgtgcccggccagcgccgcccgggccccgggctcaggtcagtcatccggtccaggaaacctgagccctgccgagtctccgctggggccgctctcccccgccgggggtgctgtcgtctgtgcaggcaacaccgtccctgtggaaaccaggcacgggaaaggactttgtcagggtccaagaggaggcctgagtccttctagaacctgaagtgcccccccatcactcctgacctcacagagggagaagtgcagagcgtgcagattgtcaaaaatgccctgtgacccaacaagaaatcgcagctgtccagacaagctgcactaatggggaaaattcggaggaaaagcgactttactctttcagccattttttttttccatcagagtatctgtctaaggaggaagaaaagggagacggtacaattttagacacatcaagtctgtaactcaataaagaaggcccatcaaggaaacatgtccaagtgtctggctaggggctgctttagtagcattgtatatatttctagggccgtgtgcttaaaattcataatggattcaacacaatacaaaaaagcaaaatacacacatatgcaagtgtccaggagctgttgtagtaacattgtatatacttcaagggctgtatgtttaaagtaaatcatgaactcaacacaatacaaaaaagtagctcaatagtgtttatattgattccagattgaaatgataatatttttgatatattaggtaaaatattaaagttaatttcacttttgttttttaattcttagtgtagctattaaaaagtttaaagttacacagatggctcccattatattcctattgggcagcgctgccctcggaggccgactgctcccccaaatccaccaggctctaagggtactgtccatcagatgatttatttagttatgttattcactgccttctgatagggatacataggcgatatcaaaagggcaatcaggcttacaggggggaatggaaaagggaagtttctcctttcactgactccccaaatgttgaccattggcccttctccagggttgatcagaaatggggataaaagagcctcagtcagataggatttcactcttgacagtacaaagaagggttgataaactgaaccctacgctggcaagcagcagagggaatttgatagcattgagcaggcccggtcatgttatgggaagaaaatattgcagtcaggtaaatctgagtttggtttcaggctctgccatgtccggtaattgacttaatctccatgggtgtccgtttcctcggtcataaaaggatgaacaggactttgttgaagttaactactaagggtataacagcaaacacacgtatagcacttactgtgttccaagcactgatctaagggctttacacataattaatttaatcctcatagtaactcttaacataggtaatattgttattgttacagaaaaaaacatgagacatggagaagttaagtgacttgcccatggccacacagctaacatggcttaaacccaggcagtgatcttaatcactctccattgcagaatagatagatctctctctctctctctctctctctctctctctctctgtctacatatatatatatggtgttcagtacagtgggggatatattaaatgaatgttaatttacttcccatttctccctcttcctgcagagctacccaaactacaaggttaagtcagagtgacactatgtcccaccattagtgttaccttccaagtgcagttaagacactaagaataaggaaacaagcaagctgctgacattgagctgagcactttgagtgacagctgcttccttgctgagtcctggctgtgtgtccccattcagctgcatgcaggcgccagtccagccacgggccatttcctgtgtcagtcacactcaaccttgttctaggtgccaaatcctcatatgctggggctttaggagacataaagggaaatggg

SEQ ID NO: 1244549 - DNA, 4001 bp, Homo sapiens
ctacctactcctttgagcacagtcgcttcatatgccgactagacagtggaaatcactcatagaggtggctgtgcttttcataaaagtgtacttgggagcagatgtctaaaaaggaaaggaaaaattaaacaccttattcgcaccacgatcatgggacctgccctttgggatgtttttccccaggtgtgatggattccgacagagccatccatactatgctcaccctagtggcccaagatacctgtgccacacagctggctggtggcaggattcactccgtgactgccaccctgtgcagctccccctggcctagaaggagagggagctaagaagccctagccatagctctgtcttgcccggaacttcctacaccacaaagaagaggtagaagagtcaggacgtcgggcaacttaaaagaaaaaccaaactactgctgctctaactagaggacctagagctcctttagttccagctttcaaaacttttgtgtggtgacggggatctgggaagaagggtcacacaccttttgaggatcagatgaaagctgtaattctctcaccaggaaaaagattcacaaacacaatttccctcagttttacagggttcagagacccctgaagcccttctatgtatcgattctccataagcccccagggaccctccgagttaagaatgcctgaattcattggcgattacctgatctctgacctctggcccttatattatttttcttaaataaggcctctgccctcatcaacagggttacaggtctaatctcgagttgacagggtctgtttcattttttttgagacggaatctcgctctgtctcacccaggctggagtgcagtggcccgatctcggctcactgcagcctccgcctcccgggttcaagcgagtctcccgtctcagcctcccgagtagctgggattacaggcgtgtgccaccacgcccggctaattttgtatttttagtagacggggtttcaccatgtttgccaggctggtctcgaactactgaccttaggtgatccgcctgcctcggcctcccaaagtgctgggattacaggcgtgagccaccgcgcctggccgacagggtctattttaaatgagtccctctgcccttgtgccatttgcctgctagaactccccctcccccactgcaagctttcaacagtttgctctctctctctctgctcactcagaaaagtcagtctctccgtgcccagtagatgcagcctacagtaggcaggggcccaagatgccagcgcagtccagcccgatgggaagcacaaacacaacccccccaccccgaacgcgcccagcctggctcgccagcaacttggaccgcgcgcagtgcaatcgccgccgctcccccgttactccggggcgcgtttctccgggaacctttgcccccttagggcctctcctcctcccctgtcccctgggctcacaccccggcaagcggccgctccgctgggtgcgtgcgggtgggcgcgcccggggaggtgaggggcccggcccggagagggatccccttcgccaccgtacggggccagcctccctctcgcgccagggggtgtgtgtggcgggacggcgacgtcccgggagtcctgcccgccggtgtcagggccgggcgcgcgtgtcactccgggcgaagagttcggactcccgccggttccaagttatcggagtgagccagccccggggcggacgcgccggagcgccgggtgccgggacccggaggcggggaggagcggggcaggagtgcccggcccggcacctaccagatgaagtcggtgcagtggctgcagaaggtgggctgcttgaagaagcgcgcgatgaatttgtggtccttcacctcgtgcacgttcttctgcctcagcgcccctttgcgggcgaagcggttggccacgtcctgagacgccgtggagtcgttgcccgggaaaacgtcagccatggtcccccccaaccacctcttgcctccgccggggagctgcggccgcggagggccgggtgggcgggggcggcgggggagaggtgcgggctcggggcgaccccgggcgcggggcgcgggccggtggccgaggtcgcggcgagggggcgcggcgggggccggggagagtcgggctggtgctgcgcggagcgggagcgggagccggagccgctggctcgcccgctggccccaggctcactgacagcccggtgcccggcgctcgcgcttcctactcgcggcggcagaggcggcccggagcggcaccgcccaccgcgcatgccccgagcgcgaggccgcgaggacgagcggcgggggcgcgcgggccgggcgcgcgcgggggtgcggcgagggtgcggcggcggcggcgctgagcggaccggaccgagtgcggaggaggcagcgagtgccttgcggtgctgggaacactgggcaaggggaggcggcggcggcggcggcggcggcggcggcggcggcggcggcggccgggggagggccggcccgagtggggatgcgggggaggaggccgggagtggcgggtccgcgctcctccgccgcctttttctttcctccccttcctgcgcccggctctcctccctctcgccctcctccgcctcagttctcctcctcttcttccgctcttgccgcccggcctcctcctctcccggtcttccttctcccactcccgctctctctcttgtcgacgggctcggagtcctgcgccacccgtgccgggccgagaggagcccgcgtccgggagtgggctccacgcgcagcccctgccccggagcctcccgcccggtgctcacctcctaacccctcagcacccgcagcagggagccccttccccatcctcaggacccccggtgtctccagggcacgacgcccgtgttttagctgcctgtaccagcttgaggtttcacctggccaaaatgtcactttcatcacgtgtgcactaaaagacctagcccctagaccttcctacaggaggaagagagcgatttttaaataattaagcattgaccctttcccctaccttctcttcttgacctataccttatttcacctgcgtgtggtagagacttttaatttgtacgtcgggcatttatcaccacgtgggatggttaaaggacttgtcttaggtatttatcccgttattcaatggccaccagagcgacgatgttgattatcaggctttcttgattttacaagtccaggaccttaatttagaaatcattttgcatcccaagctaattactgcaatactgtcaggtgcagagtgcagccagtacgtttgtaacttaccaagtaaaactgcctgtgaaagagtagcgggcatggctatgcaaaggacgcaggtggggatgcaccagctaatcactcgctgaatatttatcaggtctgcctggaggccgctaaaatacataagggaaataatcatttctcagcgtttcattggtgttttgttttatttgccagattcacgaaatccccaaaacgactttacgagctaaagagaccaagaaagagaacacgtttgatccttcaataaatttatgttgaaaaaaaaaacttttctaaaatactttcttagagcatgtaacataggccaagtagagctaatattgttttctttgagattgcctaattgtgatgcttgatgataggaatgtcctttatatttttaacaaatggaagctctcctgactggccgtcagtggtgcatgcacttgactgatccatttacaatctcttgagccagtcttggtgcttcaagagcctgcacctgcctggtattctagctggtcagaaatttcgccactcatggtcgcccctcgggtccaaggagtcaaaaagggaagaagcaaagaggaatgaagagcagggcatgttggggaaatagtcccaattctccatgaaacactagaagcatctcaagccatggtggtttattgcttgaaagcagaaatcaaatggaacatagtggaatgaaataatttcttttctcata

SEQ ID NO: 1244550 - DNA, 4001 bp, Homo sapiens
ggcatggtggcacatacctgtagtcccagctgctctggaggccaaggcatgagaatcgcttgaaccccagaagtgtaggttgcagtgagccgatatcgtgctactgcactccagtgtgggcagcagagtgagacggcgggaaggacaggtgtttttttgaggcacagtcacttcctactgcacctgcttttcagctccaacactaccaattcctcaccctctggttttactcaatctggactccacagcctcccttatccaccctggaccctaaagtcatgccgctgggacctcagccagggtgaggaaccaaaactcctctgccttgctgtttcaggagccaccatgaaagagacacacatggccaggcgcggtggctcatgcctgtaatcccagtactttgggaggccgaggtgggcggatcacgaggtcaggagttcaagaccagcctgaccaacatggtgaaaccccgtctctactaaaaataaaaaaaaataaaaaaaatagctgggcgtggtggcgcgcgcctgtaatcccagctactcaggaggctgaggcaggagaattgtttgaacccgggaggtggagtttgcagtgagccgatattgcgccactgcactccagcctgggcgacagagcgagattccatctcaaaaaaaaaaaaaaaaaaaaaaagcacacatgcagggtcagagcctgtttactctccactcactagctcccccagagctcggacacccatcagctctgtttgtgaaggagacgaggggaggaaggacaaagggggagacgaatttagtaactctcttcagagctgagaaaagcaatctgctctttagttccagaggacaggaggagacctctgaccagcagcagtccagagttcctgcagcaggagtgactgacaacacacacaatgaatgaggagggtgatagggtgaaagaaagtgggaggcttatggcgtctttccccgtgaggcgttaatcggcgcacaaaggcctaactcaaaactcacaagttatgctcatctgtacagaatcctccccgtcctgcggggccgaggagctctcctcgacctcgaggcactgggggtgggcaccagagcagccgaaaggagtagggtgggaagggagggaaggagtagggcgggaagggagggaagaaactaggagaggaaggagggaagaggaggaagcaagggaggggcagtgcgcccgcgtctccttggaaatgcctctctggcctcgccgccgcggaggtaattgtgatgccacgggtggaaccctcagtctccttggtccaccctcagggtcgatggaaccgcccgctcccgccccggcgtccgggtgggcgctggtccacgggctccagccaaggccggcgcttcaagggcagcggcctgcgcccggtgccacccagtccgatagccgagcgttccagctctggctggaaccagacttcccgcccatcccgcgggcgacccagcagggcctcaggaccccagtcctcaatcattggcccgcggctcgacgcgagcccgcccccggccctagctccgccccggccctagctccgccccggcccagcactgggccccgcctctctcgttggtttgcccgtctccctcgtcggtttgccggcttcccgcgtgcgccgctcggggtctgcgagccgggccgcgccctctgcccagcccctgccccgcccctcttaccgcggcatctgctctcatcccacgagcgggccttgggctcggtcttttccttagtccatctttcaattgtgagcgtcgtcctgacccacatcgctctccgcccaggtcttcgtctctacaggactcttgcgtgaagtccaaccctgagcctcagcccggccgagccctcggcccagccgtgaactccagtctcggcttcgcccccgcctagcccctaaccccgcctcatgctggcgcagcccccgccggcctccccagcccggctccaggctgcgtagtcttcccagctgggtctcagcgtcagccgcgttcttcatccggggcctccggcgcctcccaggcccctctttatctcagaccttaaccttacaggcccagctctcaccacccatctctggttccagcttgcagtccaaaccccagattttcaccctgcctccagatcgtagccccaattcttagtgttacaacgagccttgcccccagccccattcttagccccgccccggccattctctaaaccgcacactcccgtcccgctccccgccccaccgacccttgggaacccagccgcagccccgcctctgcccgctggcgagagagcgaaccccatctctacaaaaaatacaaaaattagctagtttagtggtgcgcacttgtagtcccagctactcgggaggctgagatgggaggatcccctgagcccagggaggtcctggcgtcgccatttcccctccaccttccgggcttcgaggtccctccgcctctggtggagcccgggcttcccctttctccgcccacaggcctctccgaagacctaactccgggctgaggacctgatgtcggctcccagcccctgcgccaccccgcagcgttcccgcccctggcccccaggggacaccctattctagagacaatactgcccaatagagagtcgtaagcttatcctgatagacaatctggagaacagggcaggctgcattcataggaacctcatcccagtgacacccctcacgccctcaggtacaacatacacactctgcgcatgcatatatcacacacacacagaatatactcaccacacacagactaatacaacatgcacacggaacacagaactcccacacccggtgcagcacaaacaccacacctggactgtggtgctggcttcacacacatctgttaacaggcaaggcaagggtgaggagcccagtgctgcgagggaacagaaatggaaaaaacaatcacaggagagtgtgaaaagaagttatggccatatcgacgacattccatgcaccacacccctccatttctcttggcaccagcttccaaagccaggatgaagaggaggagaaaggatggggtccacaccttgttttctccaccatcatccaggggctctgctgctgctactattgctctgcctgatccccaccttcactttcctccagacccaagtccggagtgggtagggctgctgcccagaccctccttcccgtggtagctctagagagtctaggaactgcgagggaggggaagccaggagaagggaagtgtgcagaaaaaccaaccatcctggtgagaatggaaccaggaatggaacagacagagcacttggcaactgggagccagaatctgccttctaacttggacacccccttagcctcccaggatgacacgaggccataagtcctcctttgttgacccagatgtctgaggtgcttccagctactctggaactctgggttagatgtcaacagggagccagggtcttggtcacctttctttcttataaaagttaatggcataaacaaccaaaaaaacaaacaaaaaaaaaaaagaaagaaaagttaatggttataactcctgagttcaagcaattctcctgcctcatcctcccaagtagctggagttacaggcatgcaccaccacgcccggctaatttttgtattttattttatttatttttttttatgagacagagtctcgctctgtcacccaggctggagtgcagtggtgccatctcggctcactgcaagctccgcctgccaggttcaggccattctcctgcctcagcctcccaagtagctgggactacaggcaccagccaccacgcctggctaattttttgcatttttagtttcaccatgttagccaggatggtctctatctcctgacctcgtgatccgcccgcctcagcctcccaaagtgctgggattacaggcatgagccaccgcgcccggcctaatttttggattttaatggtgacgcgggtttcaccatgtt

SEQ ID NO: 1244551 - DNA, 4001 bp, Homo sapiens
aattaaataccccaaacacagaattcaggtccctgaggagcgacaggctgccactatgcacagtatcccactctggacttcaaccagctcaaccatagggacatcttatttttcattttttttttttttttgagacggagtctcgtactttcgcccaggccagagtgcagtggtgtgatctcggctcactacaagttccgcctcccaggttcacgccattctcctgcctcagcctcccaagtagctgggactacagacacctgccaccacgcccagctaattttgtgtatttttagtagagacggggtttcaccgtgttagccaggatggtctcgatctcctgacctcatgatccacccgcctcggcctcccaaagtgctgggattacaggcatgagccaccgcgcctggccagggacatcttataatatcatcaacaggacaaattaaagcaccagtcccagatcgggaagagaggggaaacagactgcaaaagtggaagatgtagaaattatcagagactcctactggttttctcctttctcttatatccaccaagatgagctgtcaaagcatcaatccaagactgtgggacagggagaagggaaaagggccaaattccaaatgaaattatttcaggatgttccttaccccaagtaaacccttttgtcatggcggaacttcctgttggtcatgtctccatggtctcgaatgatcttcctgacatgttctgggggcatgtcttccttctgggcatccacaaacccaaacttccgcttttctgcatagcgcttggcctgcaattgctgccattttcgagctggaaaggcacctcagtttaaaggcctgcacaccctccccctaatcctcttcacctcttgccctagggtaagctcctgtcagtgagtgtgagggagaagcaggcaccagcaggaagaagcaccccttgccaattcccttaccattttactctgtttttcctttcatcacattgatcactatctgacttttttttttttttttgagaggttgtttcactctgtctcccaggctggagtgcaatggtgcgatgtcggctcactgcaacctccgcctcctgggttcaagccattctcctgcctcagcctccccagtagctgggattatagacacgcgccaccacacacgactcatttttgtatttttcgtagagacgaggtttcactgtgttggccaggctggtctcgaactcctgacctcaggtgatccgcccgcctgggcctcccaaagtgctgggattacaaccgtgagccaccgcgcccggcctgacatttttattacagagcttcaaggttttgttattctctgtctctcccgctgtaatttaaaccccgtaaggacaggaattttgtctccgtcactactgtacccccgctggatcagcgcttgcaaataatacgcgcttaaaatgacttgatgaaaaattaactggaaataacaagggagctgacacctcaggagctgcccaaacggggagggtccccacccgcctgcgcgcgcgcacacccgccccgcctccggcccgcgcgccgctccacactctcgcctcacctttctcctgcagcttctcctccgacatgtagtccggtagcggggctagagggccaggcaccgggttacccggccctcgataaggaaacactccggccatatccggagaatctggggagcggcgggatagaaaaattcactaaccacaggcccgggcccacaagaagcgcagcagaaaggcgtccggggaccccggcctgcagtcccgccacacagtgcatccagccccgcccggcctaaccccttcggtcactcggcccgacccgaccacgcctcccgcagcccggccttaaacgcctgccacgcaccccacaggccctcacacaagaggccgctttccccgcagcgcaatggcggccagactgcgtccgctccgcgttcccagcgccgggaagtgcgcaacccgagttcagcagttgatccagtcggcgccgaggtgctcagatggattagtgagacgaccaattagagttgcacactgcgccgaggaggcgggcccataggcggaaaggctttgaacgcaagggggtgtggtcggggtgaagccccgcctcctccatttccgaggctgtttctggggcctctgacagacctcagcgtgtgatgggctcccggcgtcgcactgtgagagagcgaagtctaaagggtttgaataaatttgccaagattgcgcattgtacgatgtctgttgtcatcaatgtgtacatgcaatgcagtactagctcctggacagtcatttgttcatgcattcattcatttaaccatcactgtctaccgaggacgagggataaagcaggaaaaaagacaaccagtagagttcacaggggagcagaaaggcaggcaagaattaagaccttggccgggcgcggtggctcacgcctggaatcgcagcactttgggaggccgaggcaggcggatcacttaaagccagaagttcgaggccagcctggccaacatggtgaaaccccgtctctactaaaaatacaaacattagccgggcgtggtggcgggcgcctgtagtcccagctactcgggaggctgaggcaggagaatcgcttgacccgggagggggaggttgcagtgagccaagatcgcgccactgcactccagcctgggtgacagagcgagactctgtctcgggggaaaaaaaaaagtctgaaattctgtggagggtgcagaggaattgtaacccatacagcccctgaatctagttgagaatttacaaatcaaagtgaaataattagaaaaaaattcaaaggatgtcaatgtgctttcagaacggtaaaaatttaaaaaatattccttttgtttttttgagacagggtctcactctgttgcccagactggagtgcaatggcgcgatctcaattcatcacaacctccacctcccaggatcaagcaattctcctgcctcagtctccagagtagctggattacaggcacgcgccactactgccggctaagttttggatttttagtagagacagggtttcactatgttggccaggctggtctcaaactcctgaccttacgaaatcctcctgcctcggccctcccaaagtgctgggattacaggcgtgagcccccatgcccggcctgaaatctattttttaatgctgggtgttctaaaggtccctacagtcaaaaaagacagaggagaattgttaaagatttgatggagatggatggatgtgaggatttcataaaggtaaatggagaggaaggaaaaaggtaatcccaagtggtagaactactagaaagagttaagaaagaagccgggcaccgtgactcatacctgtaatcctagcacgttgggaggcagcggcgagaggattggttaaactcatgagtttaagactagcctgggcaacatactgagaccctcatctctacaaataataaaaatattaaccaggcatagtggtacatgcctgtagtcccagctactcgggaggctgaggtgggaggatcatgatggcaccactgcactccagcctgggtgacagagcgaggctggtttcatagaaaaaaagtgggggttttggtttgttttttgttttttgaggcagagtctcactctgttgccaggctggagtgcagtgtcacaatctcggctcactgcaacctctgcctccaggattcaagcgattctcctgcctcagcctcctgagtagctggggttacaggcatgtgccaccacacccggctaattttgtatttttcgtagagatggcgtttctccatgtttgtcaggctggtctcgaactactgagctcaagtaatctgcctacctcagcctcgcaaattgctgggatttcaggcgtgagccaccgtgccaggccaaaaaaggtttagatatagaaactaacatggcatgctctgaaaataggcaccatatcaatctggctgtgc

SEQ ID NO: 1244552 - DNA, 4001 bp, Homo sapiens
atccctgcaatcatttgtcaaccctaaaaaagtaacgaagtaactctatgaaaactgtttaaaatgtgaaaatggctttaaatattaaaagacgagctattcattttatgtcttagatttctaacaagtgtatgtagaaagggcatataaggctcctcctttatatcagagctctgggattctccaaaagagccaactagaaaagaggccatttcaccgggcgcggtggctgaagcctgtaatcccagcactttgggaggccgaggcgggcggatcacgaggtcagaagatcgaaaccatcctggctaacacggtgaaacccagtctctactaaaaatacaaaaaatgagccgggtgtggtggcgggtgcctgtagtcccagctacttgggaggctggggcaggacaatggcgtgaacccgggaggcggagcttgcagtgagccgagatctcgccactgcactccagcctgggtgacagagcgagactccgtctcaaaaaaaaaaaaaaaaaaaaaaagaaaagaaaaagaaaaagaaaagaggccacttagtaaacaactattcagagggccactatgagcccctactctgctagaaccagatactacttctacattatcccgatcatacaatattctcaaccatgcccatttcacagatgaggttcagggaaatcaagtctcttgcccactgacacagagctagtaagtggcaaggctgggagggcatctcagagctgtcagaccccaaaggcgacttaagaccaggggcttggttgggttaaagacacaaatgactgatcttatcccaagctgatttacaaagcagggtcaggcctgtcatttctaccaccagctccggcccatctgcctccctggaattgccttcttcgcactgccagtccccacacctttgctctgcgaccgcacctgccgcgtcggatcccccaactcacaaccacgcccgcgggtctcactgcagtgagacttgagagtggcggcggtcagattcccaggtcaactccagccgtgggaaaggaagccaagccctgagcccctttccccaagacacgcactccggggctccagaaagctcggcccgccccggggtgtgggactgcggagacgaaaggcaggcaggccgcggacccagtcacggggcggggggctgaggtcaccgagagtccgccccaagcctcccagctgcaaaaccggggagcggggggcggtatccgtcacctccaagctttgtccggctgggaaggcccgcgcctcccgccccaggtgcaggaggtggggcgggtggaggggagcgggtccctccgggcgcgaaggagagctaggcgccgccgcccccggcccggccctcccaccgcccccttactctgtgatgcgcttggccagctccgtgcaggcggccgtggagttggccgagaagactcggtagccggtgcgagcggcgttcatggccggcgggggaacggggcgggcgcgcgggacgcggaaagccgaggacgcggagggcgggggcaacagcagcagcttcttgggcatcgtccggcccgcggcgcggttacgaccggccccgcgcggggctgcactctgagtgcttccgactgcgagaccccggtttgggtggggaaggcgctgagaaactcggcgcaagcggggagagctccgaggtccgtgcccttgcgcaccccacaccactgactacagcggccgagccttcgcagcgcccggcgccgccgcctcagagccagaggcaaggccaccgccccctccgggcatccgaagagcgtcggctagagcgccctcaggccgccatctcggatgagggcagggagcctggcgactctctaaaagcctgttcttccgaggggcatgtcacaggttcgccccgcccctgctttgaccgcttccacgggagctctttcggtctcactttcttgggaggagcagcctacctcggtagtggccccaggtgtttccaactttttggccaggacccaacatgtccgcctccgaggaggtatacgatctagctctgcatgtctatggtagcacagcgcccgccccacgaggcgcgtgcgccggccggagattaatttgaaaagtagagggcgggggttctttccagctggttgaccgcagtactgaagcggccaaaaagtggtcttctcctgagcctgatctttcaggcgtttccgaacagatccccaaccctgtgtctgcgtgtaaggcaaggttccctgaacgtgccaaaggccctcttgccggtattcgctttcaatcaaaaaagccctccttctcctctttccatatgcgccacccctccgagacccactcgcgatgcgtctgttccacagtctttctggtgacctcaaccacagtaagccgcccggcccgcgggactgtgccacacgtagatgcttgcattttttaaatttttgttgttgttgttattgttttgatgcttgcatatttatgtacctttgcaaacatctattttcctaactaggatgtaacccattttacggccacatcgtgagttccttttttttttttttaattttattattatttatttattttttgaaatagggtctccctctgccgcccaggctggagtgcagtggcgcgatcacggctcactgcagcctctacctcccgggctcaagccatcctcctacctcagtcattcaaaatgccgacattacaggcctcagccatcacgccccgccaagatcgtgtattcctgagtgctccgtgttacccagtgtatagggcagtgtgtgggctccagaggcccgcaatcagtacttgttgaagtagaaagtaaagcccagggaagcatttgagatctctagttatcagctgcaccagaactcgaggggaggagaggtgcctctcacattgacagtaccatcttctgagaatgtcctttagagactctgcttgtggtgacattgggcttgagggagcagtagattgtgactcagcatgtcgtgaaggaccacaagtctgaagctacaggatttggaagttgagctgccctgagcctgcagcagcctggcccctattccaatagctctctagaaaaaaaaaaaaaaaaaaaaaggacagtgggtgcacagcctaggccaaattatttaaccactgcacacatgtccagctcacagaccctgacaaaaaccttgttaccttcttaaaaaaaagggggaatgggataggtgcagtagctcatgcctgtaatcccagcactttgggaggccgaggcggatgatagtttgaggtcaggagttcaagaccagcctgggcaacatggcgaaacccaatctgtactaaaaatacaaaaattagccaggtgttggctgagcgtggtggctcactcctttaatcccagcactttgggaggctgaggtgggtggatcacctgaggtcaggagtttgagacaagcctggccaaggtggcaaaacactgtctctactaaaaatgcaaaaattaggctgggcacggtggctcatgcctgtaatcccagcactttgggaggctatggtgggtggatcacgaggtcaggaattcgataccagcctggccaacatggtgaaaccctgtctctactaataatacaaaaaattagccagatgtggccgggcgcggtggctcacgcctgtaatcccagcactttgagaggctgaggcgggcggatcacaaggtcaggagatcgagaccatcctggctaacacggtgaaaccccatctctactaaaaatacaaaaaattagccgggcgcagtggcgggcgcctgtagtcccagctactcgggaggctgaggcaggagaatggcgtgaacccgggaggcggagcttgcagtgagctgacattgtgccactgaactccagcctggacgaccgggcgagggcgcgactctgtctcaaaaaaaaaaaaaaaaaatcagccagatgtggtggcgcggtggcacacacctgtaatcccac

SEQ ID NO: 1244553 - DNA, 4001 bp, Homo sapiens
ccctcgctgccgctcgccactggctcccgcccgcctacctggccccgaccccagccccggccccgccgcagcctcagctgcagaaggaagaaagcgccgggtctcctggcggcctctctaggagcaaaatggcgactccatgcacaagattggcgtccgcggtgactgcgaggccggtgggcggggaggggcgagggcgggactagagcccggacagcggaggcacctagctgggggctgtgggcgtggcccaccagtgggtaaggcgcggggcagtgggtgtagccacaggggtggagtcgggctggcacgatgggcggggcggtgggcggggatgcgcctgttttggtccctggggagctgctagccccacaccaactgtgacagcccaggcaggttacaaggaatgaatgtggacagagtatgacatttggaattacaaatacctgggttcaagcctccactggcctgtaaccttggacaagtcatttcaaccctctgagcttgtttcctcatctgaaaaacaaagatagcagcacccattccataagactgttgtgaggattaaatgagacaatacggccagacgcggtggttcacgcctgtaattccagcactttgcgaggctgaggcgggcggatcacgaggtcaggagttcgagaccagcctgaccaacatggtgaaacccccatctctactaaaaatacaaaaaaaaaaaattagccaggcgtggtggtgcgcgcctgtaatcccagctactcaggaggctgaggcaggagaatcgcttgaacccgggaggcagaggttgcagtgagccgagatcgcgccactgctctccagcctgggtgacagagcaagagtccatctcaaaaacaaaacaaaacaaaacaaaactgtgctaaaagcacagttctgggtgtataataaatgatcagttttttgttcgtttgttagttttttgttttgagacggagtttcgctctgttgtccaggctagagtgcatcggcgcgatctcagctcactgcaaacttcgtctcccgggttcaagcgattctcctgtctcagcctcccgagtagctgggattacaggtgtgcgccaccacgcccgactaattttttgtatttttagtagagacagggtttcaccatgttggccaggctgttctcaaactcctgacctcaagtgatccgcccgcctccgcctcctaaagtcctggggttacaggcgtgagccatcgcgcccagccattatcagttattatcgttatttgccttgtcgcctttttttcttttattataaaggaattagtacttttggtatccattgcctaagttctttataacttaggtaatgtttactctttattgtatgtataacataataatagcaaacacatggtcctcttttaagtgctttacatatattaacggtaacttatttaatcctcacaagagcataaggtaggtgttgttatcctctccattttaatagttgtgggaactgagacgacgacgttaaataacttttccaatgacaaagcagtggacagaatttcgacccaggaggctttgcaccagtcttcacttacctaatccctataccacatcttctctccaattctgctttggatttttcacaataatgaggcatgaaatattcatcagaggttgcagagctagctagagtctttatggttcaacgtcttattttagaaacgaagaatacaagcatctcaactaacgaattgtaaattaggtgagacttcgtgaaatggagtcgtttgaaacatttcctttgcctgacaactttacagggacatacctctttgtaaagagcaagacccatgagcccagtgattatctgcataccaaaattgattcctcttcagcggtacctcggctgggctcacgtcccttctgcgctggcatctaactccggtcacaacccccacctctctgctgtggctggcgtagattccacgcgtcacatgttggcatgtgactggatctggccagtcagagaagttcatccctctccgctcgctgattcgctccaaagataggctactgagccaatcggagcccacgaaacaccgtctccatccctgcgccgggactggagaggcttactctctcctgctgatgctgcagctgctgggatgccaggaggggaaccgcctgaggaaagtgctgagagaaaagagagggagggatacagaccgggcccagatgagtttgcgctgaatctgaagtcggtaggtccctggacatttctattatggaagccaagaagaacctcccctccaccctctgaagccagtgtggatcgggtttctggcacttgcagtgtctgcacggtctcctctccttccttctccattgccctttctcacccgcctgggcccgccaccctgaactaccgggacacatgctgttcctgcctccaggcgtgcacttcttcctgcagcctcctcccctactaactccttcttgaacttgatagctccattgtcactttcgagtcttccctaaaccactcccttcccaaataaaactgtttcatgtatttttctttcattgggcttatcacgatttctaattaagtgtttgggtggttatttgacaaatatcaccacctcagcccctgtacactgtaagccccatgagggtgggctcttcgtccctcctgctgatcactgtttcccagggcctggcacaagtatggtactcaagaaatgtctggaaaattgagtgccttatcctttctggaaagaaaatgggcagtagcgcagcattatatagtgtttgcaccatacaagaataatattactggaaaaaaaaaaacttttctaagagacagagtcttgctctgttgcccaggctggagtgcagtggtgcaatcatagctcactgccgcctcgaactgggctcaagtgatcctcccgcctcgacctccaaaacgctgggattgcagtcatgagccaccacacctggccttgaattttttaaaaaatccactctcattaaccagaatgagctagctccagtgtatcaccgcgtccagggttctgcagtggggtggcttgctcctcaatagtttcccgcactgcaggcacttagtttgtagtttcatttgttctgttatagcaataccactcttccatccgccatccattctccaaggactattgaaatcccttgtaggctgatgtcaaaactctcattctctttatccttggggtttaggccataggagtgtgccatggtaggtgttcagccaagctgacccaccaggtgactgcagccccagccaccacctgactgcaactttatgaaagaccctaagcaagagccacctagctaagaccaatcaaaccacaaaaaattgagagctaagaaattttttattaaagcccaagtctgggcatattttgttatacaatgggtaatgagcaagaaaggagcaaaagcataatgtaaagcttgtggtcagttccacacgaatgcagtttttggttagtccattgctaaacttgataatcccttgcccacttggatgtttgcagtcagagtctttgcatgtaatagaagtgctcagcttgctgcaacacgtcattggccatattcaagggctaaactgctgtatatcgactataaatcaagatactcaagtctaagacatttcccttcaacattttttaaaggaaggaaaggaatctttgctatagtttgatagaaatttttgagcagtatggtgtaacaaaaaacacaggattctccttcaaatggttgtgcaaatgaaaaaacagggacttaggtgtccatcactaggatggagcctgcttcctgcctcctgtcctcattgtggaaatgaccctggacagatccacctctctaagtttctgtttcctcagtggaaaaatgagcactaatattagcagccatatgatggttgggggtgaggagttacttttagatggagtccatgagtatgaggcac

SEQ ID NO: 1244554 - DNA, 4001 bp, Homo sapiens
ccttgcctgcctgacttcttgctaatggaaatgtacaactgaatcaaatcgtttcaatagtaaaggatgaaggacggagccaatatgccacatttcacaaaaaggtcaatgttccacatgcccaagatagctcacctctgttaggttcctggtaaacctgcactttgcccatctccacccctagccgcctagagaagagaaagggggaaaaagctgaaaaagtaatagaagaaacccagtatctttactatttaaggagactcgtaaatcgataagagtaaaataaaataaagttattcttcttataaaatttaaagtcaacattaaattgttacatcaatccattacctagcccctcaccccaaccccatgtctccccaggaaggactatgcagtcccgctctgcctgcctcactagccatcttccttggacactctgtactccagcccacgttcctgagacacaccaagaactcctcctgcatgctgcagaggcttggaatctgctgtcccctctgcttgggggggttctgcctccagaccttcacttggtggctcattcaggtttctcaactcacacaccatcccttcagtttaaaagcacttcagcacacatgctaaagcagaacaacctgccccatcattactttcacacagttttcttcatagcattgacatcatctgaaattaccttgtttgttttgttgacttgatttctgtttggctcccatactaaaatgtaaatttcataaaaaggatggatcttgactcactgataatccccaacatctagatcaaggtctagtacacagtagtaggggtacaatatttgtttaataaatatctaaaattatactaaactataagctataagttatttcatataatatacatgttaatgttctttttttgagacagagtctcgttctgttgcccaggctggagtgcagtggtgcaatctcagctcactgcaaccctcctgcgttcaagcgattctcctgcctcagcctcccaagtagctgggactacaggtgcccgccaccacgcccaactaattttttgtatttttagtagacgcggggtttcaccttgttaactaggatggtctcaatctcctgacctcgtgatacacccgccttggcctcccaaagtgctgggattacaggcgtgagccaccgcgcctggccccagtgtgctttatactcaaataattatatatatatatagcatctaacacaatccctggcacttataaggcactcaataaatgtctgctgaaagaatatgtagggagatgggatagtttacaaaaagaatagcccttaatatatacagatgagacatactacatgaacatcttgcatgatgaaaaaaaagatacatgatgaaaaaaagatataattattttataattataaaatatctgctttcaaatttaacaataactgctaatctgattatcaaatttaaagcatcacataatgaatatagattttaatggtacaattataactcactctgcaattttctttgatagctccatacatgatgaattcgagtttgctgaaaacaacaccagaccacctttggttatgttcatcttggtttctaattcaggtggcgtcacacaaaacatcaaaaccttcttggttttccaattttcagagcctagaaggatataatacttattaaaaactgccatatgatatgaaatatacctgaatgaattttttttaaaggaaatgacttcagctgaaggaaattagtttccatcctaatagtattttttaaatattagatatatatggacaaacagaaagttcagttggatttcagggtcctaaatttatggaaatacattatcacatgatgttcacaaccactaagaagaaatgataaacttacaagaaaggcggagctgaagagctcaatgttttactgattgctgcttaaagtcaattatggacaacctccttttattctctgacaacaaaattcctcctggattaacacacagaaaaatggcagagccattagcgagaacaaggactgattaatccttagacaaagaataaatgacccatctacacccagcttttcctgtaatccttgtttaccataaaacctttcccggcctttcagctgccctgtgtcatgtctaaaactgacctctcatcttcattttcctcaagtggaacacgggctgactagataatcaccttgaaggacacttaagcgaccacccaaatgacagttttggtcacacccaaattttggcagtgggccaaaaataaaaaggtccctggcttataaatcatcagtgctggtcagatgtggtggctcacgcctgtaatcctagcactttgggaagccaaggcaggcagatcacgagatcaagagatcaagaccaccctggccaacatggtgaaaccctgtctctactaaaaatacaaaaaatagctgggcatggtggcgcgtgcctgtagtcccacctactcgggaggctgaggtaggagaatgacgtgaacctgggaggcagaggttgcagtgagctgagatcgtgccactgcacttccagcctggcgacacagcaagactccatctcaaaaaaaaaaagtcgtcatcattgctgagtgtcctcatcacataatggagatgctagatgggaggaacagcaacaatccagcaggctgtgggcaggggggccctttctcagcaagcccactgcatttccacagttgtatgttcacctgggacctctgggaaggctggtgtagatcatcaatgagctgaaactaagctaatctttttcattattctcaaattttaattatacaagtaaaacacaaacacatcctccctataaaaacctgaaacatggctgggcgcggtggctcagacctgtaatcccagcactttgggaggccaaggcaggcggatcacaaggtcaggagttcaagaccagcctggccaaaagggtgaaatctgtctctactaaaaatacaaaaatgagctgggcgtggtggtggctgcctatagtcccagctactctagaggctgaggcttgagaatcgcttgaactcaggaggcagaggttgcagtgagccaagattgcaccactgtactccagcctgggcaacagagcgagactccgtctcagaaaaaaaaaaaaacctgaaacatgatagttaaggataaagtcaccagcctcgatcccaggtcctccccagaagtgagggttcttatcagtttggtagggacaacataagactttttctatgcatttatacatgtgacctccataaaaattatatacggccaggcacagtggctcacgcctgtaatcctagcactttgggaggctgaggtgggcagatcacttgaggccaggagttcgagaccagcctgaccaacatggtgaaaccccatctctactaaaaatacaaaaaaataaaaataaaaataagccaggcatggtggtacatgcctgtaatcccagctactcatgaggctgaggcaggagaatcgcttaaacccaggaggcagaagttgcagtgagctgagatccactgcactccaacctgggcaatgagaacaaaactccatctaaaaaattaaaaaaaaaaaaaaaaaaaaaaggccacgcagtggcttacgcctgtaatcccagcactttgggaggccgaggtgggtggatcacctgaggtcaggggttcgagaccagcctggacaacatggcgaaacgctgtctccactaaaaatacaaaagattagccgggcgtggtggcaggtgcctgtagtcccagctaatcgggaggctgaggcagaagaatggcatgaacccaggaggcagagcttgcagtgagccaagatcgcgccactgcactccagcctgggcgacagagcgagactccgtttcaaataaagaaaagaaaagaaaagagaagaagaaagaaagggaagaaagaaagaaaagaaagaaagaatacgtttaatcatca

SEQ ID NO: 1244555 - DNA, 4001 bp, Homo sapiens
aaaagtataaaaatttatgtttattggatgggcatggtggctcacgcttgtaatcccagcactttgggaggccaaggcaggcagatcacaaggtcaggagtttgagaccaacctgacaaacgtggtgacaccctgtctctactaaaaatacaaaaaattagccgggcgtggtggcgcatgcctgtaatcccagctactcaggaggctgaggcaggagaatcgcttgaacccgggaggcagaggttgcagtgagctgagatcgcgccactgctctccagcccgggagacagagcaagactctgcaaaaaaaataaaaataaaaaaacttattatgtatgtttattagtgatgtgcctcactccaaggaaatctgtttttaatatcaatattgatgagaatttgaagggcaaattctaaaccgaattactcttccactcctgtatgatcccaggctctgcttatctctccaacacaatgttaactcatgcctaacatctgagtgttcacaatgcttatgacaacccagtgaagcaagcactagaatgagacccattttagacagggaagctaggtttccagatgaagaaacttactcaaggctgcaaagcctctaagcagcaaaaatagctcggtctcagcatgatttgtagtagttagtcctatgcaacagtgggctgcacagcctgtctctcaacccacacagaaaacgacttggcaccccgctgaattctgcatacagagagcaaaataggacaaatacccagattttgaaaaatgtctattgtaaacatgccttgtttggaaaacaatttatataatagtgccaaagaaagaaaacagaagtttgattcggtatttccacttcgggtaattatcccaaggaaataaggaaaaagctatatgctcagtgatggtggtcaacataagacttttcaaagaacaagtacaccagacctgtgtaaaggttccataataaagtaattaagtaaaacacagaatagaaattcaataaatattcaacacgacgcaaaagtatctatgaatgactttaagtggaacgagctcaaatcacaactgagtaataatggtacacacgagggcagcaggaaaggaatatggacaaaaaggatatgctttagtggggttcaataatgtgggtgaattatttctatttgtgcaattaaattttttaaacactagagatcacacctcaagccccaaagccccattccgcattttcatactcctttcaaaagctaaacacccaaacggagccaacattaacataagagaaaaattattatcatcaagcagaatacttaaaaatttcatcacggttccccctcaatctctgctggggtgagttctgagttggataaaatcatcctttaggaggtgagagatatattcgtaactagcaaagccaggtaaattaaaatcaggggctccgtgtcagcttagggacggagaatggctgggtctgggcttgctttcagggctgctcaccacaggtcccatcatcagggttcgactccccagcggcgcctcagggagaggagagagcccaggcaccggacgcccgtcccccgcccccgccgacccctggcgggagaggaagaagggagggaaaaatggaagggccgcgggcgcgagatcgccccagtgagcccccaagcagccaccacccagggaccccgacccgtccgcctgccggcgccgcgggctccccgccccttgcacctgcgccccgcaatgccggagccagccagccctcgctgccgctcgccactggctcccgcccgcctacctggccccgaccccagccccggccccgccgcagcctcagctgcagaaggaagaaagcgccgggtctcctggcggcctctctaggagcaaaatggcgactccatgcacaagattggcgtccgcggtgactgcgaggccggtgggcggggaggggcgagggcgggactagagcccggacagcggaggcacctagctgggggctgtgggcgtggcccaccagtgggtaaggcgcggggcagtgggtgtagccacaggggtggagtcgggctggcacgatgggcggggcggtgggcggggatgcgcctgttttggtccctggggagctgctagccccacaccaactgtgacagcccaggcaggttacaaggaatgaatgtggacagagtatgacatttggaattacaaatacctgggttcaagcctccactggcctgtaaccttggacaagtcatttcaaccctctgagcttgtttcctcatctgaaaaacaaagatagcagcacccattccataagactgttgtgaggattaaatgagacaatacggccagacgcggtggttcacgcctgtaattccagcactttgcgaggctgaggcgggcggatcacgaggtcaggagttcgagaccagcctgaccaacatggtgaaacccccatctctactaaaaatacaaaaaaaaaaaattagccaggcgtggtggtgcgcgcctgtaatcccagctactcaggaggctgaggcaggagaatcgcttgaacccgggaggcagaggttgcagtgagccgagatcgcgccactgctctccagcctgggtgacagagcaagagtccatctcaaaaacaaaacaaaacaaaacaaaactgtgctaaaagcacagttctgggtgtataataaatgatcagttttttgttcgtttgttagttttttgttttgagacggagtttcgctctgttgtccaggctagagtgcatcggcgcgatctcagctcactgcaaacttcgtctcccgggttcaagcgattctcctgtctcagcctcccgagtagctgggattacaggtgtgcgccaccacgcccgactaattttttgtatttttagtagagacagggtttcaccatgttggccaggctgttctcaaactcctgacctcaagtgatccgcccgcctccgcctcctaaagtcctggggttacaggcgtgagccatcgcgcccagccattatcagttattatcgttatttgccttgtcgcctttttttcttttattataaaggaattagtacttttggtatccattgcctaagttctttataacttaggtaatgtttactctttattgtatgtataacataataatagcaaacacatggtcctcttttaagtgctttacatatattaacggtaacttatttaatcctcacaagagcataaggtaggtgttgttatcctctccattttaatagttgtgggaactgagacgacgacgttaaataacttttccaatgacaaagcagtggacagaatttcgacccaggaggctttgcaccagtcttcacttacctaatccctataccacatcttctctccaattctgctttggatttttcacaataatgaggcatgaaatattcatcagaggttgcagagctagctagagtctttatggttcaacgtcttattttagaaacgaagaatacaagcatctcaactaacgaattgtaaattaggtgagacttcgtgaaatggagtcgtttgaaacatttcctttgcctgacaactttacagggacatacctctttgtaaagagcaagacccatgagcccagtgattatctgcataccaaaattgattcctcttcagcggtacctcggctgggctcacgtcccttctgcgctggcatctaactccggtcacaacccccacctctctgctgtggctggcgtagattccacgcgtcacatgttggcatgtgactggatctggccagtcagagaagttcatccctctccgctcgctgattcgctccaaagataggctactgagccaatcggagcccacgaaacaccgtctccatccctgcgccgggactggagaggcttactctctcctgctgatgctgcagctgctgggatgccaggaggggaaccgcctgaggaaagtgctgagagaaaagagagggagggatacagaccgggcccagat

SEQ ID NO: 1244556 - DNA, 4001 bp, Homo sapiens
gaactccttacctcaagtgatccgcccgcttcatcctcccagagtgctgggattacaggtgtgaggcaccatgcccagcctccttacagaatttatactggctgaaatgtcatctcttttgcacttctatagcactttatacacatctttattataaaatgtattacatttcattgtaatttttgcttgtatgtttgtcatcctgctggactgtgagcttttcaagggtgtgacaaatttcattcatctttgttttcccagcatctagaatacagcaggagctaaataatgtttcattcaataaagaatgaaaagaagcattcctgctaagtgttagctagcaagtgttattttagttaaggaatatattctaatattgtcaaattctcttggttagggaggtttttacttcttcatatcataccacatcttcatatggctaaaagatgggtctaaagctattttccaataggaagatgcaataaataatacagtaagaattacagtcttttgcaggagttggcgctgctgcttctgtgaaaactccacccaatgatatgaaaagttctttgcggccgagcgtggtggctcacgcctgtaatcccagcactttgggaggctgaggctggtggatcacgaggtcaggaaatcgagaccatcctggccaagagggtgaaaccccgtctctactaaaaatacaaaaattagccgggcgtgctggcgtgcgcctgtactcccagctactcaggaggctgaggttgtagtgggccgagattgtgccactgtactccagcctaggcgacagagcgagactccgtcacaaaaaaagaaaaaaaaaaaaaagaaagaaagagaagaaaagttctttgttctggggtactttcaaagctgtagcagcaacggaaatgactgttgcatttcattgccatcttcctaaaacacatttttatggaagtctcttgcgctcctccacaaatagccttcaattacttaatttccattagcagtccaattgattcttcttgaacacccatagcactatttctgggtacttgctttttttaaattttatgttttatgcttttttttttttaagcattgctgtttttgttctgtcttgtttttccaaagagactgcagctccctaaagtctcatcccgcacagtattaggcactcagtaaacaggacacgcatttaaaattgacactctaacagcatgccagacaatatcgagtaacatagtaatattcccagtcaagaaatgtaccaacttaaactttaatgtgcatagaaatcactcagggaaatcttgttaaaatgtatattctgatttagtaaatttgggtggagtccgataatttgcatttgtaacaagcaaacaagagatgcggatgccgctgatctgtggacttgcattgagcagcaaatatgtaaagaaatgttcaaaaggaaggcagatgctttgctccaaaacgtatcttgcgaagtgttaattaaatagaagtatggttaagatgaagccaggccgagcacttcttccccagccccaaacctccccttcctcctttccatttccccttcgtgtccagccaaagtccccacctccctaaaccataaaaacacaagcagcaacaggcccagctactcaagacgcgagctcagataacaaagaaataatcgttcctgcacttactagtctaagagccgggggagtcgatggagtccgggctgtggcctctcccacgccataaagaaaaattcaaaattaaatccttgtcagggagaggccaatcgtagacacggtctctgcacgattcgctcttcggatggtgtaggagcacagcccggcttgtgattggctgagatagcacagagctccagccaatcagagctgaggcgcttctggtatgaataaggagaaggcgggagagaaggggaaggaaagccggaggggaaagaaggtgtgttacgtcccctctgctgtcggtggaagctctggtgtgattggttggctcttcttccaattgcaccaatctcaagctcttctctgcagagccctaactacaaaattgaaagtagagaggagggggcagccaatggaaaaaaaaatttgcacagcagccaatcctcctgcggcgttttgtgcctttgcccaacaggaaaatgtgtctcatgcagaggggcgttacccagtctccaatgggcgggagccggtggaacggaggagccaatgagtgcgagatgttgagtgacagctgtccaatggaggccctccgtgctagtacggcttgcggcttaagcgccgccgcggtctgcggaatgtcaactattcaacatggaggcggaggtcgataagctggaactgatggtgagtgcaaagtgaaggagatctactgggtagtttatttttcccccatggcctcggaggtggggcacaatttggagtcgccggaaactccgggcggcggaggctggaccagagtcgagttccctcctcctgcaccaaagggagccgccaccgtctggtgtctaaaccgcctcgggtaaggggttacatccgggaaactcgtcagggaaatggcgggagatgctgagggtgcggggcctttggaattccttgttccttgccctcacctttacaccccttacgaaactgcgccgggtgcagaccgcattctgtgtttgtaccaaaaaagatgtgaatggaacggtccctaagcgtcccaagaagggagaggtggttcacactccaagaaaggggaacggagggtggggtggggaataaactgacgggggcgaggagaaatccctgtagggccaacccgctcacgttctaaaaggcgggccgagaaagtctgagaaaggatgctagacttgtatgcacaacttcctaacggccaaggaacccgtttctgtttgatccggaggtggcaaaccgtgggtgagggaagaggtgtgagcgaaggggatcgtaaccacgagctccgctcccggagcgcgggcgggattgagacaggaaaggcatcctgctctggagttgtgcactttcattcatctgtgaaagtagaaaacgggggcgaagaattggaaagcactcccgttgttgctggcgtgtttggcctgctcggggggcgcccagctggggggctgtcctagttttctttaaggatccgtccctcacttgttctctttattccctccctcccatccttagattaccagcttgatcgcccgcgcttttttcctcttagtgtccttgttctgtcttcagcccttttcgttcagcattatcttttttttcttttcttttctttttttttttttttcccaggttgggctgctttccttaaaaacctggactttggaggaagcgcctgccactgagctcctgtctttttttgtttgtttgcttgtctgttaaatacgattggccgggcgcggtggctcacgcctgtaatcccggcactttgggaggccgaggcgggcggatcaagaggtcaagacattgagactaccctggccaacatggtgaaactccgtctatactaaaaataaaaaaattagccgggtgtgatggcacgcgcctgtagtcccagctactcgggaggctgaggcaggaggatcgcttcaacctgggagacggaggttgcagtgagccgagatcgcgtcactgtactccggccttgcgacagagacaacgtctcaaaaaaaaaaaagattaagttttaaaaaagtaaaagacttctttcttcgtttgtaatccgtccctccttcccacgccattccctggcattactgcttaggtatcctttgtgcctgccctgctttcttcaagctgaatcttgggtctctaacttcttccttggaaaggatgggtggtgatcctggaagaaacctcacccaccccccattcccaccccagaaaaagtgaggccttgatatatcttattttcttctgttgtgctaatgaattggagtgcctctcatatacaaatttaat

SEQ ID NO: 1244557 - DNA, 4001 bp, Homo sapiens
tggaaaaacagaagatccagctcctgagactatcataaccaccagattttctagctccagagagaaaagggcttctgcctgtgccattaaaattcacctgttttaacaggtatttcaagttggcaaacctggggcttaactctccttggcataaagggagccacagatcacgaggaacttctcagcaaactgtagagatgggaacagcccttgtgccctgccctggggcctccaccaaggcatcaactctggtgcccttgcatcctagccttgtactctggtctctctagaatactctgccagaggccaggtgcagtggctcaaactataatcccagcactttgggaggctgaggcaggaggattgcttgaggccaggagttcaagaccagcctgaccaacatgggggaaccccatctctactaaaaacacaaaaacacaaaaaattaggcggatgttgtgtcatatgcctgtagtcccagctactcgggaggctgaggcacgagaatcccttgaacccaggaggcagaggttgcagtgagctgagatcatgccactgcattccagcctgggcgacacagtgagactcttttctcaaaaaacaacaacaacaaaaaaagagaataccctttttgccaggccttcctgtctcttctgcccaggaggacatgtggggaccagtaagcaggtgtttgccccattagcaagcctgacttatggaaatctgagtttgcaaaatggaaaaattagccgactattctttgttttacaaaataacccagctgtaggatctgtaaatagtcatcataaaagatagtgtaaaatctgatttgctttaaaaacaagcaaacaaaaaaggtgatgtgatatccaaacttcccagtttctcaaagttgcaaagaacaagatatctacaaccgcctgcctgtgcctcaccacagagggctgaaaggggttgggggagtgggggcaggtgcttgggacttcaaacagacccagcatttagtgacacatggtgggccctgcagttagctcgtgcaggttcctgagctggccgagctaagggctgggcccttgccctggggccttgcaatccagggatgatggaaatcagcccctgaggatgccagcttcacctctgctgtttgcacagctttggggccatgaaaggcctcatgggacagcctgccaccccctgtctttggtggccagcgctatagcatgcacatgggtgtcccaggagaggcccctccataccagctgggttctgtgagctgctctgaagggctttgcccagactgagccaggcccctcctgagctgggtcaagttaaccattgactggggcagaggtggaggggcagggggacagataggggaagcaagtcagctaatatgttgtaagacaaaaccccagaactccctcccccatccctctgcagggccccaatggcacttagggggcctgcaggatgagacaggggtaccctggataggaatggggagatgttcctaccagacagctggaaaaatgctccagactggggggtcagaagggtgggctccagttcagcaagggttaacagaaaactactcagcaggagctctgttggaggcctggattgactccaagaggccagtgggatgagtcttgagtggagaccaggttagaggcctgggttcctctttcctgctgggcttgtcagccctggaggcagaaccaggtgctctgactggggtctatgccttggtttccccacccaccagccctctgcctgtacctgtaatcccgactgctccaggctggaggtgagacctttcctagagaagcagttgagtgtaggagctgcctgggagggtgagactcgggaagcaagtggtgcctccgggctgctgtatcaggcaaggctcagccaggagaggtgggtaggagcagctgcacgtcaggtgcaagagaaacaggtgcaagagctgttacctgctctgctgcagctcctggagtcaaggtgaacctgaaacccagcccctcccggctaagtaaacagaagcagaggccggctcaagctgatgaatattcatcatgccagaaatccaatcccagcgcccctgcatccacccagaagccagggttctccagggaccgccacgcaggaggagggaatcccaagggagatctggggtcagggagcacaggaggctctcgctcagtttccccactcttgggtgtctggttgcacttcccagctatagccagggtcaccccacccatttcatcttctgaggaggcgcagacccctctccagcatggaccaccacctggatgttgcccagggcacaaccaggaaagagttaagggctgctgcttccattggcaggctgggtaggacggggtgcaccccagcttcctttgaactccctgagtcgaaaccagtcccggttaaactggttggcagaccggttcccaggctgtccctcccctgcctcaagcctcaaagtggggactgggttgggggctgtggcttcctcctgacctgaagagcccctcttcaaaaatctccctagggagaaaaaaaaaaagggcacagcctctcctcgggccaggctctccagacccaccacaacctcaaacattgtcatccctctcccactttgcttggaggtgggcttcaaggcccttgagatcttatgcagaattccgtgtttgtgggcagaggggcattgctttttctgcatagattatacttttatcagactctcaaagagacctgtgccagtgtccccactagcaaagtgccactggcttcaactcctcccagatgtccagcagtctattgaaagggccttcctgggtattataaagttggcaaaacctggagcaagttctcaaggaaaggagagatgggtccctagtgagtctggaagagaaggaagggcaagaaggcaggggatgggcacacggttggggacaggggtagagtgtgtgtgcacaggggccttcgtcctcaccgatctgcagtctcattgcccctgcaaacccaccattggccaagctgtgtgcagcgctcagccagggctgctcttgcagatggctccgtgtctggggagcgttgttttgcagccacccggaggtggcctgtcctatttgcgcttgcattctctctcccctcggatgggcatcgctggagagtggaaaacatctgctacatactcagtgtctctgccacttcctgggcccagtgctaccagcttaggtgcccaatccacccaccagctaccttcctccatggaccaggtgtgcgtgtcaggcaaagggtgaggcacggggtagagaaaaggcataaaatcccccctttccctggctctccctctaagttacatttgaaatcccagctcaccaactcttaaagctgtcccccatttccaatcctgcttctactcgctccagcttctgatggcctcttgggtttgtattctcctccatctgaaatagccccccttcccttaaaatgtccttgggtggacagtcctccaaagcctccccacagcccacagcagaacccgcttggcctggctctcctaggatggggcctctgcagcctcctctcatgcacacccacccctgccaactctccctgaacactaggctcttctctgcctgcctttgtaggcatgaggctgccttagaagggtgagattaggagtgctggctgtgctcttgggtaacaatgtcccccccatcacctgtgcgacccaagagaaacttcttttcatccctcagaacctgaattaatgatcacacctcccaccccgccaggagttttcttgtttccccttctgtgttcccatagaacctgctcatatacttctatttaacatgatatatataccatgattggtttccacttacagacttttagctcttagagcccagaattatgtatcactgatccagaccagacatacagtaggtacttatgcaagctcgaaaacacaaatgagaaac

SEQ ID NO: 1244558 - DNA, 4001 bp, Homo sapiens
tctcaaaaaaaagaaaaagaaaagaaaagaaaaaaagaatgggttgtgtttattgagcgtttactacatgcggacaacaaattgtggagacatttactcctgtagctcaaggacgttgagcaacttggccacccagttgattccaggtgtgacccccagagctggggccaggagtccactgagctgtccccggcctcacccccggcccctggacccacctatgtgtcatcactgaggacccaggggtgaggggtggcagtagctcctcagggtctccttctgtctggattccttgaacccctctccgcctcctccgagctgaacaacattctctctccacccagtccctgcttctcctgacctcaggatgcccactattggctgagtaaggctcagccttagagctatatgcacatgcatgcacacacacgcttgcacacacccccacttgcacacacttgcttgcacgcacacacttgcttgcacgcacacacttgccttcacaacccgctcgcacacacgtgcacgcacacccttgcacacgcacgtgaacacacacttgcacacacatatgcatgtacacagccttgcacacacacacgcatgcacacagacacccacttgcacacacatacacacacacactcttgcacacacacactgccgcacacggtttcccccattctgtctcctgactctgcccctgccagcctggatgggggacacacccttcgcctcctccaagggtcaaaatcctacctggctttcaagggctggttctaagatcctctgctcctccaaggagcctgtccccatcccccaaccctatgtgcacttgtgctttgtacctctccatgtgccatcacagccaacctggctttgtatccctaaccattcatttattcattcactcgttcaacaaatatcagctgagcccctacacggtgtcaggcaccaggccagacgctcatgatgcatggggcagggttaccagggtgcctaccttcctggagccttaagtccagtgggggaggcactacagggaaacctccttgaaaacaagacctcggtggtctggactttggggggtctcttccccgccccaacctttcatggaggctgaaacatgacagatgccaaacagccccagccagagagacgggctggcttcctgctcctctgtctcccagttcttttcccccctgaacaggaaccccaggtggatccgcatccctggacccacaggtgagcgaccccggcggcccacccacacgcacctgagggcagggcgaggcaggccggggctgcagcgctccagccaccaggcgactcagcagcagctggtgcatctgcgcgttctgcagcatcatcagttccagcaggtctaggaagcggggttcagcaagcccacgccgggcctccgagtccccctccccctgacacccctgtcccgggggtgaagaatgggttggcgggttgtgctgcggggactcccagaggatgtgcgaggcagaagagggtgagtggtggtgatggtgggggtggggtggggggacccgggagtctcaccttccttcacgcggcctggctgcgggggcgcaggtgggacggcccacgagaggggctgcaggaaggtgacccagggctgggggtgtgcgcggagtcagccaggtggggtggggggaatggatggggacacgtcgcgagccccaacccccccggccagtggcctccctaaccccgcaggggccaggttctctcctccccgccccgcggcctccctgctccctgccacgcctcttcctctcggtttggggctgtctctcctcgtcccccacccctccaggatctggcccctccagggacagctccccactctgccgtctcccaagctaaggcaggatctgctcccgggctcagccctcaccgtcgggactgcgctctgcggtggggagcgaccccagcttccgcccgccccagaggccatggctggcgccggttgccttggcgacgccgaggacgccaaggtctcttcccacgcatgcgcggagcccgcccgtgctcctgggtcttccatctccctgctccctcctgtctcctcctccgcggacttggggtccccaggagccctcccccgccaccaggaggccagtctcctccccggcatgtccacctcccgccgcgctgctcggggctcccctcccctccccttgctggttcccagaactgggcctgggttagtgcggggaaggggggtgtgtttgttgagtgaataagcgagtgactggggaggcttggtttcggggtcccagagcccgattgactcagctgaaaagttcaggagaaacagagacttttgcaggagcaggctgggggctagggcagacgagtgaggaggacaaagggtctgttccctgtcactctgacagagagaggggcttcctgccaggaaagagtggtttctggagcagaccaaggaaggaaacaccgcccgaattcacggaagaggctgaggactctggctggaaacacgtggccggcttctcgcctctctccttgcggctatttgccctgtttcctggccaaggtgagccactgctcctcagacgaggaaaatcgtggtgacttcagcacccgcgtccccagtactgtctcccgtactggaaaagttaccaaagcacgcgttcttttgacaggaagttagcaaggtcttccttgcttaagaacaggtgaagggggagatctatttctgcagctgtgaccatcctaagataggcccccggcagcagtcaaggaaaatccagacaggaagctgggcttagcaccccgagtagcccttcccccactctccatgtcagctccccttcctgccagtcctggagtaagaaccagaaagaccattcccacctcctcctttgctccgtagtacctgtctctaggggagcaggcttgtgggcattactttactgtccccatgggtcttatggcttcaacagccattaacaagctgagatccaggcactggggtcacagccccccagtgagtagaacacagagatgcctctctccatctccattctcattccaggtagaaagagaacaagccattttgctcatcatcaacaaaccttgaccaaggaagtgtctgcgtgtgcaatgtgccatctgaaccctggaggcataagcagtatggtcacttgtcccagcattgttgggaagtgaaaatgtatccatggaaagagagcagaaagataagactacgccccggggataatgaaaaagagaggacttgaccgctgagggatggagttccaaggaagtcagtccttgatggggccaagcagcaggggaagacgggcgctatcaggctggggacagagcccaagccaagacccaggtgtatgaatggacaggacctgagatgacccggtgggtcaaactgtctgactgtagaagaggagctgggcagagagcagaggtccagggacaggccaaggtttggaatgccaaggtttggaatttaggcttggccctgtgggtaatggagagctatcagtgggtttcaagcaaaagggagataccaagtgctgtggccagccatgtttcaggaagattgttcttgtccacctttgtttatgtcaaccacatttagaagtaacaaatgtctgatagggggtcaggtgcggtggcttgtgcctatagtgccagctactcaggaggctgaggcaggaggatcgctcaagcccagggattcaaggatgctgtgagctacgatcacgtcactgcactccagcctgggaaacagggtgagacccagtttctaaaacaaacgaacaaacaaatgtctgatggggatgcatcctcccaatagaatactattcaaccatggataatgtgggaatagaatatctctgttgatgtgaaaagttgtccaagacagttgagtcaaaaatatcagtaagcatagtaagatcttatttttgttttaaaaatcatatgca

SEQ ID NO: 1244559 - DNA, 4001 bp, Homo sapiens
caaacgcagtgagaaaagccctctgaagaaaaggaaatggtgtgagaacagcagtgactgcagaagggaaggctcacgggagacttcactgacaggaaccccaggatgtcattctctgactctaccagacaggaaaaaagggcaggctgggtgagatctcagtaagtgttatgttcttgagactcagggagttttaagagaaatgagaacattttcttttattctttctttttttattttgtttgagacagagtctcgctctgttgcccaggctagagtgcagtggcacaatttcagctcactgcaacgtccgtctgtcaggttcaagcaattctccagcctcagcctcccgagtagctgggattacaggtgcccaccacccagcctggctaatttttgtatttttagtagagacagcgtttcaccatgttggccaggctggtctggaactcctgatctcaagatatccgcccacctcagcctcccaaagtgttgggattacaggtgtgagccaccgcgcccagccgaaatgagaacattttctgacaggcatccacccacgcttgtgagctagtctctccaccttctaggaaacaaatccaggacctgctgctcctcaggcaccagtaccctgcaggacctgccccctgtgaccacgtattccctcctgaaaacctatcaccgttcttttcctctcttattcttctctggcttctcttcgcccctcactgctaaatgtaacgttcagctctcaaactgccgctcattatttccctccctacagactttgtctctccagaatctgctcccatagatttggcacattgccaatgcttccccaaccctgagatgtaataacaaaaccccaactgcttgcaagatgtttctattgggcttgtcttgtctgctcaaaattgttgtcaaaatcaaagtcaggccaggtgtggtggctcatgcctgtaatcccagcactttgggaggctgaggcaggtggatcacttgaggtcaggagttcgaaactagcctggccaacatggtgaaaccctgtctctactaaaaatacaaaaattagccaggcatggtggtgcgcgcctgtagtcccagctacttaggaggctgaggcacgagaatcgcttgagcctgggaggtggaggttgcagtgagctgagatcatgccactgagctccagcctgggtgacagagcaagtccctgtctaaaaaaaaaaaaaagaaagggaaggacatgttttttggaggcggcaaagtctcaaactcactggtggtgtgtggtagatgactgacaccttggccggtcaagacgccggggttggatggtccaagaagaggcctgggtgtgggcggggacccttgaaacttacactgtctggacgtcagtggcgagcccggccagaccgatgtacagccggtcacccatgggaaagatcttctggaagtccgtggtcaccatctgggcctggatcccgaagcgcctgtctgcagcgatggccacacagttcttccccttcatggccatgacggcccctccgttataggacataatagactaggacagacagagcggaggggtcagcgcggggggtcaaacgctgccacagcccccggcccagctcctgatgcggaggctcctgtacgcccgttctccattccggaggcgtctgaacccctggttctccagctgggatgagcactgtgtggcggcaatgagccgcactcaccctcttggtcctcaccggggcccgctcccctcgaactgaaaccgcttccttccatcgaccctaggcccttttcgtccccaagcctctcctgaccccctccgcttctcaatccttccccatgcccctttgctttaactccccatctcaccatgattgcggtgtactaggatccctcgatcgccagagcaattccagtaaaccgggtctagccttcactgcgcaaccgctctcactgctgtctcttcattggctgataggcggactcttcctggacatctgggctttctattggtcacacgtccctgtcggtcaccagtacaggtagtttggttgcaaagtcaaaacggaggcgggaaaagcggaagtgaaaagtcactgtggctgcggaagagacttgcgacacggtgcatagtgggatctcggcggacctggactcgggacctcagggactgggggcggagcctgcgcgcacgtgggctggtgaaactgggtttaggaagctgcggccccagctgaaggggcaccgtgacgcttatcaacgtgatgtatgagttcgtcgtattagtcgtgctagcttatttattcactccagaaatcctgcgtttactgtgtaccaggcacttgcctaggctcggaatattcactggcccacaacagtgcctagtatataggaggcgcccattaaatggaaatttaatgatgcaggtgggaaggggaaggcgtcgcgtgtaggcgtcgcgggtattttgcggctgcaggggttcagctgtgaaagggagtttggaagccgaagcttgttctgatttgggggacttcctgcggcccgacttcacgtatcctcaatctcaggtcaccctaaaaagggacgttccgcgcctctccacgtttgaggtagaacctgaggatagccagagtcgacctctcgccgttccaatggaggaagggcgtgcacgtcccgcgtcctctcctcccaagctctttcgcctccctcccccatcaggatccttccctttctcccccgggttccacttatttcgcccgatggcggcatctcttacggcgtctgcgccgtccaggctcgctcccattgactcggctcactactacgccggtagtcgactcggtctctgtggcgcaatcggttagcgcgttcggctgttaaccgaaaggttggtggttcgagcccacccagggacgctatgaccttttttttttttttttttgtcttttgggttttttttttctccccggaagataaaaacctaagccttttactcaaaagccaaattttgcattgaaatggcagcagcaatactttttctaggagaatcactgttcttgaaaattctttgctgctcagtcaataatgggataatttctccagcacttccctccacacccccccaacccgcctccaagctagatcgcaggaaacctaaagacacaggtttttgtctcactgtgcatgcaacacgtttcaggatgcattttttcataggattaagaatgaatttacagtggaggttcgacagttttctattgtctgcctcaatcgatattacagtctccaaatactacatttggaagggaagagaatgagagagacacagagagagaaacaagtatgaagagaaacaaaggtgagaaagggagaacattgttgtgatacagggaaagaagggacgtgacagaactaggcagggtgggtaggggaagacctcaagacaatggagagtgggaaaatagacgcatttaatattagaagcatcagaaaaaaaggaaaacaacacattttttccccctagaactacacagggaggtgggggaggaagatggggaaatagaaggagaaactgactaaggaccttgtttgggggagataaaaggtataaaggacacagaggtaaagacgttccggaaagctctagaggagccgccctctcctgtctcgtcaccatttttaaagggatctgatcctcgcaatagctcttggtatatgctggaggtaattgcctagatttcccgcgttcctgtcctctgcgagtctctggcttgtgacagccactgtgactcttctgatgcacttgtcagctagaggaccgcgtgagatgcaaacacaaaatcaaggggcgcctaatgtctgacgaggcgcattcctgggcgcagtgggagcctcgacctttgtggaggagaatgtgcaaagcactcttgagcagttctcatagacacttggtctctgcagattcggctcaaaggaggcctctt

SEQ ID NO: 1244560 - DNA, 4001 bp, Homo sapiens
tgaattgcagacactcttccttggtcatgccttcccggtaggtagcatcaacatagccatagatgtaggagctcccggagcctccaatggcaaaggactgccttaccatcataccccccataggcactgagtacacctgccagatagaaggagaggagtcaccagtcgtatcctccctccaacacacgtacattcacctgtccattctgctattggtctgaggcacgttaatagtaagaataagtgaggtagagactggaaagaaaaagaaaatggctggggagaggataaaagtcctggctcaagtgtgctctggtcgggtggggatctgacctgccctccttcttgagggtcccagcctgcgatgatgattcccgccatcaggtcttcccggtatcggtaacacatctccttaaagaggctggctgctgtgtggaccagtggaggctcattcagttcaatgctagagggtcagggaagtcacagagaaagtttcaagacctagaagtcaggctatttagctcctcagcttccaactcccttcagatacttgcccctcccctgcccacaagcacctgtggaaaccgagctggtaggtgacagcatcagctactgcctgggtatcagcagctgagcctgagcgacagcagaaaatgcggtcgtgaataggtgtcagcttgtcagtcactcgattggcgatgtaggacctgcaggatggcagaatagtgaggaaaggagcccacctgtcttccacctccatcccatcactacccactctcttagggctcagggataggatgtccagtattgcctttttttcctttttctttgagatggagtctcgctctgttgcccaggctggagtacagtgacgcgatctctgctcactgcaacatccacctcctgggtccaagcgattctctagccctagcctcccaagtagctgggactgcaggcacgcaccgccacgcacggctaatttttgtattttttagtagagacggggtttcgccatgttggccaggctggtctcgaactcctgacctcaggtgatccacccgcctcggcctcccaaagtactgggattacaggcgtgagccaccgtgcctggcctccagtattgcttattctcatccaaactgaagcgggctggagaacagacttttgtaaggattccactaacgagtgaggggaactgaaagtaacaaaagttgggacaaatctttatctccagagagagaagaaacctctcttcccacagtggtctgtggaggcaggcagggtgggctggcaggcaggaaaggaaaaggaagatgggaagacctttcacaaatctgtcctgagctcacccagtggttgttctggagtccgcccccagaaccacgcccccgtcaaactgcacggccatgatagtggtctgggaaaagggaaaaaggagtaagtctacattctccagcagacacaaacctcaatgatctctctacctagttccaaaaatacaaaatctgtccgtcgctgaaccattttcaaatcttataggggcctcagcaccccgcagaataccagaatgccaaccctcaaatctcaaaagactcatcccgtacttaagcccaagatcctcactagcctcgcaggatttcagaatttcaaacttcagcccaccctccacctcccactacgaagctaccgcaccactccaccatcttcggggtacctctccccattcctggagcacaacacattccacctcctctccacccctgccagatctctcaaccccactcaggctttatcttcccatcgcgtcaggccttgtgcacgtcctatgaaccccgattccttcctcaccccagtggaaacttctcggctttcccagtctggagtgaacgcctccggcccccaagccggtgctggcccggctccccgagcagctagtaaggtagccgccatctttctcctccggtactgcctcaaagcaactgtcgtaaagcgctctgtcacgctctttggtcgcgctttgaggccttctgggagcgaagctactccgaggttgacggcagaagggaaaagaaaagtacagtactgcatggggacggttcttttgcgacagtgagcacttgatggcagcgtggcaagcaacaaacaaaacaagaaagtcagcaaaaccccccccccaaaaaaccaaaaaaaacccaaaaaccgttcggcactttgggaggctgaggcgggcggatcatgaggttaggagttcaagaccagcctggccaacatggtgaaactccttctctactaaaaaatacaaaaattagccgggcgtggtggggcgcgcctgtaatcccggctactggggaggctgaggcaggagaatcgcttgagcctgggaggcggaggttacagtgagccgagatcacgccactgcactccagcctgagcgacagagcaagactgtctcaaaacaaaagcaaaaacaaaacaaaacaaaaaacagtcctagtggcttgcgccgtaccgatcttatggagttacagtccaaagggcccacaaaataaacctgagagtctttgggctaaagtgaccacaccatgttttcatttcttttagttatatacttaggagtatatgctggcagaggaatttatgggttctatgataactgtatgtttaacattttgagcaaccgacaaactgttttccacagaaactgcaccattttacatccctacaagccatgtgtgagggttccaatttctccacatcctcaccaacacttgttattgtgcatttttttagttatagccattccagtgggtgtgaagtggtaccctgtggttttcattggtatttttctaatgattagtgatgctgagcatatttccatgagataattggccatttgtatgtcttttttgatgcaatgttttttcaagttctttgcacattctaaaattgggatatgtcttttgtttaatatatttttggggtttaattttttttttttgagacgagggtggggtgtgtgtgtggggtgggtttgtcttgcggtgtttcccaggctggagtgcagatgggatcatggtgcactatatcagcctcgaactcctgggctccagtgatcctcccgcctcagcttctcaagtagctgggactacaggtgtgtgccactgaacccagctctatttgtctttttttttttttttttttttttttgagacggagtctcgctctgtcgcccaggcgggactgcggactgcagtggcgcaatctcggctcactgcaagctccgcttcccgggttcacgccattctcctgcctcagcctcccgagtagctgggactacaggcgcccgccaccgcgcccggctaattttttttgtatttttagtagagacggggtttcaccttgttagccaggatggtctcgatctcctgacctcatgatccacccgcctcggcctcccaaagtgctgggattacaggcgtgagccaccgcgcccggcctctatttgtctttttatactggtgtgatctcggctcactgcagcttccgcctcccgggttccagcaattctcttgccccagcctcccaagtagctgggattacaggcatgcgccaccatgcccggctaatttttgtatttttattaaagagatggggtttcgccatgttggccaggccggtctcgaactcctaacctcaggtgatcctcccgcctcggcctccgaaagtgctaggattacaggcatgagccactgtgcctggctctatttgtctttttattgttgagttgtaagggtcctttttaatattctaggtactagaaacatcagatacatgatttgaaaatattttctcccattggattgtcttttcatgtccttcattggtgttctttgaagcatgaaagtttatagtgccagctcttacatttttaggtctgtggtccattttgagttaatttttgtatgtgatgtgaagtagaagtccaaatccatgcttttgca

SEQ ID NO: 1244561 - DNA, 4001 bp, Homo sapiens
gtaagggccaggctgggcacagtggctcatgcctgtaatcccagcactttgggaggccgaggcgggtggatcacgaggtcaggagatcaagaccatcctggctaacacgatgaaaccccatctctactaaaaataccaaaaaaaaaaaaaaaaaaaaattaggcttcgtggcgggtgcctgtagtcccagctactctgggaggctgaggcgggggaatggcgtgaacccaggaggtggagcttatagtgagccgagattgtgccactgcactccagcctgggtgacagagcgagactccgtctcaacaacaacaacaacaacaataacaaaaagagataagggcctgaaaaagaaacaattagctcggagcattcaaggaagatttctggaaaaggtgatgtctaagtgaaatcctcaaggaaagaaagagctggccaggaagagaagcaggtacagggaagacaacatgcaaaggacagagcagtaaaacacaccagaattatctagtgttcgtggatagaaaaataatgaggattggtgaggccagaggctggctggggcgtcttccggtgccttttacatgttttttgcagcactagagagccattgaagagttttaaatagggaaggtgcatgaccagatctatttagacagatcattctgactgcaatgtttaagagtttaagatatgtttgaagagccaagatctgttaggaggatactgcaacaaataaagagggcgtgaactagagcaaccatggcagatggaaaggagagtggattcaagaatggaaaaattagccaggctctgtggttcacgcctgtcctcccagcactttgggaggccaagacaggaggatcacttgagcccaggagttgggaccaacctgggcagcacagtaagacccatctctataaaaattaaaaaaataaataaaaacggaaaaatcagctggacttgatggttgactagtaaaggaagtcaagaattgctcccaatttctggtttgggtgaagagtaattccattaggggaggagaatgttagaaagaaaccagtccggggtggggggaagatgaggcattctactgtggcaattttgactctgatattaatgcctgacagattccagctggaggtctgggctggagaatataaatttgatatgtgtgtttagagaatcggatggaggcaggaggaacatcatttggcagagggtgttgctaatgtagatgataaggaataagagctttggagcggaaatggatcttggtagcaacaatacagaatcttctgtcatccatcatattgtaaatctggaaacctcgtgaagttgggatcctaacaagaggagtacacaccttgatttaaggatggtggcctaagacaggtgagttttccatggggggccttgtccccaaagagttcacaccaggagtagattcacccgttgtcgggctctcatgggtgacaatcggcgcaagttctcctcacctgatccgcaaaatagatcttctgcttgccgtacatcttctctttgatcttgccttgttgcgccagctgctccagcgtcttcaccaccacctggcagaggagagagaaggagcaatcagaggagtctgagcctgggtctggggaaatccagccagtgatgtggaaaacgcccaaggctccaaagggcacgaccccagcctgaatccagggagtccgacggagagggaatcccgggagaaggtcctcaccgccttgcccagtccgtgttcccgctgtaggttcccgaacacatcctgggagctgtagggccggttctgctcctgcaggtacctcaggaggatcccggcggctacggagagaaaggcaggggagggggccactcaaccgacctcctcacccactgccctcccgggtcttccccgcgcccacggcgccgttacctcccgccgcagcttctgcccggcctttactcatcgcctttcccgccacccaactcagaaagccggacgttgtagttgctcggggcgacggctccttccggcgacgggggcgggcctcgaacggtgattggctgaaggggaagccttccggaggagcaaagcgacccctcccggactccatagttcatttcaggtcggaacttgcgcattcgggccggacctcaagccatgggcctctgcgaaggcgccggcgtgcccacggctaagaaacttcctctttctgctcccgggaacgaaggctgtagcagagaaggccttcaagtttcgagacccagttccagccgcagctgagcactggtgaccttgaattaagtctaatgttgggattggaagacgcttcagacatccgctgccgccctgggcaagcgaccagctcaaggttaccccacagggacgtgctctggtcccacggtccagtgctcttttgtcggttagttttgtcatttgtaaaataggaacagtagatagtggtaggaaagtggttgtgaaaacttaatagaaagctaagcgccttggtcgggcgcagtggcatgtcacccctgcaattctatcactttgggaggctgaggcgggcggatcgtttgagcccaggaattcgaaaccagtctgggcaatatgaaaccccatctctgcaaataaagtacaaaaaattaagagtggtggcgcgcttctgtggtcccagctactctggaggctgaggtgggagggtcaccagagccccggacatcgaggctgcagtgagccactatgagcgcgccactgcaccccatcctggcgacagagcgagacgcagtctcgaacaaaaaaaaaaaaagtgggaaggggggacagctaagcgccttggagagcaaccacccttatttgcctaataccgagcttcgcacccagggggcactcgacacctactgtagtttggacgccaaggaacgatagggttaggagggggctactgttcaaccacaaagcttgtggaaaagtttgttagcccagacaatctcagggcaacacctggcaggtgctttccacccctgaccacagtggccaatgggacagagcctgaaataaatatttctagtttctgaggtgagctgaaggccaaagagcagctgtccctgcagctcagaccatccagtgaaggagtaaggtgctactttttaaagccttctgctacctacaacctccttagcctttaaaacgtgtgcttgtctctgcacgtttaggagacaatattaagaattagaaatgaaagggccgagcgcggtggctcacgcctgcaatcccagcactttgggaggccagggcgggcggatcacgaggtcaggagatcgagaccatcctggctaacactgtgaaaccccatctctactaaaaatacaaaaaattagccaggcgtgctggtgggcgcctgtagtccaagctactcaggaggctgaggcaggagaatggcgtgaacccgggaggcggagcttgcagtgagagatcgcaccactgcactccagcctgggcgacagaccaagactccgtctcaggaaaaaaaaagaaattagaaatgaaggaaatacaggctaaatactagccaagagtgccagttatactgatggtggggctctcacaagaaggaaagtagcctcatactatggtgatgttctggccatcacgaagtaaaaataggggtgggctggtgggtccctcatacctgggcttcctcttttaaggctatcacttcaaattaatcagaactcagatttacaagagaagacctatcaagggtaggacaccattcagcatcagtctcttaaagattgttctcatacaagatttattccccagcacacccctcccctcctcagttcacagtggagactatggagattcagggcaggatccctcaggtacaagaaacaccttccgaagattttgctctccttccttccctccctcttgccaactcccaaggcctgaagcgcacactcatgcaaacacacgaaatccccctccttcccca

SEQ ID NO: 1244562 - DNA, 4001 bp, Homo sapiens
ccccatctctactaaaaataccaaaaaaaaaaaaaaaaaaaaattaggcttcgtggcgggtgcctgtagtcccagctactctgggaggctgaggcgggggaatggcgtgaacccaggaggtggagcttatagtgagccgagattgtgccactgcactccagcctgggtgacagagcgagactccgtctcaacaacaacaacaacaacaataacaaaaagagataagggcctgaaaaagaaacaattagctcggagcattcaaggaagatttctggaaaaggtgatgtctaagtgaaatcctcaaggaaagaaagagctggccaggaagagaagcaggtacagggaagacaacatgcaaaggacagagcagtaaaacacaccagaattatctagtgttcgtggatagaaaaataatgaggattggtgaggccagaggctggctggggcgtcttccggtgccttttacatgttttttgcagcactagagagccattgaagagttttaaatagggaaggtgcatgaccagatctatttagacagatcattctgactgcaatgtttaagagtttaagatatgtttgaagagccaagatctgttaggaggatactgcaacaaataaagagggcgtgaactagagcaaccatggcagatggaaaggagagtggattcaagaatggaaaaattagccaggctctgtggttcacgcctgtcctcccagcactttgggaggccaagacaggaggatcacttgagcccaggagttgggaccaacctgggcagcacagtaagacccatctctataaaaattaaaaaaataaataaaaacggaaaaatcagctggacttgatggttgactagtaaaggaagtcaagaattgctcccaatttctggtttgggtgaagagtaattccattaggggaggagaatgttagaaagaaaccagtccggggtggggggaagatgaggcattctactgtggcaattttgactctgatattaatgcctgacagattccagctggaggtctgggctggagaatataaatttgatatgtgtgtttagagaatcggatggaggcaggaggaacatcatttggcagagggtgttgctaatgtagatgataaggaataagagctttggagcggaaatggatcttggtagcaacaatacagaatcttctgtcatccatcatattgtaaatctggaaacctcgtgaagttgggatcctaacaagaggagtacacaccttgatttaaggatggtggcctaagacaggtgagttttccatggggggccttgtccccaaagagttcacaccaggagtagattcacccgttgtcgggctctcatgggtgacaatcggcgcaagttctcctcacctgatccgcaaaatagatcttctgcttgccgtacatcttctctttgatcttgccttgttgcgccagctgctccagcgtcttcaccaccacctggcagaggagagagaaggagcaatcagaggagtctgagcctgggtctggggaaatccagccagtgatgtggaaaacgcccaaggctccaaagggcacgaccccagcctgaatccagggagtccgacggagagggaatcccgggagaaggtcctcaccgccttgcccagtccgtgttcccgctgtaggttcccgaacacatcctgggagctgtagggccggttctgctcctgcaggtacctcaggaggatcccggcggctacggagagaaaggcaggggagggggccactcaaccgacctcctcacccactgccctcccgggtcttccccgcgcccacggcgccgttacctcccgccgcagcttctgcccggcctttactcatcgcctttcccgccacccaactcagaaagccggacgttgtagttgctcggggcgacggctccttccggcgacgggggcgggcctcgaacggtgattggctgaaggggaagccttccggaggagcaaagcgacccctcccggactccatagttcatttcaggtcggaacttgcgcattcgggccggacctcaagccatgggcctctgcgaaggcgccggcgtgcccacggctaagaaacttcctctttctgctcccgggaacgaaggctgtagcagagaaggccttcaagtttcgagacccagttccagccgcagctgagcactggtgaccttgaattaagtctaatgttgggattggaagacgcttcagacatccgctgccgccctgggcaagcgaccagctcaaggttaccccacagggacgtgctctggtcccacggtccagtgctcttttgtcggttagttttgtcatttgtaaaataggaacagtagatagtggtaggaaagtggttgtgaaaacttaatagaaagctaagcgccttggtcgggcgcagtggcatgtcacccctgcaattctatcactttgggaggctgaggcgggcggatcgtttgagcccaggaattcgaaaccagtctgggcaatatgaaaccccatctctgcaaataaagtacaaaaaattaagagtggtggcgcgcttctgtggtcccagctactctggaggctgaggtgggagggtcaccagagccccggacatcgaggctgcagtgagccactatgagcgcgccactgcaccccatcctggcgacagagcgagacgcagtctcgaacaaaaaaaaaaaaagtgggaaggggggacagctaagcgccttggagagcaaccacccttatttgcctaataccgagcttcgcacccagggggcactcgacacctactgtagtttggacgccaaggaacgatagggttaggagggggctactgttcaaccacaaagcttgtggaaaagtttgttagcccagacaatctcagggcaacacctggcaggtgctttccacccctgaccacagtggccaatgggacagagcctgaaataaatatttctagtttctgaggtgagctgaaggccaaagagcagctgtccctgcagctcagaccatccagtgaaggagtaaggtgctactttttaaagccttctgctacctacaacctccttagcctttaaaacgtgtgcttgtctctgcacgtttaggagacaatattaagaattagaaatgaaagggccgagcgcggtggctcacgcctgcaatcccagcactttgggaggccagggcgggcggatcacgaggtcaggagatcgagaccatcctggctaacactgtgaaaccccatctctactaaaaatacaaaaaattagccaggcgtgctggtgggcgcctgtagtccaagctactcaggaggctgaggcaggagaatggcgtgaacccgggaggcggagcttgcagtgagagatcgcaccactgcactccagcctgggcgacagaccaagactccgtctcaggaaaaaaaaagaaattagaaatgaaggaaatacaggctaaatactagccaagagtgccagttatactgatggtggggctctcacaagaaggaaagtagcctcatactatggtgatgttctggccatcacgaagtaaaaataggggtgggctggtgggtccctcatacctgggcttcctcttttaaggctatcacttcaaattaatcagaactcagatttacaagagaagacctatcaagggtaggacaccattcagcatcagtctcttaaagattgttctcatacaagatttattccccagcacacccctcccctcctcagttcacagtggagactatggagattcagggcaggatccctcaggtacaagaaacaccttccgaagattttgctctccttccttccctccctcttgccaactcccaaggcctgaagcgcacactcatgcaaacacacgaaatccccctccttccccacacctcctgtctttccacatcagagctctgaacttgagaggtgtcaaaagtctgtttgagaagcctaaagtggggagatgccattacccctgaccaccccactatgagtgactat

SEQ ID NO: 1244563 - DNA, 4001 bp, Homo sapiens
aaactactagatgatgacagggagaaaacagtaagcactgctgtgaagacacagtgcagggagataaggacagacctcagacaaactgcccacatgcggcttcccatctttctccactcacctttagcatttagttcgttcctctgtgcctgcagcctccggaggttttggctcttatcattcacaatcagctgtggcagacaagagacaaattccattattcaagggcaggagacaggaggaggtaggatcttggccaagacctcacaggtctgaatgagctgagggaagggcacagggcacctgcatgttgtttcagattctccagtatgatcctaatgaccctgccctgtccttcaagagtccctctggaccttacagcagccatcaaagaaggctgcttgtccaatactggtccaggagtaacagaatctaatggagaaaagttacagctggctcatgtaacaccaaatttcttgcaggaaggcaacaacacctggtggaaagattgttaggtgagaaacctgagttctagcccagccgctgtcaatcaaaagcaaagtaaaggtaagacaatctatttttaaaaatctagatctgttaccaaacggcacatgggtatagcatcagctaccctgcttcaagactactaaggtgaacgaataaaaacacatgaaaaagcattcaaaaatggtaaactaaacataatacctgcaaatgcacttggaattcagaattgtcttttgtggctttcccccatccaatttatattacagttgacacttgaacaacgcagggggttagggtgaaattgaaaatccatggacctgtccaaagttaaactactaacagcctaccgtaacagtataacgtaacactaacagactactgtttatgttgtctgtaaggcttactactggaagccataccttactgctggaagccttactggtaacacaaacatttgattaacaacataaacggtcctttttctatggtttagcgctttaggctagggctctgggttgcccaatttctttcattcagtctctatggaattagcattgtccagatccctcaatgatgcccttcctcacattctcacttcaccctcacccaacctcttggtgataaatttcaactcctgagcttatgtttcccttttataagaatccttttcattcgggcttcttccaaaagggttgacctttggctagaggtacctttactattaagatttgactcgaagatgtgtaacaaactgtgaacactaagaccctcaaagagatgggactggaggagaacaagagattgcttacttctgatacatacaccctactagctaagaaacaaacaagaaaggagaagcagcagcttcttccactgcactcccaaaggaattagatggatttgtggaagtccgtttccatcccccatcatcacccttcctagctccctctggagtccgtcctcacctggagttcttcaatcttggacagataatattggcggagtccgctgcctgccttcccctcctccagctccatctgaagacacagagtgagtcttaaacgacaggttaaacatccgagggggtaaagccacttgcagggcactttgaataaggcttgacaccaggtagctttgcgtagtagaaaaagtttggacttcggaggctcaggatctgggttctaatccctccctcccttggaaccctccattttcccaggactaaaataaaagaatgggaacgccgcctacctcatacgacttttaggaggaccgagaggcgatatgatatagacggggggcgctttgcactgcgtgaagtgctctacaagcccgaggtgtcagtactgacgaaggagccagcggaacggagccaaaggactggcgtcccgtctcctgcgacccgtgggccggccattcccgcgcccatcgcttccctcactcactccgcttctaccgcgtcttcctctcccagccttgccctgactcaccgagggcggcgctgacacagcagatccggtcgcaggcagcgtccagcatggactggtccaggcacctccgacccacccgacgctcctgccccggcccgctctccactcagatcacgctcgctccgcacccagccccgtaacctgccgggccgccactgcacccgccatacctgctctggtccgtcaagcgccatcttctctcttcagcagagaccgccggcatccgagccgtcttggcgcgcaagcgcggaagcggaggattgggacctgaagaccaggcagagaagaattccgggtcaatgggcggggtgtgcggcgagaccacactaagggaaccatgatgggaggggcggctactcgagttcaggggctttggaaggggatgaggaaggagtagaactcctcctcagtgttgcctcattgaaactctgtttatagttcttgtgatatgccttcctagtctcaactttcaacttacaaaacccaaggacagagtattgagaacaatctagggccacactcaaaatggcggaaaacctcgagccagggacgcaggggacgcaagcggaagcggaagtagttagctgcatacttgtgcggttccaagtgtggagaaagcggctctgggtctaggtagtgtgcggagaggggcgcggggtggaattgctgcgggaagtgggaaactggaagtgggaaactggaagtggaatctggtgctccggaaagagacgttcccaacttctactttctccccagattgagggatactccccctttccaccatgggcaagaagggcaaagttggcaagagccgacgagacaagttttatcacttggcgaaggagacgggtgagtccggattcgctcagtctgcgagcgagcgagcgatctctgcccggttcgcctgctctttgcgaccattatgtacctctcctgcagaaggggtggtcggttgcgaggccggagaaatcctactagtgaagcagtttgcgcacttggttgttttgtccaggttaccgttcccgatctgctttcaagctgatccagctcaatcgccgctttcagttcctgcagaaagcccgagccttgctggacctgtgtgctgcgccagggggatggttcgtaacactcgccacaggttgctcctggtggccgctttctgggttctgagctgggatggcttccagtttcactgcgggaggggaacccgaatcccggtcctcttgggggccgtttcctttcttgattgcagagaaagggcttggaatacgtgcctatgatatgctttggccagtacacgtaacaccagggatgagagatcagttgccaagagggggaaaaggatggctctaggtttttaaatttctgttccttttataggctgcaggtagctgccaagtttatgcctgtatccagccttattgtgggtgagtaacggacagctctccttggtgttttaaggggtgggtgtataaggtattttgtcctgtatttctctcctccctgcttgaagcaaccttttagaatactctgacctgatttcttccaggagtggacctggttccaatcaagcctctccccaatgtggtgactctccagcaggacatcacaacagaacgttgtaggcaggtaataggagtctctctcttccttccccctttatacggaaacatctacatccctgaaatcctctaaaggcaagtttttcctttttaccgtgctttgagcacgttcttgcctgacatctgtacgacaagacctatggcattcgtagtgtccactccaggctttatttagagtcagggataaaggtgtttggaattgggagaagggcagagatctttagtgaagtcttctcctgtgaattcagtgtcagactgtaatctccatgaaggtagagacatactgtttttgtttactattgtatctcctgtgcctggtactgcatttggcccatgatgggcactcagcaaatgactagatggacaaatggctgaacca

SEQ ID NO: 1244564 - DNA, 4001 bp, Homo sapiens
gaatgagctgagggaagggcacagggcacctgcatgttgtttcagattctccagtatgatcctaatgaccctgccctgtccttcaagagtccctctggaccttacagcagccatcaaagaaggctgcttgtccaatactggtccaggagtaacagaatctaatggagaaaagttacagctggctcatgtaacaccaaatttcttgcaggaaggcaacaacacctggtggaaagattgttaggtgagaaacctgagttctagcccagccgctgtcaatcaaaagcaaagtaaaggtaagacaatctatttttaaaaatctagatctgttaccaaacggcacatgggtatagcatcagctaccctgcttcaagactactaaggtgaacgaataaaaacacatgaaaaagcattcaaaaatggtaaactaaacataatacctgcaaatgcacttggaattcagaattgtcttttgtggctttcccccatccaatttatattacagttgacacttgaacaacgcagggggttagggtgaaattgaaaatccatggacctgtccaaagttaaactactaacagcctaccgtaacagtataacgtaacactaacagactactgtttatgttgtctgtaaggcttactactggaagccataccttactgctggaagccttactggtaacacaaacatttgattaacaacataaacggtcctttttctatggtttagcgctttaggctagggctctgggttgcccaatttctttcattcagtctctatggaattagcattgtccagatccctcaatgatgcccttcctcacattctcacttcaccctcacccaacctcttggtgataaatttcaactcctgagcttatgtttcccttttataagaatccttttcattcgggcttcttccaaaagggttgacctttggctagaggtacctttactattaagatttgactcgaagatgtgtaacaaactgtgaacactaagaccctcaaagagatgggactggaggagaacaagagattgcttacttctgatacatacaccctactagctaagaaacaaacaagaaaggagaagcagcagcttcttccactgcactcccaaaggaattagatggatttgtggaagtccgtttccatcccccatcatcacccttcctagctccctctggagtccgtcctcacctggagttcttcaatcttggacagataatattggcggagtccgctgcctgccttcccctcctccagctccatctgaagacacagagtgagtcttaaacgacaggttaaacatccgagggggtaaagccacttgcagggcactttgaataaggcttgacaccaggtagctttgcgtagtagaaaaagtttggacttcggaggctcaggatctgggttctaatccctccctcccttggaaccctccattttcccaggactaaaataaaagaatgggaacgccgcctacctcatacgacttttaggaggaccgagaggcgatatgatatagacggggggcgctttgcactgcgtgaagtgctctacaagcccgaggtgtcagtactgacgaaggagccagcggaacggagccaaaggactggcgtcccgtctcctgcgacccgtgggccggccattcccgcgcccatcgcttccctcactcactccgcttctaccgcgtcttcctctcccagccttgccctgactcaccgagggcggcgctgacacagcagatccggtcgcaggcagcgtccagcatggactggtccaggcacctccgacccacccgacgctcctgccccggcccgctctccactcagatcacgctcgctccgcacccagccccgtaacctgccgggccgccactgcacccgccatacctgctctggtccgtcaagcgccatcttctctcttcagcagagaccgccggcatccgagccgtcttggcgcgcaagcgcggaagcggaggattgggacctgaagaccaggcagagaagaattccgggtcaatgggcggggtgtgcggcgagaccacactaagggaaccatgatgggaggggcggctactcgagttcaggggctttggaaggggatgaggaaggagtagaactcctcctcagtgttgcctcattgaaactctgtttatagttcttgtgatatgccttcctagtctcaactttcaacttacaaaacccaaggacagagtattgagaacaatctagggccacactcaaaatggcggaaaacctcgagccagggacgcaggggacgcaagcggaagcggaagtagttagctgcatacttgtgcggttccaagtgtggagaaagcggctctgggtctaggtagtgtgcggagaggggcgcggggtggaattgctgcgggaagtgggaaactggaagtgggaaactggaagtggaatctggtgctccggaaagagacgttcccaacttctactttctccccagattgagggatactccccctttccaccatgggcaagaagggcaaagttggcaagagccgacgagacaagttttatcacttggcgaaggagacgggtgagtccggattcgctcagtctgcgagcgagcgagcgatctctgcccggttcgcctgctctttgcgaccattatgtacctctcctgcagaaggggtggtcggttgcgaggccggagaaatcctactagtgaagcagtttgcgcacttggttgttttgtccaggttaccgttcccgatctgctttcaagctgatccagctcaatcgccgctttcagttcctgcagaaagcccgagccttgctggacctgtgtgctgcgccagggggatggttcgtaacactcgccacaggttgctcctggtggccgctttctgggttctgagctgggatggcttccagtttcactgcgggaggggaacccgaatcccggtcctcttgggggccgtttcctttcttgattgcagagaaagggcttggaatacgtgcctatgatatgctttggccagtacacgtaacaccagggatgagagatcagttgccaagagggggaaaaggatggctctaggtttttaaatttctgttccttttataggctgcaggtagctgccaagtttatgcctgtatccagccttattgtgggtgagtaacggacagctctccttggtgttttaaggggtgggtgtataaggtattttgtcctgtatttctctcctccctgcttgaagcaaccttttagaatactctgacctgatttcttccaggagtggacctggttccaatcaagcctctccccaatgtggtgactctccagcaggacatcacaacagaacgttgtaggcaggtaataggagtctctctcttccttccccctttatacggaaacatctacatccctgaaatcctctaaaggcaagtttttcctttttaccgtgctttgagcacgttcttgcctgacatctgtacgacaagacctatggcattcgtagtgtccactccaggctttatttagagtcagggataaaggtgtttggaattgggagaagggcagagatctttagtgaagtcttctcctgtgaattcagtgtcagactgtaatctccatgaaggtagagacatactgtttttgtttactattgtatctcctgtgcctggtactgcatttggcccatgatgggcactcagcaaatgactagatggacaaatggctgaaccagggccattccagtgtttctgtttccatagttccttttcttctctttaggccctgaggaaggagctgaagacctggaaggttgatgttgtgctcaatgatggggcccccaacgttggggctagctgggtccatgatgcttactcacaaggtacagggagtgtggtgcttggagatcaggtgatggtggaggtgggcgcatgccctcctgggctgcagagtgcgtcaactaattgtctctatcctacagcccatttgacactgatggctctacgtt

SEQ ID NO: 1244565 - DNA, 4001 bp, Homo sapiens
aagcctcagctgatgggtgtgttagggataagcaggtctataaagccattcaagaaaaacaactctatcaaagccccagatcctgcacagctacacttaggggagactgctgctttttaatgcattgaggtctgttaaaataactttgtgctatctgtcctattttcaacagttaataactattttaacattcaaacatggaatagcctctccaagtttgtagtgatcatcactagttactactactcttacaaagcatcatgacttgacaaaaaccatgatggagtccagaaaaagtaaggccgtcaaccaccatgactcaagcttgctctaacagtgaagctttcagggaactctcccctagaatagtgggccaacaggaaatactctaattgtaatatttgacgtaatttctactttatgaaagaaaaaatattagacactagacacagactattaaaattcatgctcctcacattagttctaaataatagtgtgtactcagaataaaatatccatgtaacggtgattgagatgactctggttccgtagaagtaactgacctaagatcagaacttttaaaatgaaacaccttttaccaatatcattcaaagatacaccttgacgcccacttcctctccttctctagtatccccaatgataaagtatcaagatcttgtcattgtcctttctccgtgcaggtctggaataccaaaattcaacacactaagtcaaatgccaacatcttgcaagtcccacatacaggtgcattctcatactacttgttgagccaattcagatcttcccaaactacactacaaagatgccattacatgtgcagtgaagagctagtccaagccctaattgaatcctttatgagtgaacattaacgtcttcttctgtcgtaataaatttctgttcacacttgaatcccaacagaaagctgccggaagcgactggctgggattcccatttcagttttcctgttgtgtgtaggtgtaagaccatcgttattacagcgttaagaaattttaatttttccggcaacatgcagccgacccgttccaaagaattccctgaactccgcggctgacaactaactcccttaactcacttccaacccctacaggcagtctggaaagattagtcacctcctctagccaggcggtcccgctccaacacctcactcttacaccctacacagagcagatgagcgtctcggccacctccacaaaccaaatgccaatctgaggtgtgtgtcacccctgaatttcccacattctgaaagagaccctcctcttagtggagctttctgccgtggggctgaggagtagcagctcccagcgtcccgtggaaggaaactcccagagaagagcaagcgctcgcgctcccacccggagcaggctgtgctgattacaacggcgggaaatgcctgtccagagctggtttcgccaaggcctttcaagtagagactctaggaccagtccgtgacaagcacgccggccggcactgctccgggtcccagaccagctcgtgcgggccagagccggggacatggctagggagggatccccgggggcccggctcggcccactctcccaccctacgctgagccccccgtgagtcagcagccggcgaggggacccggggattgcctcaagccctcccacaagagtgagacctgggaggctctggggagctccgagcggcctgcgcccccggcccggcccccctcacacagtgagtcagcagcatcagagccggctagccgggcccctctccgctgccgccgaccgacataagccgagctgggccggcggggccggggaggcggcgcggcgacctttaccgatggagtggaggatgtcgatggaggcctcccggtcggtgctgagtagagactgggctctctggaactccaccaccgccgccgccgccatcttaccgctctcacaccgtccccggccgcggccgccgacgccggaaacacacacccggaaagcccgccctcgggtccctccgcctgtagctcccgtggctccgttcccagagcactccgggagttgtagtctctccgccgggcgcgggctgaggggtggggagagcgggaccgcctcgcaggtgggctgcaagctccccagcgcctcctagcgggcggccggcgaggaaaagaggcggtgccccgcagtgggagctctagatcggtccccgcccaccccaaaagaggcttcttgattccggccccgctcgcgcacccctgagaggggttcctgagtactgggctaggtattgagtcaaagctgcgtggctttctttgcggcttccacgatttaaccattcattcgggacgataagtgaccttataaagtgctcgctatgtggcaaagaatagcaccattcgaatgcgttccagtgtctgacgcctgtgcgccgcacacacgctttccaggcttgactcccgcagaacgctggccggcaggtgggcaaacccgccaggaccggagaaaactgtcctcacgcgcccatttaaccttgggacagtgctggacgtgatgaagtgaaacatcacctttgctccattcacgccacaaatacctcttgggaatccacagaagcctcacccagctccccagctcaaagaaaaaaaaaaaaaaaggaaggaaggaagggagggagggagggacggaggaaggaaaaaattgaattattcttcccaatatcttcagccccttcaactaaagtcacagatatcagtgaagacgtcgtgtggacggaaaaatgacattctatgagaccacttagggttaaacttaagaaaggtgctaaaaggatacaaagacaattcagtattaaggaagacctttctctaggtgatgacgatccaaaaatggaatgtgctgtcccataaaaggaggcaaaaaggggactaacattgcacaccctcctctgtaagtggattaggccatttatattcctctatctccttttattctcccaacaatgttctgtaaagcagatatttactcccctttaatatgtgaggaaacaggggtttgagttatttggtgaagctcaaatcgtgattgggagagataagagctgccggttagggaatgccttcctaattcctgggtgtgttcacgtgaaaagtagttgacatctcatcaggttgttgtaaacaggattcatgactttgatggagagttggattaaatggcttctagcaaggcgcggtggctcatgcctgtaatcccagcactttgggagggcgaggtgggcatatcgcttgagcccaggagtttgagactagcctgggcaacatagacccccgactctactaaaaatacaaaaattatccgggcatggtggcgcacgcctgtagtctcagctacttgggaggctgaggtgggaggctttagaagaaatcataggagaggatagagtgctggcctcactacaaagagggagtaccataaaacagtggaccccaacatttttggcaccagggaccagttttgtggaagacaatttttccacggatgtgaggaggggggatggttttgggatgaaaccgttccacctcagatcatcaggcattagattctcataaggagcaggcaacctaaatccctggcatgctcagttcacaatagggtttgcctcctatgagaatataatgctgcagctgatctgacagggggcggagctcaggcagtaatgctggctccccagccgctcacctcctgctgtgaggcctgattcctaacaggccactgaccagtagtggtccttggcccagggttggggacccccactgtaaaagactaggagtgtctgccagatctttctcccaagctagtgagtcttgctgactgtggaaacttatgagcccatccctgtgtgatcatcatggtgaaagttttgagatgaactagacatgtctcttgaggagtttggcatgtgtgcacattcatgaagatgggcacccacttctagcctgc

SEQ ID NO: 1244566 - DNA, 4001 bp, Homo sapiens
ttccttatggacactatcattctattaattccaaagtggaggttcaggggctgaccttggcctgtatgttttgttctagctacattgtattggctcaaatagtattttaatatgacagattagtatccaatttctaaatattaaggtatttaatgagaaattcatcttcctggtttctccctcaaattagcagcatcgacaatactcggccttcatccccaattggcaaagattatctgaaggtgaagatctgccgtctccttttcctgggcaggtgctcgaaagttcaggtttttggccagccgcggtggctcacgcctgtaatcccagcactttggcaggcagaggtgggtggatcactttaggtcaggaggtcgcgtgcgaccagcctggccaacgtagtgaaaccccgtctctactaaaagtacaaaaattagccgggcgtggtggcacctgtagtcctagctactcgggaggcggaggcaggagaatcgtttgaacccgggaggcgggggttgcagtcagccaagattgcgccactgcactccatcctgggtgaaaaaagtgaaactccgtctcaaaaaaaaaaaaaaaaaaagttcaggttttcactacaataggcttctaggcaggacagcatggtgtgtgagggcaccagctccagaatctagaatcggtctgcctgggtttgcttcttggcttcaccactttactagctgtatgatcttggggcatgtgattcaactttttctagcccaagttttcttacctgtaaaataaggataatagtaatagccatcgcatagggctgaggtgaggatcaaatggcttagtgcatgtaagcacggtgcctgacactgcagaaactactcaacaaatatcagttattgttatctgtctggcattggaggcggctgagttttcccacccttatgtaactgatgtttgttgatgctagctgctagaaagctcttaatgaatttgtggctccccctcagcaagcatactgaacctaagatatacatacgtaccaactttatcacctttctccatccttgtttcttggaaagcccgttaaactcttatagtgcctacttgtctttacttctgtagttccgtcttcagtaatgactccaccccacctcaatcttactaattcctcaagacccaatacaaacgtcagccttcctgtaaaaccttcccttatggcaccattaagaatgcatagcttccttctcggtgttccagtaacactttccccttgtatggccctcaccaccatgcatgacttgactaattcatcacgtacatcaactcctaaaggacagggtcctgtgttagtcatcttcgtactatcactttcctgccccttctcctggccaaagaccaggcacatagccatgatccacaaacgatgtaacgacataaattgattgagcaacagcaacagaacgaaactctctgatctagccttaatactgaagcggccttaacccctgggaaactactaaggtaaatatcacttaaacagcatccaagaaacggcaaaaagttaaacggagccctaagtcccacggagggaagtgaccatctgttttggggagggtctgggaagctataggcgctggcgtactccgcagccctggccgggccgacctggggtctcccactcgtgcaggcccaactagggctggacaggcattggggggtgcacgctccagcccgcaggccccctgaggcctaagcaggctccgcgccgtgactcagcccctggcgcccgccaacagccagccggcctctcctcaccttggctagcttcgcacactcgggtaggcgctgatccaccgtggcgctgtagtccacctccatcttgacgatgcgcccgtcagcccgctccgagccgccgtccgccatggtccccgcctgagcgtcccttgctgtccccctgcttcggccaccactcgtcacccacaccggaagttgcccgcgcacccgctcaggcagcccatcgggagcccacgcaaaggacccctcgaggtccccggcgctggttgccactcaggcactgccgcggacagcctgggggtggggcttgaggcgcgcggggcgggactcgccactccagcctgcagcgtcaggttttgtctctgggaacatcagactttttacctaaaatttgcgatgagaaaagcgagtgtaatagaacagaccatctcatatatccctacacccctgcttcgaaatatgatttctcaggaccgtggccagtcgcttttcttggatctcggttttctcatctctacatcaggaggctaaaataaaccttaaaatagaaaattctaaggttttatctacttgagaatcttggtggcttactctgtgggatctctgaaagctcctaagagaagatatggcagcagctcagtcatttaataagcaaagtggtttttctctttgttttcattttcactgtaatccactaagttggtaaaaagaaaagttaaaaagacatatttgttatccctataggattttcgtgagcatcaaactagatgacatgtgagacaatttcaattcttaagggccttacacgttttatgtgttatcattcataccatgctggtccctagaaaatagcttgagatcttaaaaaagcttaggatccttgaaaatgggaatgaggccgggcgcggtggctcacgcctgtaatcccagccctttgggaggctgaggcgggcggatcatgaggtcaggagatcgagaccatcgtggctaacacggtgaaaccccgtctctactaaaaatacaaaaaattagccgggcgtggtggcgggcacctgtagtcccaactactcgggaggctgaggcaggagaatggcgtgaacccaggaggcgaagcttgcagtgagccggcgagattgcgccactgcactccagcctgggcgacagagcaagactccgtctcaaaaaaaaaaaaaaaaaagaaaaagaaaagtaaagaaaatgggaatgaggttgtgtttggtgtgggcatatggtcaacagcagcctggaaagcaaacaggaaaacgggaaatcttggagtggtttatctattatgttagtggttctcaatttaattagtgccgacatcgctttatagatgctgaatagatctctttgtttgttttaactgcaatgaaaatcagggaaaatataaaccatctacaagcaaaataagacaatatctcagctataatctgtaatgtagaggagaaacaaattttaccttttttttatttttgtagagatagcagctatactacgtagcccaggctggtctcaaacacctggcctcaagcagtcctctcaccttggcctcctaaagtgctgagattacaggtgtgagccactgtgcccaaccaagaaacaaattttaaaatagcaaaataatatatatttcaagagataagggctaaaacatgtctacagtggaaaatacaaggaagtagttatttacacccatacacaataactataaatgtaaaagctgcaactgcaacaggtgtgttctcttggttcctgaagcatggtaagggcctattgttggtgacattttccaaaatggtgagcaacaagccacttcttggtaaagctcttattgttttttttttattttatagtccatcagatgggtcttatggctcatgcctataatcccagcacttcgggatgctgaggtgggtggatcacttgaggccagtagttcaagaccagcctgaccaacatggcgaaaccccgtctgtactaaaaatgcaaaaattagccagtcgtcatggcacgcacctgtaatcccagcttctcgggaggctgaggcaggagaattgcttgaacccgggaggtggaggttgcagtaagccaagattgcgccactgcactccaacctgggtgacagacgagaccctgtctcaaaataaataaataaataaacaaagaaactttataatccatgacacgctgaa

SEQ ID NO: 1244567 - DNA, 4001 bp, Homo sapiens
gtttcttaggcacttctgtatattcaccgattagcacagggtatctgggccacactaatgatataaataataacagctgatatttatgtgctaggcacagttttaagcattttaatgttcacaacaacccaataaagtactgtactattacttgtatttatacagatgagggaactaattccagaacttgtactcttaaccattatattgggtattcaataaatgtttctggaataaattgaatgctgattatgtttacgaatgttaatgaaaacacataaaattcaaaatttatatttagttatgccttgatacaaactgtatacataacttgctctcaattataggagaacagctcaaaaattcacaagaaaaaatgttaaccatgttttttatcccctgcttttaacttctcatacattccacaatttctgcaatgaatatgaattactttacaagaagaaaatgaagtgcctgtaataaacacacccagtaggcaatgctgagtggcacctttgacattgctgccactactttaggtaaaaggatctctattaaatatcgatcctgttgctcaactttacagtaagagctgatgtagtcaacaccatcacatcctcaaaagcaccacctaggaggataactttgcttatctcaatgtttttgagctagtttctcacgcattttagtgaaaagaaaacctagtaagtagtctggtcccacttgatccagaaccaggaaaatggcaccaggatcacagtgggaagctctcactttgcccacttcaaatggaaacaggacgctgtaagtgggaaaagtaaaacatgaacttggaggaacaagaggactacagacactcgaaacaggaacctcggagaaaagaaataggagacaccggtatataggagtttaggccaaaggttgagtattacaaaaccaaacaaagatgacacccgaaaagttttaagtgtgtatgtacttaaaccctttagaaacagaggggcagtaaggacctgaagggaggagacagcaaggggactgttgggacacttcagttagagaagtaggaaacaagatactaggtcgaaatggttcattcgggggagtgtgctaaaggcagctaggacaacaaaaatctgctgtacagttttaaaactcaggagtcaatattctaggtcatcctggccctgtttacacacagacacaaacactggtttccagcgggaacaatcagtcatatattggaggcgctaaaatcagtcgggtgggatataaacggaataggtcagaggggaggacttaaaagagggagtccccaggcccactgggacctagatatagatgcaaccccagatatggggatggaggggatgggaggggagtggttcccagcctggagagaaggttcagtcattgggcctggagtcgggagtgtcggggcagtgggagcaggtatctgggggtgatcccaaagaactgagggtggtggaggctgctgtggcttcccagcaagaagccaaatcacaggggtcgctgtcacccgcgatcgcggcacgttcccggcctgggctgccgtaccctccaaggtgactgtgtccagctctcgctgggagtgctcagccgctgccgccgccgtcttgccgtctgcctcccccgtcgacccgccacccgtcgctgcctcctctttcatctccacatcctggggggccggcggcggtgggggttcttgttctcctccgccgggcggcggtttcgccttgtccgcgccgcggcgccgcgccgagccctcctgcttcatggcacccggggtcacggcctagtccggggaccgaggccggggcctcgcgttaaccctcgcaccggggaccaggagccgagccgggcctgcacacgagcgcgagatagcgtcgggccgcacgatgacggagcagctgcaaaccccttcccggcgctgggccttctgggaaacgccaggcccggcaggccgatggccgagtcaacaaaggggaaataaatccacagccgaggtgcaggatgaaggaggagcttcgaggaaggagcggggaggagcctttatgggttcgtggggctttctttcgagcgcttaagtgtgatgcttttatgttcctctcgagtgcatttctgtgggcgtccacgagaggtcccctcaggctccaatctgggttacaaaggactttaagagcgcctcaaccagcgtggagtgggtacagcctatccgagcgcgggacgagatgacgtcacgagttgccgggcgggttttgcgcccaagttcgctcaattttccccggtcgcggcggggtctccttccagatccgctgggcttgtgctcaacggctgccgggcgcatccggcaggagggaaggaaagaaggctgtgaaggagggacgtgaagctagggctgttggccttaaaataaaccgaactggagagtaggaagaaccctatgggatccggacttccttggttagatttgagtttagtgctgaacataaggcatacaatttctgcaggctgggagtgccgataggtaggagcgtgcatttgcgtagaatcactccagtttaacaaaatataggggtccaccctatgtacggcccacggttagcaaataggggggtgaaaaacagctcaagaatgtagtatacgggggagtcagatggttagataagcagacactgtgctctgggctgcggtggattgggagtgttgaggaaagagggtgggagcccctactggcagacgctttagggagcccattgagagggcttttatacatccagacagacattgtgaaatggggaacagaataatggtgtgcctaaggagagaatgatggtttacttagtggtgtacctaaggggaagcaaattggacaagaaaccctacccacttatttttcaaaggactgccccactggttctgcagggaaggtgaaacaaggtgaaggatatagctcccaatttcttagaacacacaacaaaaactctctccctaccttgaaacttttctctctcccataagtggaagtcctgagttttagacctttcacggaccctacaagacaatctagccctgttgtaaggacctagaaggcaggaaatatgttttgacctcctcctttgcatatataaagggtatcctgcatatcttttgcatcctctttcataggattgcaggatgttccttgcgttaaacagccactcgctaactggaaagatatgtgctctagttttagggaacatgccttgaccagttcctcctcaactgtcctctcaccctccagggctggggggtggataacaggacttttgaatcatcattggaataaactcattagaacctcttcataacaccatatctgcaactgaaggtgggcgagaatggtaaggaagaaaacagatgagttatgttcatccttaacaatcaaaggagttactcttctagatagttagggtgttagctcatctctctattaagtttacatcacaaggagaaaacaaccaagtcagcagataacaacccagtatatccatgagcaatagagtgaggctttggaaggtgctcaggatcagggaggctggcggcataacacaaagcttctggcagttggtcatgaattcttggtggatgagggaaccaggctgggcagggggtgactaagacactgggggagagtctgactccacggaccaaaatccttagagaaattcttccactcataaaacttttttttttttttaaacggaatctcgttctgttggccaggctagggagtacagtgtcgtgatcttggctcactgcaacctccccctctggggttcaagcgattctcctgcctccttctcctgagtagctgggactacaggtgcgagccaccatgtccagctaatttttaatttttttttttttaatttttagtagagacagggcttcactatgttgattaggctggtcttgaactcctgacctcaggtgatcct

SEQ ID NO: 1244568 - DNA, 4001 bp, Homo sapiens
tcgcttgagttcgggaggtcaaggctgcagtgagcagcattcccgccactacactccagcttgggcaaaaaaagtgacaccctttctcaaaaataaataaataaataagaaataaaagaactatactagagtcatcatgtctgtaacagagtcctagttcccagatccaaatcccactgttccctctgtacatcttaaactgacaaggaaacagaggacagaggacctactgctcaagaacacaaagataaatataggacacttacaccatccagtccatcatggctattggtgagaagaatggggtcagggactgggagattcatgtcagagtggatctgagttaggtcatggatgtttaagattggttcctgaaagacacccaccccaaaacattaatcttttcaagctgaacaaagaagtatttgatttgaagagcaagaaatgaaagtgcttttacagtttaaaaaaataaaaagaagaagaatcaacagtttatcccagttgacagtaataccagggccaaaaaaattggggaatttgaggaaagaatagggtctctcaccttcagaaaactatcaagttctaataacttctttgggaaaaaatttgccaccaagtcttctgcctaaggaagagggaaaatacagctgaattaatatctgtgggaaggtctctctctctctctctctctctctctctctccaggtatctcctctttgggaaattctcaaccaacaaccatttttctatttatttcactcacctcacttgtgatccgctccctgaaagaatcaacctaaaattaacaaagagagcaattcagtacctggggacagaggtaagagcaggatggagaatcccaatccaactgtctttccctcaccttgtaactgtaataagaagctgagaggcccccagactgcaaatactttatttttttgaggatccatttttccatctcagaagaacgcagggctttgaggacagcacctgcctgtctcctctgtcctcccccttccctcccttcctcctgtgtctgaagctgtctgaatttgataagcagacaaaagacaggtagttagggaagatgtgagctcacaaacgtgccaacccccacccagacctagtctatgatactaggcaggccagccgccaagggcaggggcagtgtccagggacgttgttgggctgggggattaccagctgtcacgggcctaaagccctgagtccaacacgtgtccgcggaggtgtccccgggactctccatcatcagacgcggtacagaaagccatcctatattttcctctcccgcgaagccgaccccgggagttgggggctgggctgagccgagcggaagctcagagctggtatccccagggagacaaagacgccatggggagtaggaagccggtcagactgctgggggatcaaagcgaggggcaaaaaggccggaccggtgccgctaccttgagcttcacttcctgatccaccttcagcaacgaggccatggccgggccgggccgtgtccgatcctctggacaccggaggcgctgtggactccagggagggggccggagggacctgagaaatctcggctgacctcgggacccgaccgcccttgctggcttactcactgctcgctcgctccctccctctgtgccgtccgcccgcccgccggcagcctgctgcctgcttgctctctcgctcgccctcccggctttcgccgctcacgccggaaactgcgtcacagccaatcgccgagactcctgcgaggctgtgcacgtgcgctgcgcagccgcgatgaggcatggctttggacgctcccagcggggttcacactgccggggtcaagtgtcgggtaggggtaaagtaaaaaggagagctgtggggaatggtgcgctgagaactgagcctccgagagactcggaaacggtgcggccctctctgttgtcccggaactcgccttcaccgaagggaccttctcagccgctgcactcccggggacaacgccgtcgcgccccagtgacgtaggctcggggaagtcggggacccgggtactgggttcgggggtgtagtccctgattcccgctgcctctgcccgtttgccgaggctcaagtgtttaggctagagcgaaaaagacaagcgccgttgtaccaagctttcctggtacatttccctgccaactgattctcgtaagcttccagacctcaaagatcaactacctaattggcaaattgatccccagagtagggtagggcttgtccaaggcgtttccagtacatcctgagccagaacccagatctcctaacttctacggcagtgctgtatctatttgcctagtggaagcatgagactatacctcttcatgcacccattcattcgatctctctctctcgacattggatatatcattcaataaaatggggcagggcactgtgtcagattctagaaatatgtgagtcacatatgtaggttgaaatcttctagtagccacaattaaaaagtaaaacaagtgaaaattttagtcatacatttaacccagtttatacaagtatttcaacatgtaatcaacatttaaaaatcgagatcttatgcattcttttctcataccaagtcttcaaaatccagtgcgtattttacacttaactgcacatctcaataaggcaacaccacatttgtagtacagtgctcagtagccacatgtggctgctggcttctgtattgaagagcacagctctgggaaatcaaaggcaaacaagattcaaggtcgctggtcccatggggcataatattggaaaaacaccagaaagtaaactgacaaggtaactgcaaaatttgataaatgttagggaaaaagtggatgacatagaaaatacgagagatctattttagatcgaatggccaaggaaggcctctgaacaggcaagctgtgatctaaaggatataaagaggttagcatggaaagagtgagaagagccttgagaggtataagggcagctcaggcaaatgctctagggaaggaaagagattgtcttgaagacaaagactagtgagctgagggtgaggagggttgttagtaaacaatctagattaagtgcaaaaggaggtcatcagatttgtattttggggtcgctcttgctgttgaacatttatcctaggctggcctctctactaagtgctaggaaaatgaggggaatacacaattaaatggagtaaagcacagaagactgactatggcctttgggatcagagacctgggcttcaaatcccacctcagctccttactaactggaatcttgggcaaattattgaaatgctgagtctcgattccctcatctgtaagatggaattttaataattagtaataaataatagtatgtaattttgtagtgttgtgaatattagaaataatatatgtaaaacaattagcacagtgcttagacacaaaataaatagtagccactgtcaggtaagtaagtgatctgttaatgcttagcatgaagaggttactccttaaattacagtaattatttccattcctgctttcaagctcaaagtccttttcagcttatagaaggccacatataacatcatgctctatcagttttcccccttttacatgttttctgttaacacatttccctgggaacttttgagatccgatttgaaacttcaggaattatttcccacatttactccattctattttaagtatgccactattcttattccagtcagaatttataacatcaactggaaaagctaatatgtttgtgcctgttaaaatatgctttgttctcaaataattatgttttgtctccttcaagtaggttataagacagatacacattctctttatttcccttcctcctccccatccaagtgtttaatataatactccattcatttgtttattcagtgaacaactggagagtaccactacacttaacaataactattcatttctgggtgcttacaagtcacatgtgatcactga

SEQ ID NO: 1244569 - DNA, 4001 bp, Homo sapiens
cgaaagtaagttaactgggagagattaccaagagagtaaaaagagactcaggacaaatagctaatgtatgcaggacttaaaacctgcatgacgggttgatagatgcagcaaaccaccatggcacacgtatacctatgtaacaaacctgcatgttctgcacatgtatcccagaactttaagttaaaaaataagccaggcgcggtggctcacgcctgtaatcccagcactttgggaggccgaggcgggcagatcacctgaagtcgggagttcgagaccagcctgagcaacaaggagaaaccccatctctactaaaaatacaaaattagctgggcgtggtggtgcatgcctgtaatcccagctacccaggaggctgaggcaggagaattgcttgaacccgggaggcggaggccatggtgagctgagatcacgccactgcactccagcctgggcaacaagagtgaaactccgtctcaaaataaataaataaataaaaataaaaagagagactaatacagttggaaaaaaaagattaggcaggacttgttgagtgattgaatattggctggaaaggaggcaaggacaatcccagctgtaacctgggtacatggagagaagaagcaggccactttccacacacccaccttgatatcctccttggtaagccgcggccaggccaccttttccttccattttctcacaaaacaagtaatagagcgggaagagcgcttatcctgggagtcctgccagatagagagcctcattcttagggtctggggtttagaattaatctccagtttccctgggcagcccggtttccatccaaaccttactgtcccatttcacccttaccttggagttcactttggcatagaactcaatctcattgtacaactccactccatcggcattcttgcagctgaggagacaatgaagctgaggagatgcggaatactccgtgtggggacattaggaaaggggtagattcctgggaagccaggccctcggacggcagggccactacctgaacacaatgcggtgatcctcaataagcacgtggacatcggtgctgtcctcaacacaaaactccatgaacacatacctgggcctgtcgtaccacaaggtccgggcgtgctgcctgaagagaagttgaggtgtggcttcataggggtgggagagggaagactgaggtcatttgggaagggactacccagggacctttgatgccacagttttttcaaagtggagctaaatgagacagaaggggtgaaagggaagggaatgacaggagtgggtgggtgtggtgaatgtgaacctgggaagaatagaacgtgcaagactaggaaactaggaggtcagggagaacattcaggtcacaccttccctcaccccacagttacagagaccaggggtccggggctcccgtggggcctcacagaacctggagcgcccagaagacttggagcagggaatctccagggaaaagggccagggggagcaccggagccggaaacactcaccgtgccattgcggctcccgctccagggtggcatttagagttccaggcaggggccgctatctttagatcctggggacgcccccagcagctgcctctccttatatggtcgggagagcagttgagaggaagagagaacatgacctggcagccaagggatctgcactctggagatactctgggacagcttcatccttgcagcccttcaccgtggggtcttcagaaatgcatagactatgaagagacaacccatctgctggaaccagggcaaaggctgccctagacgctacacacagggaatgacttttccccggtatcattcacctgtttctccgacgcttactgctcagtgtctgattcacaataggcgctcaataaaacattattgtcctgaattaaattcccggggaaggcgcgccctcggggacttgggtacttcaggccccgcccaccactcccctggggttccaggccaccgcgccgttgccatggcagcaggggggcgcggctgacgtgcggtggtgtttccgggaagatggcggctgtcgaagcggctgcagagccggtaacggtggtggcggctgttgggccaaaggcgaaagacgaagaggaggaggaagaggagccgctgccaccgtgcgaggcggtgcgctgggccccagtgggggcggtggcggaggcccggcctggggcaaccgcgtttttagaagaggcgacggccgaggagcctggcgcggccccgggctccccgccggattcgccgggccggacgctgcggcggctgcgggcagagcggcggcggctggactcggcgctgctggcgctgtcctcgcacttcgcgcaggtgcagttccgcctgcgccaggtggtgcgcggggcgccggcggagcagcagcgccttctgcgggagctcgaagacttcgccttccgcggctgccctcacgtcctaggttacgaagggcccggcgaccccgccagcgatgagggcgatgggctgccaggggaccggccatggttgcggggcgaggaccaggtgagtggctggagccgggccgcgaggaatatgggaatagtggggtcgtgtgggtggcgatccagacccggatgatggtgcatgcggggagaagcctccccgactcggtcggtgagtacgtgtgtcggagaccaggggactggagtgcggggccggctgaagggcaagaggacagaggcctgggaacctgagggtgagcggtgtgcacggaggatgtggagagatgtcggtgcgtgatgacgtgagtggtagaggagcggtgagcgaagtgagtcgttgagagggcagcagagcagccaagagcagtgctgcgcccactcacctttccctcacgtatctcagtcttgaacactttggctgctagaggaccccgactctggggattgggaaaattggcaaaggaaaggaaagtgagttggaatccgtggaaatttaggttaactccctgtccctgctttcctgaaatctaggcagtctttacacttctttgggtgggagtttggattaacagcagggtctcttagtaactgaaataaacacaactcttgattagataaatttcctaatgttggaatttttcctttttaagagacgggagggtcttggtatgttgcccaggctggtctcgaactcctggtctcaagccatcctcccgcctcagcctcaggactacaggcgtgtgccaccgtgcaggctataatgttgaaatttttaaactcttcctccatcctgcttaatcattaggcattctgaatgaggtcctctgataactgacaagatcgattcagtgtgcctaccccagaagtagtgaaactatgtataagacaccaggtaaacgtttccttacaagctttgcatctctggaagtgcacaaagtgctggctttattggaagtgttgaggtacactgccttttcactttttttttttgagacagagtctcactctgtcacctaggccagactgcattggcgcaatttctgcttactgcaacctctgcctcctgggctcaagcaatcctcctgcctcagcttccccagtatctgggactacaggtgtgtgccaccacacccagttaattttgtttattttttgttgaggcggggtttcaccacattgcccaggctggtctcgaactcctgagctcaagcgatctgccctcctcagcctaccaaagtgctgggattagagaagtgagccaccatgccccatcccttttcaccattttattcttcaaactacaatctacatgtggctttcttcccacttacattggttttagccaagaagatttatcaagcagataatgatttgtttattttagtctgaactgtttccagtgcaatcctgtgtttactgttccacccttctccacatacctgcaactccttacacaaggagcagccacctcaaactgtcagatttaagggctagaaaggggtggacagcaccaaag

SEQ ID NO: 1244570 - DNA, 4001 bp, Homo sapiens; identical to SEQ ID NO: 1244569

SEQ ID NO: 1244571 - DNA, 4001 bp, Homo sapiens
ggaggcggaggtgtagtgagctgcgatcatgccattgcactccagcctgggcaacaagagcgaaactccgaatcaaaaaaaaaaaaaaaaaaaaaaacagaaagaaaaaagaaaaagaaatggctgggcacattggctcacgcctgtaatcctagcagtttgggaggctgaggcgggtagaccacctgaggtcaggaattcaagaccagcctgaccaatatggtgaaaccccgtctctactaaaaatacaaaaattagccaggcgtgggggcacaagccagtaatcccagctactcaggaggctgaggaaggagaatcgcttgaacccgggaagtggatgttgcagtgggccaagatcgcgccactgcactccagcctgtgctacgggagtgagaatccatctcacacaaacacacacacaaaaagaatcaaaggttttgattgtgagttgcagtaaagggaaagaccatgttcatagcagtgccaatatctgaagtggagtcttacacatttcatcacctacaacgaaagtaagttaactgggagagattaccaagagagtaaaaagagactcaggacaaatagctaatgtatgcaggacttaaaacctgcatgacgggttgatagatgcagcaaaccaccatggcacacgtatacctatgtaacaaacctgcatgttctgcacatgtatcccagaactttaagttaaaaaataagccaggcgcggtggctcacgcctgtaatcccagcactttgggaggccgaggcgggcagatcacctgaagtcgggagttcgagaccagcctgagcaacaaggagaaaccccatctctactaaaaatacaaaattagctgggcgtggtggtgcatgcctgtaatcccagctacccaggaggctgaggcaggagaattgcttgaacccgggaggcggaggccatggtgagctgagatcacgccactgcactccagcctgggcaacaagagtgaaactccgtctcaaaataaataaataaataaaaataaaaagagagactaatacagttggaaaaaaaagattaggcaggacttgttgagtgattgaatattggctggaaaggaggcaaggacaatcccagctgtaacctgggtacatggagagaagaagcaggccactttccacacacccaccttgatatcctccttggtaagccgcggccaggccaccttttccttccattttctcacaaaacaagtaatagagcgggaagagcgcttatcctgggagtcctgccagatagagagcctcattcttagggtctggggtttagaattaatctccagtttccctgggcagcccggtttccatccaaaccttactgtcccatttcacccttaccttggagttcactttggcatagaactcaatctcattgtacaactccactccatcggcattcttgcagctgaggagacaatgaagctgaggagatgcggaatactccgtgtggggacattaggaaaggggtagattcctgggaagccaggccctcggacggcagggccactacctgaacacaatgcggtgatcctcaataagcacgtggacatcggtgctgtcctcaacacaaaactccatgaacacatacctgggcctgtcgtaccacaaggtccgggcgtgctgcctgaagagaagttgaggtgtggcttcataggggtgggagagggaagactgaggtcatttgggaagggactacccagggacctttgatgccacagttttttcaaagtggagctaaatgagacagaaggggtgaaagggaagggaatgacaggagtgggtgggtgtggtgaatgtgaacctgggaagaatagaacgtgcaagactaggaaactaggaggtcagggagaacattcaggtcacaccttccctcaccccacagttacagagaccaggggtccggggctcccgtggggcctcacagaacctggagcgcccagaagacttggagcagggaatctccagggaaaagggccagggggagcaccggagccggaaacactcaccgtgccattgcggctcccgctccagggtggcatttagagttccaggcaggggccgctatctttagatcctggggacgcccccagcagctgcctctccttatatggtcgggagagcagttgagaggaagagagaacatgacctggcagccaagggatctgcactctggagatactctgggacagcttcatccttgcagcccttcaccgtggggtcttcagaaatgcatagactatgaagagacaacccatctgctggaaccagggcaaaggctgccctagacgctacacacagggaatgacttttccccggtatcattcacctgtttctccgacgcttactgctcagtgtctgattcacaataggcgctcaataaaacattattgtcctgaattaaattcccggggaaggcgcgccctcggggacttgggtacttcaggccccgcccaccactcccctggggttccaggccaccgcgccgttgccatggcagcaggggggcgcggctgacgtgcggtggtgtttccgggaagatggcggctgtcgaagcggctgcagagccggtaacggtggtggcggctgttgggccaaaggcgaaagacgaagaggaggaggaagaggagccgctgccaccgtgcgaggcggtgcgctgggccccagtgggggcggtggcggaggcccggcctggggcaaccgcgtttttagaagaggcgacggccgaggagcctggcgcggccccgggctccccgccggattcgccgggccggacgctgcggcggctgcgggcagagcggcggcggctggactcggcgctgctggcgctgtcctcgcacttcgcgcaggtgcagttccgcctgcgccaggtggtgcgcggggcgccggcggagcagcagcgccttctgcgggagctcgaagacttcgccttccgcggctgccctcacgtcctaggttacgaagggcccggcgaccccgccagcgatgagggcgatgggctgccaggggaccggccatggttgcggggcgaggaccaggtgagtggctggagccgggccgcgaggaatatgggaatagtggggtcgtgtgggtggcgatccagacccggatgatggtgcatgcggggagaagcctccccgactcggtcggtgagtacgtgtgtcggagaccaggggactggagtgcggggccggctgaagggcaagaggacagaggcctgggaacctgagggtgagcggtgtgcacggaggatgtggagagatgtcggtgcgtgatgacgtgagtggtagaggagcggtgagcgaagtgagtcgttgagagggcagcagagcagccaagagcagtgctgcgcccactcacctttccctcacgtatctcagtcttgaacactttggctgctagaggaccccgactctggggattgggaaaattggcaaaggaaaggaaagtgagttggaatccgtggaaatttaggttaactccctgtccctgctttcctgaaatctaggcagtctttacacttctttgggtgggagtttggattaacagcagggtctcttagtaactgaaataaacacaactcttgattagataaatttcctaatgttggaatttttcctttttaagagacgggagggtcttggtatgttgcccaggctggtctcgaactcctggtctcaagccatcctcccgcctcagcctcaggactacaggcgtgtgccaccgtgcaggctataatgttgaaatttttaaactcttcctccatcctgcttaatcattaggcattctgaatgaggtcctctgataactgacaagatcgattcagtgtgcctaccccagaagtagtgaaactatgtataagacaccaggtaaacgtttccttacaagctttgcatctctggaagtgcacaaagtgctggctttattggaagtgttgaggtacactgccttttcactttttttttttg

SEQ ID NO: 1244572 - DNA, 4001 bp, Homo sapiens
cggctcgaccaggccccagagcagtcagcagagccacaactcccggaaaggggtcttctaacttggagggtgtgggaaatccagccttccctttctttccattcccttcagcagggagaggaaggggagaggggagcatagactaacccccctgccccacacgatcccgcctccctggggttaggagcatcagcaggcctttgggaggcggggaggagccaggctggaacacttgccgcccagcccaaaatctcatccccgatggcactgcggaagcggcgtggagaggagcagcatagaaacccgagactcccaggtttattgggggttatgatccaaaagctacatttttatccaagtgtgaagaatggggagagctgcaaagaaagcaacaagtggccccgggcggagccggggggtgggggcgccagcctcctcccgccggctgcgctgctgcgcctggcccccgcccccgcaggcatgcggggtgattcacctcgcccagactgcgcccagaccgccggaccccgcaggggctgtccacccactccaccagcccctcttgcactcctgacgcccactcttccccgcccagccccgcccgcttccaggaggcccagggtgccagcgcgccgcgggtgagggtgtcctcaagggcctgaaaatgcctggtggccaggagcagagagcagcgaggggacaggggtgggccgccgaggccgatgtgggggcgcgggggcgcagggtctggggaggaggttggcggtcgcgttccccgcttggcacagcccccgctggtgcgtgcctgagccctgaatcacccgctatatcaggcccgcaggcgcagaggccccaggcccgggccccgcagccagtgtccgcttacagcggaccccaacgatcgcgagggacccctgactttcctagaaacttcccccaagtaggaagaagtttgacagagccaattagggagggagcggtctgcgaggggcagcgtcctcgagtccacccgctaattcggttctgctacaagtttgggacccgagggaaggatctgagtggggaggtgcgaggtgcagagcgcgcccctctacgcgccccaggagtccgccgctccctccaccccatcctaccccacccaaccccaccccagccgcgctcaccggaaggagggtggatctgccgggcgcccgggccaggctgggaggggagcagcgccacgggcaggtctccccaccccaactcccaggcaggggacgcgggccgggcgcgggagctctgggcgccttccgccctgtgggctcacctggtagatcatgactttaaagttgcggcgccgcagcagctcggcctcgttgacctccagcttcttgatctgccccgcctggcgctccaggctgccgcgcacggtcttcacgttgacgctgaccttgcgcaccttctccagcagcttgctcaccgtattgctcgtggtggcgtgcgccttgcccagcttgctcagctcgccctggatgctctgcactgcgccctccatctccgcctgccgctcctccagctgtgcttgagtcagctggatctggtctacggccccgatgattttgtccaggaggctcagcaccagcacgccgttcacctggtccgacttgatcagctcttctgagccggcccccgacggctcctccgctgcctgagccccagcggaggaaggctccggggcctcggcgtcggggtacccgggaagcggccgctcgacaatatagagcgtggggtcctccatggctacccggagccgtgcgggaccggccgggtggggctggagctggagcgggagacccggagagaagcaggagcggaagggaggagagctagcgggcgagagcggagagcagaggaaactcgagccacgtccgtgcgcaccgggacagcggccagaactgctgggcgggggatcggtgagctccccagctcccgggccaaactccggagtctgatcgctgattggctggccccaccccagaaagggagggaccggggcagaaggggagatcgacgaggcggggcggcggagggggacccaagagccgagcgccccacccttcccgggatggttggaatagttggagcgggagactagggcctccgctggcggcgggagcgggacgggcggaggaatgcgagctgaggaacggaatcaggttctaagagtgttgctctctgtttccctctcacttgaattgctcatccgaaaatcctcaagatctgggagccgggtggaccaggagattctgaaattataggcaaaatcttgtatttgcctttacctagattttgagcacaaaaggacccttgccctttacaatattttctaagaggcctctcggatttcctcatcaccaaccccaaccaggttactaactcaggggtaagcttagggggttgtttgtggggggcggggggagaaagagagaacgtatttggggtcacggtggtggtgaagggctgcgaagctcctctaagttctttttagaattgccctaacagagtagaattaagatgggcaatcaaacggaaaataaagcccacctcccaacccccctttctgagacagggtgtcactctgtcacccaggctggagtgcagcggtctgatcacagttcactgcagcctcgacctcttgggctcaggcaatcctcccacttcagcctcctgagtagatgagactataggcgcttgccaccacgcccagctaatttcaatttttatttttttcaatttttatttttttaagagacggggtgtacactattttgaccaggctggtctcgaactcctgagctcaagtgatctgctggtttcagcctctcaaagtgctgggagccaccgcgcctggtgtaaagccctttttaaaagcccacctctcttaggccaggcgcggtggctcatgcctgtaatcccagcactttgggaggcccaggcgggtggatcacgaggtcaggagttcaagaccagcctggcccaagatggtgaaaccccgtctctgttacaaatacaaaaattaggccaggcgcagtggctcattttgggaggcggaggtgggtggatcacctgaggtcgggagttcgacctcagcctgaccaacatggagaaaccccatctctactaaaaatacaaaattagccaggcgtggtggcgcatgcctgtaatcccagctattcgggaggctgaggcaggagaatcacttgaacccggggggcagaggttgcaatgagctgagattcgcgccattgcactccagcctgagtggaattctacagagtagaattcctcttttttccaaaagctttttcaatccttagtagaaggaatttaaattactttaatacatttctcctaaattctaaagtaagttggtaatctgccagttggtaatccactgtctgagtgcagacagagtgagactctgtctcaaaaaaacaaaaaaaacaaaaacaaaagcaacccacaaacccacgtctcacctctctctaaaactcacctttccctgtgttccccctcccaccgccccctcagaggcagctgacaccaatctcagtgagcaggatctaggagtccatttctctttcaagattccagggactaacagtaagccatcggagagaccatcaaatcccaccccctcatttgacagacaggaaaaggaaagcctgcagaagacaggtggcttgccagagatcactcgcaggttagtgttggcattggcacttgaacccaggtctggactcctgctttcatgctctttccaccttctgctctaagccttccactggggcagggagacaggcacccacagccactccccaactcccatgtgctgtttcagaagattaaccaaagcatattttcatccatgctgggtacaagggagcaggcaattctgagcaggcccaaggagggtccttagtgcagaaagtccagaaatagggaggctgcccatcctcccc

SEQ ID NO: 1244573 - DNA, 4001 bp, Homo sapiens
tacagcctcaaactcctgggcttaagcaattctcctacctcagccttccaagtagatgggactacaggtgcatgccaccacaccctcctgattttttaaaaattttttatttttgtatggacttggtcttgctatgttgcccaggctggtctggaactcctggcctcaaggagttgcttgaggtcgaggcagcagcatctcgagtccagttcaaaaccaatctgggcaacccagtgagacctcatctttacaaaaaatttaaataattagccagatgtggtgccacatgcccatactcccagctactcaggggataaggtaggaggacacctcaggctgggaggtggaaattgcagtgagccatgatcgtgccactgcaccccaggctggacaacaatgcaaaaccctgtctccaaaaaaaaaaaaaaacccaataagatcaaaaacaggacagtgaaagttccaaaagttaccaagtttatttattatgtcccatatctcaatggagtgtctaatcataaaaatgctaaaattaacacatatttttgttctttaggatgttctaatctcatattaatctgatcagattatcatctaactcctctaaaacaacatgtctgtctctttttctgtacacttacgacaagcgtatcaataagcctagtgcctaagactaaggtaaaacaaataaccattctttgtctcataaataattctgggcaatgacagcagaacaaaataagtacatcctataaaatcttcttcttggtgccttctaattcccctgcctcagtaaacccatttcagtagtgctcttgatcccattacctccttctgcaccatgctccacccgttaatctttttttaagagacagggtctcactatgtggccccctatgtggcccaggctgttctcaaactcctgggctcaagcaatcctcctgtctcagcctcccaaagtgttggattacaggctgagccaccgcgccgggtctgcagtttacaaccgaaaaaaacaaacaaacctttcccaaatcttctctgacccttaagccactgccccactttccctgtataacatattcccagagtctagtatggtgcctggggtatgtcagtaaggattaatacctctctagttaatctctttgtgtgaaaaaggggggaaattttttctttcttttttttttttttctgagacgaagtctcactctgtcgcccaggctggagagcaatggagcgatatcggctcactgcaacctccgcctcccgagttcaagtcattctcctgcctcagcctcccgagtagctgggattacaggcacgcgccaccacgccggctaatttttgtatttttagtatagatgggttttcgccatgttggccaggatggtctcgaacttctgacctcaggtgatccgcccacatcagcctcccaaagtgctgggattacaggcgtcagccaccgcgcccggccccaaattttcgactatattcttagaaaccaattctttccacgcagagctcgacagctcgaaacgctggggatattcataagtgcccagctgagggtatgaggcctgctcgctattttatcaatttcggagagagcgcatcgatactgcctgcctggaggctttgctgggaactagaaattctgagtcttcccctccccagcagcctgttcctttcctccaaaggacggttcgcagaacaggaacagagggctcagcggcccctgggcggaagacagtttataaaggagaaaatgaagaaggtgggtaatgcaacgaggtgaaaagaaacgttcctactggcgagaaaatgaataatgatattggtctccttcgccctgtaaggagccaaccaacctacctacagtacctcctttcctcactcgcgccttcccttcttctgggcagcgaacacgtttctatcgcgtgagctacctcttccggggttcctgggtgacaagttccggatcaagaatcacaaagcgagcagtcattcttcctcttgccacacccacagggcccgcactaagagcctaactgaaatcccgcgaggatcaaccgagctcgccgaaaggagggaggaacgtatcccttctggaggctgtctcagggggcagagggaccggaccggaagtgacgtgagcgggttccggttgtctggagcccagcggcgggtgtgagagtccgtaaggagcagcttccaggatcctgagatccggagcagccggggtcggagcgggtaggtaaactaactcagggaattggggaccgaagcctgaggctgtcctcagagcttggcgtcttccggagctctcccacttaggcattgcggatctggggcactgtgattccgacttccagcagtgttttaggacgctgctgactggatgtctcaccctggatgtctcacgctggcggtagccaggttatttgggacaccttctcatggttggtcacccggacattgaacccagacaccgggctgttcgttctcctctccgcgtacttggaagccttgctaggcttctttagagaacctcttagtcccgggatgtccaggaccttggagtaagtggagaaggtcttccctgctgatgactgagctatttctcaggatctgtcagtttggtttttgctctcccgaacctctggcgcatgatgctagatgtattcgctcctaaacgaaatccaggcgtgcaagtgccatctaaagctctggtggtacagggtagccaagggaatgggccttcgctccgcagagcccttggagaggaacttctcagatttttcactgctttaatgaaaaagagttgtctgcctttccaaacccctgaaccccgacctctatatcttattacagtggaggtatttgcagtaaaacgtgaaggtcgacttaatctctaaaattccagaaaccatatgtggccctgtgtcacactgctagattacttatgacctccagaagattttacacaatcatcttttatttacctgcaactccatgtaaaaatctaataatacacgtagactggccactgttgatgtgttttggcagcatcgctccttatcctaatgttaacgtctttcatttctactttggggcttgtcagagatttttgtggacagattacattgatcatttgaagaagcttgtacaagtgtttctggtgttgtcatgatagaatttaatattccagttgctactacctagtaattgtattgtcattagctctgattttagttgtgtattcttagcatagatgatgaaaggaagaaacttacttactaggcatcattgtatgcattgtagcttatgtttttactgtggaagagggatggtggtacctagacaaatgtgactgatttgtgtaggtatgaagtgactctctcgagtagaaattttatattttactactttgcctacattatcttaaggcactgaaggttacttttttcctttgagggatatatcctacttgattacaattgattaatacagtttaatttctatgagtcacattccagaagaaaatatacatagaaccatgatgccttttaccagtttacctatagctagttaaatcagtttgtcagtttacatatttttcttattttgagtttgaaaatttgttcacgcttggctttgaaacaaggtgacaaaatttgagatatggaattatgatagatgtatcattagtttaacattcggtaaatttgcttcttgattatataactgccaaatctgatcttatcttctttatgttcaattgaaggactgattatccagtttttctcacttttccaacttctcgcttttggcttgaatcaccactttttaggattttggtaactattaaactttaaatcagaagacctggattgaagtctgggctccaacacttgttaagtaatggctgataggttacctaacattctgagctggtctagattgtgttgataaaaattctgctcactttctttcataca

SEQ ID NO: 1244574 - DNA, 4001 bp, Homo sapiens
ggtgctaccttctcaatggagctgatggtgacgccggccgcgcaggacaccacaatgtgtctgtcctcaatgtcggcgcctatttcatccaggatgaaggggatgatgtgtggcttcacagccaggaagagcacatcactgtgctgcaccgtctccttgttgtggggtgtcaacttcacccccatcttctgcaggggcaacaggtgggctcagcctggtcccgtggctgtctgtacccccaccaagccaagagccccacaggtagaatggcacagagaatgctggagttgggggtgggcagggctgggggctcagggctctgaccacccccttgatgacccttcccacccagaaatggaggaagaactctgtgtggaatatgtccctgctgcagacagaaaaggaccctccatccatgccaccaatctgcccccagcctgggactgccgtcctccagaccgggctctccacgtgggagtggtggtctcaagcagcccccaggtgtgttccttggctgccaggctgtggccccacctgccaggcccccagaggacccctcgaaactttaaccctgtgcagggaactccattccagaacaacaccctcctatcagctgtacacacgcccaccacccaggtcccaagagcaatcagcagggcgaggaggtggggtccatgagaccccagcccagggcccctgccctcactggggtgggggctacagcacacactcctgcctctcacacccagccccacagggactcagtctcctttctccctttcatctgcacctaccctgagagcagaaactgtggccaggtccatgtctggggagctagccattatcttgtgggcagccaagacgcctgaggggagaaacagttcctcttcagttctttattatttttttttttttgagacggagtctcgctgtgttgcccaggctggagtgcagtggcgcaatctcggctcactgcaagctccacctcccgggttcacgccatgctcctgcctcagcctcccgagtagctgggactacaggcgcccgccaccacacccggctaatttttggtatttttagtagagacggggtttcactgtgttagccaggatggtctcgatctcctgacctcgtgatccgcccgcctcggcctcccaaagtgctgggattacaggcgtgagccaccgcgcccggccggaaacagttcctcttcatggctagctttggcttccctccctccccattcccaggaagaagagtgagacagcacaggtaaagccccaaacacacagaagttgccagttcccgcaggactcaggccttgtgacccagcacccaccttcagcccccagccctgcagaagtggaaagaggccagtctctcccactgggcctcaccgtcccccacctgggggcctacctgctgctgtgaagcccttggccagggcaaaagccagctggccagcgccgatgaagcccacgctcatgctgtccggagacccctggcccaaagcccccacagatggcaccggctctgcgggacgagaccggcaggatcgagagcaagttaggggggcagtgccagcctggccgctcctcccgcagccgggtgcccacctcccctggtcccagctggtctaactttccactttgctgtccggcccgttaactgcttcggggcccccagtcagagcggcggtgcctggcctgctgcctagggtcccgcacccactggaggggtggaggttccgcagaagaaatgactgggaagggggaaaagtacggggagagggagggcccggcgcctaggggtcccccgtctgggttcccaccccgcccagaactgggctaccgtcgcgccccacccggcgaccgccgcccaccattcccggagcccgaccccaacccagctaccgtgcgcgggtcgtacccacccctcagcgctgcggccgccacgcggcacccgcacccaggccccgcccccgtcgcgccagcgaatccgggcgcggccgccaggcgctggccaatcagagcgcgcggcggcgccagagcggttgcatcatctgcgcgcccctcccacgccgaccgccggccctcgcctctctcgcgccccgggatcccccggcccccggatagacaccctctccggcacgcggtcccctgacccgcgctcctcctggtcgcgcttcccgggacctacacgtggggtccgaggacgcgggcggagggggcggcccgattggggcctgtgaggggccctccacgcagggctttgtcttgggccacccggacacggacgcgtccagctggcgtccctgggcgcgcggccggctctctctgggaatcagtcccttctactgtcatcgagtttggagaagcccggctgtacagcgttttctttcctttttttttttcccttgggggcagagttgaaaataatttgccaagtggaagcattttaaatatatcaccatttgggccgggcgcggtggctcacgcctgtaatcccagcactttgggaggccgaggcgggcggatcacctgaggtcaggagttcgagaccagcctgaccaacatggtgaaacccccgtctctactaaaaatacaaaaaattaaccgggcgtggtgacaggtgcctgtaattccagctactcgagaagctgaggcaggagaatcgcttgaaccctggaggtggaggttgcagtgagccgggattgcgccactgcactccagcctgggcaacaagagcgagactccatctgaaaaaaagagagagagaaagaaaggaagaaaagaagaaaagaaaagaaagaggcatgacagtgcggccacaggtgttcctctaactgggcacgcagcggtgctccactaagcaaacgaaggaagcccaccccatcatgcccccactcccacgcagcccggagcatcctccaatacccaaacctctcgcctgcctgggttttagggggagtgaagctccagtcacttccccctgaggacatgctcagagttcatctgattcgggcctgcatctggggctctggatagtcagggtccctgtcggtggccaagattaagggcgaagtcagaagggatcactggcagcccattcccctgccaaggggtgagaggagctgccttattttttctgtgctgtatcttagatgatgacaggctattctagcacatcatttcagaaggcctgggatgcttctgccacagcggcagggccacgcgttctggctatctgtctacctggtccccccaccgtgaacacgtaatgaccaccaccaacactgggaggctgctctgtggtggccatgggaagagcttgtccagatggacagctcaaacctggggcacggaggctagcatcgcctaggcgctttgagagccaagctccccaggctgttacaaaatcacttttccccaagtgataacagcaagtaacacttttacctaaaaacccaaaaacccaaaatggacagccctctgggccagggatacactgtcaaaaggactgactctgaaggaagtctcccagccctgggtcccctccccttcctttctgtccctcaggacctttgcgaaggtggcagaggaccaccggacagggaggaaattgggaagttggtgacaattaactcgtttcagaattctggccacatgaaaaaaaggagagaaggaggctgggtcctctccaagactggtgcccaggtctcccctgagtcaggaagcaggtgatccctatgccccctctgtatcgccctcagccagcggcaggccctgaacagctgactgccctcatctgggatctgccattgaccccaaaacacccaccccctctgagtaaaggatgtcggccggaccctgtttgttggctaacgtgagcgagacccctcctcagcggccagtgaggccccttcctcacattcttcatggcagcagcacaggcctggctgtggggaccgccgtctaaaaggagcaacagtgcgtctgtcc

SEQ ID NO: 1244575 - DNA, 4001 bp, Homo sapiens
cgggacgctgcaacccttttgcagatgaaaactgaagtactgagggcccgggctctagacagcccctctccacaccccactgggcctgcggtgctaccttctcaatggagctgatggtgacgccggccgcgcaggacaccacaatgtgtctgtcctcaatgtcggcgcctatttcatccaggatgaaggggatgatgtgtggcttcacagccaggaagagcacatcactgtgctgcaccgtctccttgttgtggggtgtcaacttcacccccatcttctgcaggggcaacaggtgggctcagcctggtcccgtggctgtctgtacccccaccaagccaagagccccacaggtagaatggcacagagaatgctggagttgggggtgggcagggctgggggctcagggctctgaccacccccttgatgacccttcccacccagaaatggaggaagaactctgtgtggaatatgtccctgctgcagacagaaaaggaccctccatccatgccaccaatctgcccccagcctgggactgccgtcctccagaccgggctctccacgtgggagtggtggtctcaagcagcccccaggtgtgttccttggctgccaggctgtggccccacctgccaggcccccagaggacccctcgaaactttaaccctgtgcagggaactccattccagaacaacaccctcctatcagctgtacacacgcccaccacccaggtcccaagagcaatcagcagggcgaggaggtggggtccatgagaccccagcccagggcccctgccctcactggggtgggggctacagcacacactcctgcctctcacacccagccccacagggactcagtctcctttctccctttcatctgcacctaccctgagagcagaaactgtggccaggtccatgtctggggagctagccattatcttgtgggcagccaagacgcctgaggggagaaacagttcctcttcagttctttattatttttttttttttgagacggagtctcgctgtgttgcccaggctggagtgcagtggcgcaatctcggctcactgcaagctccacctcccgggttcacgccatgctcctgcctcagcctcccgagtagctgggactacaggcgcccgccaccacacccggctaatttttggtatttttagtagagacggggtttcactgtgttagccaggatggtctcgatctcctgacctcgtgatccgcccgcctcggcctcccaaagtgctgggattacaggcgtgagccaccgcgcccggccggaaacagttcctcttcatggctagctttggcttccctccctccccattcccaggaagaagagtgagacagcacaggtaaagccccaaacacacagaagttgccagttcccgcaggactcaggccttgtgacccagcacccaccttcagcccccagccctgcagaagtggaaagaggccagtctctcccactgggcctcaccgtcccccacctgggggcctacctgctgctgtgaagcccttggccagggcaaaagccagctggccagcgccgatgaagcccacgctcatgctgtccggagacccctggcccaaagcccccacagatggcaccggctctgcgggacgagaccggcaggatcgagagcaagttaggggggcagtgccagcctggccgctcctcccgcagccgggtgcccacctcccctggtcccagctggtctaactttccactttgctgtccggcccgttaactgcttcggggcccccagtcagagcggcggtgcctggcctgctgcctagggtcccgcacccactggaggggtggaggttccgcagaagaaatgactgggaagggggaaaagtacggggagagggagggcccggcgcctaggggtcccccgtctgggttcccaccccgcccagaactgggctaccgtcgcgccccacccggcgaccgccgcccaccattcccggagcccgaccccaacccagctaccgtgcgcgggtcgtacccacccctcagcgctgcggccgccacgcggcacccgcacccaggccccgcccccgtcgcgccagcgaatccgggcgcggccgccaggcgctggccaatcagagcgcgcggcggcgccagagcggttgcatcatctgcgcgcccctcccacgccgaccgccggccctcgcctctctcgcgccccgggatcccccggcccccggatagacaccctctccggcacgcggtcccctgacccgcgctcctcctggtcgcgcttcccgggacctacacgtggggtccgaggacgcgggcggagggggcggcccgattggggcctgtgaggggccctccacgcagggctttgtcttgggccacccggacacggacgcgtccagctggcgtccctgggcgcgcggccggctctctctgggaatcagtcccttctactgtcatcgagtttggagaagcccggctgtacagcgttttctttcctttttttttttcccttgggggcagagttgaaaataatttgccaagtggaagcattttaaatatatcaccatttgggccgggcgcggtggctcacgcctgtaatcccagcactttgggaggccgaggcgggcggatcacctgaggtcaggagttcgagaccagcctgaccaacatggtgaaacccccgtctctactaaaaatacaaaaaattaaccgggcgtggtgacaggtgcctgtaattccagctactcgagaagctgaggcaggagaatcgcttgaaccctggaggtggaggttgcagtgagccgggattgcgccactgcactccagcctgggcaacaagagcgagactccatctgaaaaaaagagagagagaaagaaaggaagaaaagaagaaaagaaaagaaagaggcatgacagtgcggccacaggtgttcctctaactgggcacgcagcggtgctccactaagcaaacgaaggaagcccaccccatcatgcccccactcccacgcagcccggagcatcctccaatacccaaacctctcgcctgcctgggttttagggggagtgaagctccagtcacttccccctgaggacatgctcagagttcatctgattcgggcctgcatctggggctctggatagtcagggtccctgtcggtggccaagattaagggcgaagtcagaagggatcactggcagcccattcccctgccaaggggtgagaggagctgccttattttttctgtgctgtatcttagatgatgacaggctattctagcacatcatttcagaaggcctgggatgcttctgccacagcggcagggccacgcgttctggctatctgtctacctggtccccccaccgtgaacacgtaatgaccaccaccaacactgggaggctgctctgtggtggccatgggaagagcttgtccagatggacagctcaaacctggggcacggaggctagcatcgcctaggcgctttgagagccaagctccccaggctgttacaaaatcacttttccccaagtgataacagcaagtaacacttttacctaaaaacccaaaaacccaaaatggacagccctctgggccagggatacactgtcaaaaggactgactctgaaggaagtctcccagccctgggtcccctccccttcctttctgtccctcaggacctttgcgaaggtggcagaggaccaccggacagggaggaaattgggaagttggtgacaattaactcgtttcagaattctggccacatgaaaaaaaggagagaaggaggctgggtcctctccaagactggtgcccaggtctcccctgagtcaggaagcaggtgatccctatgccccctctgtatcgccctcagccagcggcaggccctgaacagctgactgccctcatctgggatctgccattgaccccaaaacacccaccccctctgagtaaaggatgtcggccggaccctgtttgttggctaacgtgagcgagacccctcctcagcggcca

SEQ ID NO: 1244576 - DNA, 4001 bp, Homo sapiens
ttgcagatgaaaactgaagtactgagggcccgggctctagacagcccctctccacaccccactgggcctgcggtgctaccttctcaatggagctgatggtgacgccggccgcgcaggacaccacaatgtgtctgtcctcaatgtcggcgcctatttcatccaggatgaaggggatgatgtgtggcttcacagccaggaagagcacatcactgtgctgcaccgtctccttgttgtggggtgtcaacttcacccccatcttctgcaggggcaacaggtgggctcagcctggtcccgtggctgtctgtacccccaccaagccaagagccccacaggtagaatggcacagagaatgctggagttgggggtgggcagggctgggggctcagggctctgaccacccccttgatgacccttcccacccagaaatggaggaagaactctgtgtggaatatgtccctgctgcagacagaaaaggaccctccatccatgccaccaatctgcccccagcctgggactgccgtcctccagaccgggctctccacgtgggagtggtggtctcaagcagcccccaggtgtgttccttggctgccaggctgtggccccacctgccaggcccccagaggacccctcgaaactttaaccctgtgcagggaactccattccagaacaacaccctcctatcagctgtacacacgcccaccacccaggtcccaagagcaatcagcagggcgaggaggtggggtccatgagaccccagcccagggcccctgccctcactggggtgggggctacagcacacactcctgcctctcacacccagccccacagggactcagtctcctttctccctttcatctgcacctaccctgagagcagaaactgtggccaggtccatgtctggggagctagccattatcttgtgggcagccaagacgcctgaggggagaaacagttcctcttcagttctttattatttttttttttttgagacggagtctcgctgtgttgcccaggctggagtgcagtggcgcaatctcggctcactgcaagctccacctcccgggttcacgccatgctcctgcctcagcctcccgagtagctgggactacaggcgcccgccaccacacccggctaatttttggtatttttagtagagacggggtttcactgtgttagccaggatggtctcgatctcctgacctcgtgatccgcccgcctcggcctcccaaagtgctgggattacaggcgtgagccaccgcgcccggccggaaacagttcctcttcatggctagctttggcttccctccctccccattcccaggaagaagagtgagacagcacaggtaaagccccaaacacacagaagttgccagttcccgcaggactcaggccttgtgacccagcacccaccttcagcccccagccctgcagaagtggaaagaggccagtctctcccactgggcctcaccgtcccccacctgggggcctacctgctgctgtgaagcccttggccagggcaaaagccagctggccagcgccgatgaagcccacgctcatgctgtccggagacccctggcccaaagcccccacagatggcaccggctctgcgggacgagaccggcaggatcgagagcaagttaggggggcagtgccagcctggccgctcctcccgcagccgggtgcccacctcccctggtcccagctggtctaactttccactttgctgtccggcccgttaactgcttcggggcccccagtcagagcggcggtgcctggcctgctgcctagggtcccgcacccactggaggggtggaggttccgcagaagaaatgactgggaagggggaaaagtacggggagagggagggcccggcgcctaggggtcccccgtctgggttcccaccccgcccagaactgggctaccgtcgcgccccacccggcgaccgccgcccaccattcccggagcccgaccccaacccagctaccgtgcgcgggtcgtacccacccctcagcgctgcggccgccacgcggcacccgcacccaggccccgcccccgtcgcgccagcgaatccgggcgcggccgccaggcgctggccaatcagagcgcgcggcggcgccagagcggttgcatcatctgcgcgcccctcccacgccgaccgccggccctcgcctctctcgcgccccgggatcccccggcccccggatagacaccctctccggcacgcggtcccctgacccgcgctcctcctggtcgcgcttcccgggacctacacgtggggtccgaggacgcgggcggagggggcggcccgattggggcctgtgaggggccctccacgcagggctttgtcttgggccacccggacacggacgcgtccagctggcgtccctgggcgcgcggccggctctctctgggaatcagtcccttctactgtcatcgagtttggagaagcccggctgtacagcgttttctttcctttttttttttcccttgggggcagagttgaaaataatttgccaagtggaagcattttaaatatatcaccatttgggccgggcgcggtggctcacgcctgtaatcccagcactttgggaggccgaggcgggcggatcacctgaggtcaggagttcgagaccagcctgaccaacatggtgaaacccccgtctctactaaaaatacaaaaaattaaccgggcgtggtgacaggtgcctgtaattccagctactcgagaagctgaggcaggagaatcgcttgaaccctggaggtggaggttgcagtgagccgggattgcgccactgcactccagcctgggcaacaagagcgagactccatctgaaaaaaagagagagagaaagaaaggaagaaaagaagaaaagaaaagaaagaggcatgacagtgcggccacaggtgttcctctaactgggcacgcagcggtgctccactaagcaaacgaaggaagcccaccccatcatgcccccactcccacgcagcccggagcatcctccaatacccaaacctctcgcctgcctgggttttagggggagtgaagctccagtcacttccccctgaggacatgctcagagttcatctgattcgggcctgcatctggggctctggatagtcagggtccctgtcggtggccaagattaagggcgaagtcagaagggatcactggcagcccattcccctgccaaggggtgagaggagctgccttattttttctgtgctgtatcttagatgatgacaggctattctagcacatcatttcagaaggcctgggatgcttctgccacagcggcagggccacgcgttctggctatctgtctacctggtccccccaccgtgaacacgtaatgaccaccaccaacactgggaggctgctctgtggtggccatgggaagagcttgtccagatggacagctcaaacctggggcacggaggctagcatcgcctaggcgctttgagagccaagctccccaggctgttacaaaatcacttttccccaagtgataacagcaagtaacacttttacctaaaaacccaaaaacccaaaatggacagccctctgggccagggatacactgtcaaaaggactgactctgaaggaagtctcccagccctgggtcccctccccttcctttctgtccctcaggacctttgcgaaggtggcagaggaccaccggacagggaggaaattgggaagttggtgacaattaactcgtttcagaattctggccacatgaaaaaaaggagagaaggaggctgggtcctctccaagactggtgcccaggtctcccctgagtcaggaagcaggtgatccctatgccccctctgtatcgccctcagccagcggcaggccctgaacagctgactgccctcatctgggatctgccattgaccccaaaacacccaccccctctgagtaaaggatgtcggccggaccctgtttgttggctaacgtgagcgagacccctcctcagcggccagtgaggccccttcctcac

SEQ ID NO: 1244577 - DNA, 4001 bp, Homo sapiens
ctacaacaacagagggtcctctttccccctctacaacaacagagggtctgactggatcagagtgtacccaagggcaggatgtgtgcagctgacagtgcccagcacatggacacagtatgaagtaacattgaatcatatcctgtgaatgttttcaagcctttcaactcctttccaaaacttgcttaacagcatggatctggagcagaactgcttcctagaccagctccacggcttgtgagctgagtgaccctgatcctcacatatttctgtacctccattttctcatctgtaaaatgggaataatgataatagctatcctggagtcactgagaggattaaatgaatgactatttgtgaagtcctttgcatagtgcctagcattcgacatgtgttagctattcctctaccacacagaaggctttgcttggtgctagggtatctttaacacatggcacctgctaaccttccatgttaccaagaaagcaggcaagctatgcagatggaatataatggaatgtaataacattgttttcctctcacttgattcttttttaattttgattttaattttaattttaatttttttgagacagggtctcattctgtcgcccagacgggagtgcagtggcacagtctcagttcaccgcaatctcctcctcccaggctcaagtgattctctggcctcctgagtagctgggattacagaaacatgccactactgcctggctaatttttgtatttttagtagagatggggtttcaccatgttggccaggctggtcttgaacttctgacctcaaatgacccacccgcctcctcacttgattcttaaggcttatggcaagtgatactggcctagttacagacctaacatggataaactttaagtttaaaaaggttaaagagggccgggcgtggtggctcacgcctgtaatcccagcactttgggaggctgaggcaggtggatcacgaggtcaggagtttgagacaatcctggccaacatggtgaaaccctgtctctactaaaaatacaaagattagccgggtgtgatggtgtctgcctgtaatccctgctactcaggaggctgaggcaggagaatcgcttgaacccagaaggcggggattacagtgagccgagatcgcaacactgcactccagcctgggcaatagggtgggactccatctcaaacaaacaaacaaacaaaaaaaaaaaaaaaaaaaagggttacagaggtcgagtgaagtagctcacacctgtaatcccagcaccttgggaggcagaagtgggaggactgcttgagctcaggagttcacgaacagtctgggcaacatggtgaacacccgtcttcaaaaaaaataatttttttttaaatcagctgggcatggtggtgtgcatttgtggtcccagctactagggagactgaggcaggaggatcatttgaacctgggaggtggaggctgcagtgagctatgattgcaccactgtactgcagcctgggcaacaacagagtgagaccctatctcaaaaaccaaaataaaaaactctattttattttatttttaccagatgtgatattcgataaagaaaagcattaacactaaagtattataagttttgaggggtgttttgaggatatcacagaattcctcaagctggtacccagtgactggagtttggcaaaccctggtaacctcatggtcattcattaggatcttttttgagctcaggcaacaggacagacaaggccagcaccacccgcccccgccctcccactgccccccttcttctactctttccagcgccctccttccagccccctgcccagccctgtgctcaaagccacctacagtcccttcttctctggtcagaatgccaatcatccaaggccctgcagactcccaaagccgcccctggaacctaccttggcagcagattaaagacaacccgccacatttagtctcggccccatgaccgatagtgggttcagttcctccaggggcgggggagcctagtggccccgccccctgactcatggcctgaccctcctcaaacgcacccagaggagactcctggtcccctgtccggaccccgccccgaccaggtccagccccgcccaacggcaagttaagagccccccagtgccagacgctccagacagactgccactcttggggggcaagagttggttgtcgtcatggcgacggcgctgatggctgtggttctgcgggcagctgctgtagccccgaggctgagaggccggggaggcactgggggcgcccgaaggctgagctgtggcgcgcggcggcgggcggcgaggggcaccagcccggggcgccggctcagcaccgcctggtcgcagccccagcccccgcccgaggagtacgcgggcgcggacgacgtctcccagtcgcccgtcgccgaggagccgtcgtgggtgccgagtcccaggcccccggtgccccacgagtccccagagcctccttcgggccgctcgctggtgcagcgggacatccaggccttcctgaaccagtgcggggccagccctggggaggcgcgccactggctcacgcagttccagacctgccatcactccgcggacaagcccttcgccgtcatcgaggtgagcggagcccggcgtgggccgtgacgcagcgaggggatggggttgtgcggccacctgtcctcaggcatggcaggatacgctgcgggctctgcgcagcggaagcgggaaggagcccggcagggcccagaccagcgccgccgggaatgggagaggccgtaagctcctccggaagcctcccgcccagcccgagtgaggatcctgggggaccccacccgccaggtgtgatgctctgaagaaggcccccaacatgggcgcagttaggggttcagaaggacctggacaggagccgcttgcactgcccctcccccaaagatgtcccggagtccaaggtcggagggaggagggcgggaggtaccccagcgtgagacaagggagtggcaagacccaacggggcaaagggcggagcaggtgggcactggtggccagaactgggtcctgacagcttctggaagggtagggtcaccgagacggccctgcaggccaggctgtgggagccagcggctcaggtccgtgtcacgctccttgaaagcccactcctccgcaggtggacgaggaggtgctcaagtgccagcagggcgtatccagtctggcctttgccctggccttcttgcagcgcatggacatgaagccgctggtggtcctggggctgccggcccctacggctccctcgggctgtctttccttctgggaggccaaggcgcagctggccaagagctgcaaggtgctggtagacgcgcttcgacacaacgccgccgctgctgtgccattttttggcggcgggtctgtgctacgcgctgccgagccggctccccatgccaggtgagtgcccgccctgcccgcccaggcgtcctcagagcgtgctactctgcccgccctgccccgtccggcaggcctggagggggccctctcgagcaccacgtctggcccacagctacggcggcatcgtctcggtggagacagacctgctgcagtggtgcctggagtcgggcagcatccccatcctgtgccccatcggggagacggccgcgcgccgctccgtgcttctcgactccctggaggtgaccgcgtcgctggccaaggcgctgcggcccaccaaaatcatcttcctcaataacacaggcggcctgcgcgacagcagtcataaggtgcggccctttctttcaccttcccccacgccggcgatccgggccttctcttgcgcccctcgcacttctccccgacgggccgcagactcactagcaagccgggtgggtagaaaagcctaagggagtataggggaggagttcagccctgggtgcccagatctgcgccctccctggctaaggactccgggcggaagtaaggataaaggggtcagagaaaagagaggtccgtgggg

SEQ ID NO: 1244578 - DNA, 4001 bp, Homo sapiens
gtgccaggtacctcaacagtagctgaacatctgtgctatctaaagagaaaagcacctcaaaagaaccaaagcaaatcgctacaacataaggtgctatcatatttgggattaagaaaaaatatattaataaacaaaaataaaacaagttactttttataacttttgcaaacttctagaatctaagattacgtaaaaattaaaacaaaaggccaggcgcagtggctcttgcctgtaatcccaacactttgggaagccgaggcaggaggatcactttaggtcaggagttcgagaccagcctggccaacacggcaaaaccccatctctactaaaagtacaaaagttagctgggcatggtggtgtgcacctataatcctagctactcgggaagccgaggcaggagaattccttgaacccaggagatggagttgcagtgagccgacaatgcaccactgcactccagcctgggtgacagagtgagaatgtgtctcaaaaaaaaaaaaaaaaaaaaaaaaacccaaaaaaattaaaacaaaaaaaacccccaccacactttaaagtttgaaaaggaaagcagacatgcttcccagagcaaaagtgagttggtgctgcggtctcgagacctggggtgatatggcaggagggcatgagcggccagggctcccctgctggggcttggcctcttcttcctgcctcttcccggcctctttttcccctcctgtctctcctcttggcctccccacccagctgccttcctagttgcttctgctttttctttcagaaccaacctaaggtggctctgagacatgcacgtgtctattacctcctggcgctgacctgcgttgcttcctgctgttcactggacaatacttatactcaatgattacatgcatttgtccctccaagaaaacaaaagtccagttgaaggcagggctcagtggctcacgcctgtaatgcccagcactttgggaggccgaggcgggcagatcacttgaggtcaggagtttgagaccagccccgccaacatggtgaaactccttctctactaaaaacacaaatattagccaggcggggtggcgcgcgcctataatcccagctactcgggaggctgaggcaggagaatcgcttgagtctgggaggcggaagttgcagtgagccgagactgcaccactgcatttcagcctgggtgatagagtgagactccttctcaaaaaaaaaaaaagtccaagtgaaacggtcccctgcctgctgtggcttgtgtcatggccataggaagctgaggtccaactctccatcctgactccccttctctgggagcctttgtcctcaacacgtatctcttcatgtccttattcattttaaaaagggaattcactctaagaatcttctgagaagttgccggccccactctgagccagctctgggtccttggatgtctgataagtggtgggcgaacctctcccgtaaacaggggctaggaaggagggggtgggatggggccactacacttaggaggtggggtccccaggcccctccagctcggggaggccctaggccttttggtggcgttcttttaggattttcacgtcttgcagccccgtggactgcaaggtagagcatgggccactctatttagccagtcgcactgaggtctggcacctcctcggtccccatcccctccgtccccaccaccgctcacccctccagggtggtggggactcggctaggcctggagggcggcctggaggaggcagacggcctgcgcgtgcctccgtgtgcgtgctcaccctggcaaagctgagctcctcggcggcgtccttcatgatactcccagtccgcaccctatcgaacgcccgcacgcccacctcctgctcctccggccactctagcgcggccaggtcaagcccgctggcctgggagaagtgctgcacgtgcgtggcgatgccctgcacctggccgtccacacgcttgagctgcttgctcaggtcctccacctggccgcccaggtccttcacttggctctccagcgctgacgaaggcgcctggcccacgcccctgcgcttctcccggggcgcccccttgggcacctccttgggcgcgggcaggtgcgggatgctgaacgagctccggacggactgcagcgagcggctgggctcgggcgacgagggctggaagtcgatccgggtattttggaggtcgaggttcttgagcatggccacgatgagcgtgtgcagggccgtgaagttgacggcgcccacctctggcgtgccgatggagaggtccgccagctcccggagggagaccgtggtcgcgggcggcatcgtggctgtcaggagctgtgcgccgccgcggggcgccggccaaccacttcccgctcactgcacgccgcgccttggggcctttcgggggccctgcgaggtcctcggggcgcccctgccccgggtccggccgagtcactggacagagctcctgcctccagggaatctgcgcctccgctccccggcggggtccgcgatggccacccctccgctgtctgtcgctggcctcgggtccccgagctggagccctggactcccagtccccgcgccggcggacgtttgaaacgtgggggcccccgcgtgccctgaagattccacgtaacaacacgcctccctgcgagccacgggggcggggggaagtaaaggccaccacaaggatcacaaggggagccttggcaacgggctgaggaggcctcctaagatccagctagactccatccatccccttaacctagaaaggccaggattcactcactcttggcggggccacataaggaaagacttgagggtttcctggcaaccatgctttgtgtcatcagctgcgtccattccagagtggtggccccatgtctatggccccatgtctaagggatgcagtcctggggccctggtcccctcagacagtccacatattttgttcaatcaaaggtgaagcaacttggaaaagacaacccactcactattcaggcagttccaattagccactagatgactaactggtggctaattgtcccttttctgtgctgccataattttttttttacttttgagagggagtcttgctctgtcgcccaggctgtagtgcaatggcacgatctcggctcactgcaacctctgcctcccgggttgacatgattctcctgcctcagcctcccgagtagctgggattacagatgcgtggtaccatgcccggctaattttttgtatttttagcagagacggggtttcactatgttggccaggctggtcttgaactcccgacctcaagtgatcgacccacctcggcctcccaaagtgctgggattacaggtgtaagccaccgcgcccagcctgccataaattaattgatctcaaaaaaacggccaggcttggtggctcacacctgtaatcccagcactttgggaggccgaggcgggtggatcacctgaggtaaggggttcaaggccagcctagccaacatagtgaaacccctctgctaaaaatacaaaaaattagccgggcatggtaccgcgcatctgtaatcccagctactcgggaggctgaggcaggagaatcgcgtcaacccgggaggcagaggttgcagtgagccaagatcgcaccactgcaccccagcctgggcgacagtgcaagactctgtctcaaaaaaaaaaaaaaagaaaagaaaagaaaccactcacctggtcaagcgcctgtgcttgagctcattacaaagcaggattaaacagcacgagacaaatctggtgttaacaattgagacatgacttccccatacaagattcttcccaaaaacgtataaataaaacttcctaacagaagcacagcaaggctacttaaagagaacctatgaatgtgtgccatgcatggccagcctcctccgtgagctctgcatctgcagatttaaccaaccacgactgaacacgtacagattcctgtcatgattctctaaataatacagcatgaccacca

SEQ ID NO: 1244579 - DNA, 4001 bp, Homo sapiens
gtgatgactaagtgacaagcaggtctgtctctagagtgtatgagggagaaggttctaatggcaggaactgtccagctgggggagaagtgggtgaggcttgctgggcacgtggctgaggccggtggcccctgccagaggttgttgggaggcccttcccactactgaggctctgagttcggggactccaggtttcagccagagctggtagcttctttacccgacctgcagtctgtgttctgagaggaaggagcgcgactatccccatgccaggagtctgctcagcctgccccagatgggagccactggaaaaacggaagggcttggctggcctttggggaagaagggtcatggtggcagcaggcagtgtccctcagcaaagccccgcagagggcagtctgggctctcacaggcactgcagtggtctttcctgtggtgggtacctgagttctcaagccctgaagctgcctcactctcttctgcccacagctctcagcgactcacaagtcccggcccatgcccaggtgcgggtggagagatgattctcaatcgcctcccactctctggtgacgcagaggcacgggcccaacctggccatcacccagcttctcccatgttctgaaatgcctggtccgacctgttctgggaacacaatgccagccagtgcccatttgaggcccatggccccaggccccccatgcagggcctgaggccttagatggccttggaaacccacttctcagggcttttggctccaggggaaacccctgaccatttcagccaggtgggtgtcttgtcctccccttgagacacagtccccagtccccatgccggtggcaccagaggacactggtgtagtgtgcgtttagtgatatgactccgtccaccctactggcggcaccgaccctccgcttccagccctgttaacaatctacgtaagtcctgctttccccaaatagatgcggccccgccacatgaaagccctctgctcagccaccactccccgagcctggctttgcctggcctgctgcaaccaacacagccagctgccagcctggctgcccagcagagcctgaatgagaggtcacccgacactggcccgggagtacacggtggccccagcagacacctccttccgtgtctgggcagggtgtgtgcagccgaggagccaaggctgcagagcacccctaccggtccctttcaccccctggcccggcccagcaggacgtacacagacccttgcatcttggtctccgcagcgccgggtggggtggggagcctagggccggattctggcagctctctcccccagacaagggtggatgtgcagaccgctcagaaggacctgcatggccgaggaaggaaggtgggcgcagaagccaccctaggcgtgacgcgtgacgctcggggcacgggcgccggggggcggaaagcgagggcccggctgggccagggatacccggggggggccgaggtcctgggctccggcggagggaggggattgggagggaggccaccgcctcgggccacgcgggtgacccggcgggggagctgggggaggggcggcggggctgggctggggtccccgggccgggactggggtcgggccagcttacctcctcgccctggccgaagcgcagtccgagcgccgcgacgcgctccacgcgcaggaagccgtcggggtcgcggccgcacacctcgaacacctcgcgcaggcggcgcacggagcgcagcagagccgcgggggcgcccgaccagcccgcgccgcccgccatccgggccggcccgcagctcagcccggacccctcgcccgccgcgcccgccgcctgcccgccgccgccatcgccgcgcgccctccggggccgcccgtctgggtctgcgccgcgcagcctccgcccggtggcggccgcggccgatccgtgtcagcagcggcgccgcagccccagccgctccggaggggaagggaggggaggggagggaaggagaagagtggggaggggaaggaggaggggcaatagggggcggggaggggaggggcgggggccgcggcgaaaatgggagggagagggggaggcggcgggggcggcggcggcggggacgctgcagacaaaaggagcccgcgtcctcccgagtggggcggcccacgcggggccggcaggcgcagcgagctgccaacggccgcgtcctccgcgacctcagtttccctccgcgtccccagtttccctccgcgtccccgagcccaccccttcctctggacacccggagccacccaaaggccctgccctgccggaggattccgcggggtcgcgcccctttccgctatccgtgcccgctgccgcgcctggcgtctcccgagcgctcaggatgtcctgggggcctcctgcattggcgcgttccgtgactgcattcatcccggaggaagctgaggcccagagaggtcggactcactctaggccacacagctggcaagaggcagggccgggattcgctgccatctctggagggctctggactccgttcttcacctccgccctgcggtctcccggcgctctcctgcaagacagcacttgtggggccatcgggcgggggagggcacagagaggaggagcaggcaactgaaccccagcctggacccgggaccctgcgacggggagatgaggagaaaaccaggatgaggccggagggaggaaaagcgaggcgcttccagaggcctgcctgttcagggcccaaggctgctccacgcctggaagaggcttcctccctttcgccgggttcccaccatcacacctccctggcagcccgcatgccccaagctcagagaatccaggacagaatctctgtcccgctggccgcaggctctaggtcaggaccctggcctcctcccattagtgctcagcggagcctccaccccagcttgtgctaacttcccagcccagcctcggggccctgcaggacccggccgggctcttctctccaccttcttgctcggcacatcaggtctttgtggcaacgactggccccaacccaaaaaaaggccttggctgagtctactcccacctatgctgtcatgctcagcacagaggtttcctcctccgggaaggcttctctgatggcacgccatcttatcttctattctgagttctaagcccttcttccaggtgcccagttaattcttaattctctagtgggatgcccatttcccctaccatgctgggaagccctccagggcaagatatgtcttaattaccttcaagtccctgatctccaggcaagagtgggcccagaggaagccccacccagaggggatgggcccgcccattatgtgaggagccgggagcaacgtagtggcgcagacagggagtacggggtgaactgcatggcctcccctagctgggcctcggtttgtacctctgtggtcttcctgctcaaccctgaatatatcctgcgcagggactgccatttgccttctgacagtgggcggggacctcttctttccagccccggctcctgggatgaacctggcttttagctactctcctttgacccttcagttcgtctgagagccacgaaaggcaacacctcttgggaagagagacctgtggttctgaggattgaggagtccgaaatgtgagaaagcgggaaaggggaggccgtgggagtggagtaggggtattcggctgagtaggagcgtctctgctagctggatgccgctcagcaggatactagcatattttagccggtttcctcgcctgtaccgtgaggataatagtaccttccttttagggcaactgaagatgagagcgaatctaagcaatgctgctttcccccgacctaccctgcaaaatggaggtggaagtggagaataaggacaagcagctggctgggagagactggctgctggagatccagccagccccctggcaaggaggtagggagtggaagctgggggctgctgcctgcccctgggaccccgatattagttcgtccaaggtcagctcgtgcca

SEQ ID NO: 1244580 - DNA, 4001 bp, Homo sapiens
gctctcacactgattagctgtgtgactttggacacgttatttagcctctctaagcctcagtttaaacatttaagtaaagttagtatatattttactgggtcgttgtgaaggttaaaatgagataaatgtcctatattctaagacaccctcccccccgcattttaatgtctgaaatcaggatatatcttaagtgatggacttttccattcaataaagatgatagtacccaacactgcctggcacacagcaaatgcttaattaatggtgccaactgttatcagtattacctttaaaacccacaataagactcatccctgtaagcacagccagacccctgccctggggctccatggatgctatgtggggatctgagcaggtgaccaccttcccatttcagacaccttagtctctactcagaaatccagctgccacccttctacccaaccccatctcatagaactcacaacaaccttgttgggagaaaaggaggggatacaggggcttaaagagggggaaataaccatatagctggtaggggctgaaatgaagccccaagggggtggttgtttaccctcgctatgactacagagtttcctgggacctcctctctttgttgtgggtgtccctaactcaccccacggtgcctgtccggtgctcctggcaggcgcaggtgacgcgggggtggaagtctttgtgcccgtgcaaagcggcctccttcctcaggcacttagtgggaaggatggaagagaatggagcttcctactcctggcccttgtcccgcagccaagcggcccgggtaggggtggagtgcagggaccacccagaagcaccaggcctagctgggtggcagggctgggcccagtcctctaactggtctggtgccgcctcctcctcgcccacaccccgggctgtagactgaagcccgacgtggccccggcgcctacctggggcagctccgccaggacgcgatccctccgcacgggtgccagaatgttcatcctgcctgcggccttgcagggcgccctgagaaggcgccgaggccggatccgcgtcagcgacccgggcgcgtggagacccgacgatcacccgcggccggggtgtcccgactacaactcggggccacggggaccctacgggagtccgcggtctcggagacgctacgaccaccgcgggccacggagatgaaacaatcacccggggccgcggcgagcccaaaatcacccgggccctgggcgtcccgaagatgactctggggcgaggagactcttcggccgccaattgggggcggggagtcccgtctggtgggggccgggcccgcgcagaccctacgattacgcggggccggatagttcctacgattacgcggggccggatggttcctacaataacccggggccgcggagacccgacgtcatctcggggctgaggctgccctaccattacagagcggcccgggggcgcggagcggccccgccacacggggtcagtgtgggcaggggcggcgctgccaaggcccgcaggccgctggaggagggggcgaggggcccagtccggctacagggcctcgagtcccactccgctcgggctccgccaacgctgtaacacgatccccggaaattcctggagaagggccgccccccgcccctctcctggcggctccaggcctcgctgcccgccctcgccaccccctcctctccacccttctgcgttgccccgctcaggctccctcttttgacgcttcaccgggcaccaggaccgccccgacccaggctggagcctatccagatagggactccccaggctgctctcccctgcacctctatacccggctgcgccttcatggggacccttacccagccgaattggtgatggggaatcggagactgctgcgcagcatctggcgatgccaggaaccagcagggaggggaaagggggagagaaggggcccaaggagaggcggcgcttccctcctcaactccaggcctgggaggtgactcatagagtctgccccctctcgcccttctgccctgggaggtcgggggtgaggatggtggaggggaagcgtgcgaagggggtgccagggttagaatgaggtgcccaccgaggagagagacgtctgaagtctggcgtcttttccttcaaggctgctgtgtagattgtgaggtgggagggctgaagatcaagttccctcgagggaggttaaagaagggctaagtggacccggaaactctgctcttcggggtggtctccgctctgggaggcggggactcccctctggtatgggtgttcattgttctggccccattggaatctatcccccagggacaactcctttgtgcaaagtcctgcaggatagaagagggggcagtgcacaatcaatttcaccgtcaaaggggacatgtctggttttatgaagggagagggaagaagaaaggatcaagtggggatgggttaggcacacaccttaggagaagcgaacctgagtgttaagaaacctttctctgtgtctggagctgaatttgaggatgtaaagatgaccaggacacggaagggaagactagtttagggcaggggattgtgagtgaagttactaaccggaaaaactagcgaatcttggagaaatgtgtggaattttcatagaacttcaaatgcattatcaggaaacgcagtaaaacttgacagtatcagtgtcgcaggtaaagaggggcaggtgtggccgccttgtacttcctctgacacttccccctcgtgactcgattatttatttatttatttatttatttattttgagacagggtctcactctgccacccaggctggaatggctcattgcagcctcgacctccagggctgaagcgatcctcccacctcagcctcccaaggaactgggactacaggcacgcaccaccacgcccggctaatttttgtattcttttgtagagacagggtttcgccgtgttgcccagggtggtctcgaactcctgggctcgaagcaattcgtccacctcggcctcacaaagtgctgggattacaggcgtgagtcaccgcgcccggccctgacttgatttttttctgccaccaaatcactgtgttattgataaaccacattcctctctggacctcagttcgaccgagcaaatcctgctccagcactctagaacttagctgtatctaactcccgagtcaatccaaatgtgttctttcctcttggcagcgttcctgcctcctggcatggcaatcctcttccctgagactggcagttgctcaagataggaagctcccgggaccagacccgagcgccagccggctacgccgtccgctggcctgagcaaataaacgcgtgtcttcaaaaaactacaatccccatggtggcacgcgcctgtagtcccagctactctggtggctgaggcaggagaatggcgtaaacccgggaggcggagcttacagtgagccgagatcgcgccactgcactccagcctgggcgacagagcgctcaaaaaaaaaacaaaaaacaaaaaacaaaaaactacaacccccatgaagctttagtgcctttgaggggaggagtggcgcatgtttgttcacgcacgaaaaagaaattaaacctaactaccgttcccagagggcgccgctctgcaaattacccaatcagctctaagtacaaagcatcgcgagtctttagtgctctttggcgctataagcccgtgggaacgagcattggagacccttttcacaagatggcgccgaaagcgaagaaggaaggtgtgtgttggtgatggggccgcagctggtttaccggggattgccgcgccgcagagcgaacgaattgggaacacggctgctgggctaagccctgagggctctgctccggggctgctccctgcgtttcggacacgctgcagtatacgtgggccgcgtgggcccagcctcgtgggctgagttccggtagagggagttgggggggggcaacgcggcaggcatcatccgccagggagggccag

SEQ ID NO: 1244581 - DNA, 4001 bp, Homo sapiens; identical to SEQ ID NO: 1244407

SEQ ID NO: 1244582 - DNA, 4001 bp, Homo sapiens
cagctgctggttaggtggcttaatgggttaagcagggactaggtttgaattatttttgaggctctgaaattgacagtggagcccaaaggcattcctgttgtgggcatggggtactggcattagttaactctggtggagaggcaggggtggctgagcagaaggggtatgaaggatgggtcttgatttgtaaatggcctactgtgtgactttaggaagattccttaacctttctgtggcatggtttccatagtgggtagaaggaggagggataatgtctttgaggtatttctagagtctgttaatggctagggcccatcatcgtggtgaatcacctaagacccagggaagagtggcccagggtgggaactgtctgcctgtgggccacatcacccctagtctggtccaaggagctcctgccaggctttctcagagggtcctggactcactcccctggggcaggcccggggaggctggggaccaactctccggccaatgccgcttggccagggaacagatgaaggggtgggggataggagctttctggagcctgcactcctccctggctcctgggtcccagccctggagcaggaaggagggagggagggccagtctttgtgtactttacagatcacagctgccttgagcaaacgatgccagctacccacccagctcggtgattccaccaaacacaaacagctgcctagcctggccacctcctaggcaaacaacccagctggtttgcagggcaacaaggtcaggcagtccccctcagcctggggcctggccaacagcagctcctcctctccgagggtgcaggggcccatttcctgccacaagcccacacaggacgcctatctcaacggctctgggcggatgacttgcagggtggcttcccccgaaacactggggtggaggctgaggctcccagcaagggtgagccctggtgtcggggaggaaaccgaggcccagagagaggcaggtctccttcaaggccatgcagcggaatccaggacagccctcactccatccccaaccctgcagaggaagagtggaagctctaggctccctcagcagttctttcagtttctggtacccgctcactccaaggacacagatggaaggcgacagaccagtccactgctgtccctacctgtttccatacaggacacccctgtagagggagcaagccccagagagcagccctggagctctctcaagtgcgggatgcgaaagaccaaccactgaaatctttctcaggttcgaaaaattcccaagtgacctgcaggccggctggcaacatccttctgggaggagcggcttccgactgcagggaggaaggtgggaggcagtgcctccagcgggtggaatgggaggggagcagctgggggacatcaggccttaaacctggatgtcagatctcaactaagagcttagctcggaaaatggcattaacgccagttcctctgccagcaggggacgtcctctccgagtctccgttcggtccccatctcccagcccttcccagcctgagccccgagagttgcgcgcttaaccctcaccaagaagcatgggctcccgggggctcatatttgccagagtgtggcagaagagaactgagttggggccggcggggggatcactcagtttttgcgatcttccgcgacccgcccccaccaagccagcagagacacctagagcttgggacggccccagaggctgtgtcctgaccctctctccctccctcctctgggagacgcagctgcctgggggaagggctgagtccaacccagacgcagccaggaaggggctagcgccgaggagggcgggggtctcacggaagaggcccacccaccttgcccgtgaggtcgtagctcggactgcagggcggggagcgctcgggggcctcgccatcccgggtggcaacggcgcctggcgtgcccgtcatgtccctggacgagaggtgagcagtgccggcccgcaggcgaaggagagcgcaggaacggccccacccccgccccgcccactcctcccctccctcgaccgggacccctcaggctcctccctccgtcccgtcgccccctcgacgacaccggctcggaccttgctgttccctgagggcacgcagagccgcagggtctgcgtgaaggggcgggcagcctccctgagcaacaccggctcggctccgtgcgcttcggacatgagccacatccagccccgggaccggtcccctgtggtcgcttgcttgcccctgggggagcgggccgcggggaccccgtctgctgcggaagagttcccgtagtcgctgcgcaccgcgacagcaggcggcgcccgagccccgggccgtgggctgtccccaggtggcgaggcggggagctggggacccctgggctgcgcctccgccgatggccccgagacacttcctcatctgttaagtcacccggcccgagctcatctgaatatagttttgtttaccaacccgtactcgccttgcagcacatgtacgctgcggtgttttggggcctctgcctggtgcggggactttgaccctttagtatggatcacctctcatttcccccggcctgttggttgtgcccagaatgtcccaccaggggagagctttcgcaagagggctgcgcagcacacatctcccagtggaccgctcctgaaggcggggccggccttattaacccatgacactcaccctggccccgaggaggagccaaataaattcatgaagtcgtagatcattttgagcagagctgccaggatatcccaggcacccggcagctcctggtgacagagagtggggagtgcagctggggttgccggtagcagagctcaggggctctgtggcctgggccgacctttcaattacccccatctccacattctataagcagcttcaagttaccaaggaacagggcgggtgcattacagcgggacggtttgagggatgtgtagggaggggagagctggagaggggtacctgcactttttttttttttcagacagagtctcactctgtcgcccagcctggagtgcagtggtgcgatctcgcctcactgcaacctttgcttcccgggttcaagctatactcccgcctcagtctcccggagtagctgggattacaggtgcgcgacatcaggcccggctattttttctttttgtatttttagtagagacggggttttgccatgttggccaagctggtctcaaattcctgacctcaggcggtccgcccacctcagcctcccaaagtgctgggattacaggcgtgagccactgcgcccggcctgcaattcttaacttaggtgtggaggtgaggagcaggggtagacgtggcttatgggccaccataggcctgtggggactgactttgtacgccagcctccagccctgtattttctgacatcagctggaggtattttctgtcagctgggagaagcgcccagagtggggacagaggtgatctccagtagagtaaagagcttgggttacctcttctggaggtgagcgtgctataacctcagctgggcatagggcgggactcaaacagggagcctcagactggagtgtggaggctgcgcagcacactacagaggcgtggtgttggttgctatttggatgccagaggctcttgctgcaaataatgccgaggtttgctcaatgccgtgggctcccggagacggagtctcactctgtcgcccaggctggagtgcagtggcgggatcttggcgcattgcagcctctgcctcccaggttcaagcaattctcctgcctcagcctctggagcagctgggactacaggtgcacgccaccacgcctggctaatttttgtattcttagtagagaacttcaccatgttggacaggctggtttggaactgctgacctcaggcgatacgcctgccttggccttccaaattgctgggattacaagcgtgagccaccgcacctggcctggtatgcggtcttttctctccccttccctcccctcccctc

SEQ ID NO: 1244583 - DNA, 4001 bp, Homo sapiens
ctggtccaaggagctcctgccaggctttctcagagggtcctggactcactcccctggggcaggcccggggaggctggggaccaactctccggccaatgccgcttggccagggaacagatgaaggggtgggggataggagctttctggagcctgcactcctccctggctcctgggtcccagccctggagcaggaaggagggagggagggccagtctttgtgtactttacagatcacagctgccttgagcaaacgatgccagctacccacccagctcggtgattccaccaaacacaaacagctgcctagcctggccacctcctaggcaaacaacccagctggtttgcagggcaacaaggtcaggcagtccccctcagcctggggcctggccaacagcagctcctcctctccgagggtgcaggggcccatttcctgccacaagcccacacaggacgcctatctcaacggctctgggcggatgacttgcagggtggcttcccccgaaacactggggtggaggctgaggctcccagcaagggtgagccctggtgtcggggaggaaaccgaggcccagagagaggcaggtctccttcaaggccatgcagcggaatccaggacagccctcactccatccccaaccctgcagaggaagagtggaagctctaggctccctcagcagttctttcagtttctggtacccgctcactccaaggacacagatggaaggcgacagaccagtccactgctgtccctacctgtttccatacaggacacccctgtagagggagcaagccccagagagcagccctggagctctctcaagtgcgggatgcgaaagaccaaccactgaaatctttctcaggttcgaaaaattcccaagtgacctgcaggccggctggcaacatccttctgggaggagcggcttccgactgcagggaggaaggtgggaggcagtgcctccagcgggtggaatgggaggggagcagctgggggacatcaggccttaaacctggatgtcagatctcaactaagagcttagctcggaaaatggcattaacgccagttcctctgccagcaggggacgtcctctccgagtctccgttcggtccccatctcccagcccttcccagcctgagccccgagagttgcgcgcttaaccctcaccaagaagcatgggctcccgggggctcatatttgccagagtgtggcagaagagaactgagttggggccggcggggggatcactcagtttttgcgatcttccgcgacccgcccccaccaagccagcagagacacctagagcttgggacggccccagaggctgtgtcctgaccctctctccctccctcctctgggagacgcagctgcctgggggaagggctgagtccaacccagacgcagccaggaaggggctagcgccgaggagggcgggggtctcacggaagaggcccacccaccttgcccgtgaggtcgtagctcggactgcagggcggggagcgctcgggggcctcgccatcccgggtggcaacggcgcctggcgtgcccgtcatgtccctggacgagaggtgagcagtgccggcccgcaggcgaaggagagcgcaggaacggccccacccccgccccgcccactcctcccctccctcgaccgggacccctcaggctcctccctccgtcccgtcgccccctcgacgacaccggctcggaccttgctgttccctgagggcacgcagagccgcagggtctgcgtgaaggggcgggcagcctccctgagcaacaccggctcggctccgtgcgcttcggacatgagccacatccagccccgggaccggtcccctgtggtcgcttgcttgcccctgggggagcgggccgcggggaccccgtctgctgcggaagagttcccgtagtcgctgcgcaccgcgacagcaggcggcgcccgagccccgggccgtgggctgtccccaggtggcgaggcggggagctggggacccctgggctgcgcctccgccgatggccccgagacacttcctcatctgttaagtcacccggcccgagctcatctgaatatagttttgtttaccaacccgtactcgccttgcagcacatgtacgctgcggtgttttggggcctctgcctggtgcggggactttgaccctttagtatggatcacctctcatttcccccggcctgttggttgtgcccagaatgtcccaccaggggagagctttcgcaagagggctgcgcagcacacatctcccagtggaccgctcctgaaggcggggccggccttattaacccatgacactcaccctggccccgaggaggagccaaataaattcatgaagtcgtagatcattttgagcagagctgccaggatatcccaggcacccggcagctcctggtgacagagagtggggagtgcagctggggttgccggtagcagagctcaggggctctgtggcctgggccgacctttcaattacccccatctccacattctataagcagcttcaagttaccaaggaacagggcgggtgcattacagcgggacggtttgagggatgtgtagggaggggagagctggagaggggtacctgcactttttttttttttcagacagagtctcactctgtcgcccagcctggagtgcagtggtgcgatctcgcctcactgcaacctttgcttcccgggttcaagctatactcccgcctcagtctcccggagtagctgggattacaggtgcgcgacatcaggcccggctattttttctttttgtatttttagtagagacggggttttgccatgttggccaagctggtctcaaattcctgacctcaggcggtccgcccacctcagcctcccaaagtgctgggattacaggcgtgagccactgcgcccggcctgcaattcttaacttaggtgtggaggtgaggagcaggggtagacgtggcttatgggccaccataggcctgtggggactgactttgtacgccagcctccagccctgtattttctgacatcagctggaggtattttctgtcagctgggagaagcgcccagagtggggacagaggtgatctccagtagagtaaagagcttgggttacctcttctggaggtgagcgtgctataacctcagctgggcatagggcgggactcaaacagggagcctcagactggagtgtggaggctgcgcagcacactacagaggcgtggtgttggttgctatttggatgccagaggctcttgctgcaaataatgccgaggtttgctcaatgccgtgggctcccggagacggagtctcactctgtcgcccaggctggagtgcagtggcgggatcttggcgcattgcagcctctgcctcccaggttcaagcaattctcctgcctcagcctctggagcagctgggactacaggtgcacgccaccacgcctggctaatttttgtattcttagtagagaacttcaccatgttggacaggctggtttggaactgctgacctcaggcgatacgcctgccttggccttccaaattgctgggattacaagcgtgagccaccgcacctggcctggtatgcggtcttttctctccccttccctcccctcccctctcctcccttcctccctcccttccttccttcctccctccctcccttccttccttctttccttctttcctttctctctctctctcttctttctttctttgcctgcctgccttccttccttcccctctcttttccttccttcttttccctttctttctctttctttctttctttctttctttctttctttctttctttcttccttccttcctttctttttctttcttcctttctttttctttctttctttttctttctttcttctttctctctttctttctttctctttctttctctccttccttccttccttcctctctctctttccctttctttctctctgtctctctttctttctttctttttgtttctttcttgaggtggagctctgtcatccagg

SEQ ID NO: 1244584 - DNA, 4001 bp, Homo sapiens
tgcagtttttactgggctaaattgacaacatcaaatagcacagaatttcttctagtttacttcaaactgtgatggctttaaaatttctagactgggatagttgttatacattttttctccttctctatatcctaggaattcagagacctggagggagaagacacatggactgtcagatctagagacctgcttccttcaatagctgattttctttcatttgtgtcagaaacaggcagcatggcacagagccatgcacctaaaactttattgtgcatatttattcctagagatcttgttaaaatgcagattcagattcagccaatctagggtcagggctttctattgtaataagttccaaggtaatgccaatgctgctggtccatggactgcacactttgatgagaagtttagtaaggatatagaggaaagaatactacacgtgtagtagtaatttctggcttttagtatcagctctgccatttaccagcttgctttcttggacaagtcatttttcctctctggattttagtttcctcaaatataagctgggtgatagaggaggaggttgggttaggttatttcaaagcttgcattcatagactcttcaaagtgatgttttgattaaaaaactccacctataggatcacgtacagcttttcaaaggactagcaggtgaactggcattatcaaagcagaaaatataggggctggagcaggaaggcatggcaaagtcagagaaaaggaaggtgagccataataacttcttatggcaaatataacactttgattatttcagagtgatggattttgaattaaaactgttatcctgagagaggctactatttttcccaacaactatcttagggggagacctgcattactgaaaactgagttgcataagaaacttgagtgaaggaagcaatggatatgttagtgctttgaaataagcaaatgcttacaggggctgtgagggaatcatggctggagggaagctttctggagccatgagggagtctgatttgaaaacagcagttcatctctgctgcagaccatttatctaatttcagacaaattggccagaaattcaggtatttggccactgctagcagatgtaacagggagaaatgcagtctcctacaagggttaggagagcaaggtgccaggggtcacccaggggcataaataggcaaggagaaggagggggtgaaaaaggaacacagatgatgtaagtgaatgaatgaagcttctgaccatctgagcctctggcggcagcccttccccaagagctcacgcatctctgttttgagcaggaaacaggatcagacagaaagggctccccagactcacagatacaagctagtttctcattaagtcccaaagcaaagtcaggggagtggagaaaactcctggtgctggcgcctcttccaacgttaggttgaggaatacaggagatgtttaccttatgcaggacgtggtcgttgaagtcagggccagctcctccctggtaggaatcgggtctctgcaggtccatgccaggcttggagctcgccgctccggctctccctgcgctctgcgtcagcgcttccaggagctcggttcgagctccgctgggtgcggcaggcttgggtctgagctctgcgggccgggccgcatccgttttcagcactggacagttccccgcagcggccgcggcgcggtaccaggcgggcaggcggccacgttcttccaggactgagcgtttcagcaccaggaacagcgactccgccgttgtgcgcccgggaccagagttctgagatcctgtccgctccaatccctgcctcttaggactccaggatgctggcagggacgcaagatttgggtccggctggtgatccctgcgtatttcattcagctaccggactccggaggctcagcacccggctgcgttctcagggcattgcggtcccaggagctcaccgttcctgatcccgagcgaacgggcatctccgtcaccacgcagctcagcgcagcgcagctctcctcacacgtttgcagaggcgaagtcctgcggcgctggcggcgcttctgtttttgtccctggacaattctctccaggatgtatgagataaatagagcttctaagtctgaggtcgacagtagatgggtcttaggtgtccccaaagtccctgaaatatgcaaaattctgtttacctgcgttttcctagggagaaggtccagggctttgatcacattctctccagcacacatgaccgcaagaagttaaggacaatgggctcaggagaggcagatggtggtttggttaggagcacaggctccaggattcaaatctcgattctgaaaattattagtcgtgcaaactcgggcaaattaatctttcctaagtgtccacaaaatggagataatattataatagtacctgcctcatggttttgttctgagtatttaatgagttaattcatgtaaaaagcctagaacagtgcccagcgtgtactaagaactcaataaatgtgagctactatgctctcctggcaggggatgaagagctctggctacttctcctatacgtcaggggagtcctgctgctgcgacctttgattggcaaaattgcatcatcacatggaatatgagagcgtgaggctgaccaccatgggaactggaggctgagactgtggcccctgggattattatcagattactaaggacaagtcctagtaccagccacgggcccttggagtcaatatcaacatggaaggaaagagccaggcttagggttaaaagagtgcgttttactgctgggtttcactcctttttggctgagttgtgtgaaccagatcactcgtgttccctgggattacttatgttttctcatctgcaaaataggtagagtaatctatgcccactttattgggtttgggggaagagtgagacaatgtacatgaaaagtctttattttcttttaaattgtaaagtaaatttcatttataaggtgttattattgctggaatcactatactgtagatactcaatgaacattgattaaatgaacaaagctagggaaccaatgtgtttgttttatgagattctcactgggctgattttttttgtttttgtttttgtttgtttgtttgtttgttttcagcctgtgacaaatacataacatccaatggttggggttcttaatgtgaggtggataaatggatgttaggggaactttgcaacattgataacattacacaaaattttgcttctgtgactttttctgggggagaggcaatctccagaagaagaaatgaatcccatagattttattaagttctcaaagttgtctatactcaaaaaaagtacagaacggatagcttagactcgctcatcttaactttctcctgagcttcctcaccaaccctgactattatagataagaagattctagaggctttgcctggaacctcacattccttggaagggtcactcctcagagtcttgtttggagttctgaagcttcagaaacatgattctgtttgttcaggtttatagagcaaatagcagaggatctgaaccaatccagaattgatgatggaagactttcatgagaaatgatgtttaagctgagatctgaaggaaaagtgggcattagtcgaagagggtggtggtggtggagtgattccaggcaaagcgatcgatacatgcagaggctttaaggtgtgaagagctgagaaaagaccagtgtggctagagtcctgagaaagatgggagaagggtaacgggagaccaatctagagatagataaggaccagatcatgtggatcatgttaagagttttgaacttcattctaagggcaatgtgaagccattgaaggacttcaagcagggaaatggcatggctagatctgggttttaaagatactactttggctactgtatagagaatgagttaagtcaagaatgaatgtgctcttttattgatttataaaatcaatttttatattatgggcattaatcct

SEQ ID NO: 1244585 - DNA, 4001 bp, Homo sapiens
agccctgtcctccaggcgctcaatctccagccctgtcctccaggcgctcaatctccagccctgtcctccaggcgctcaatctccagggcagcgctggccctcggactttgccacagcgacatccgaactatctagaaatgtgacgaatggaagctttttgttttctttccttctaattacacttccacagccacacgtggctcatggcatcctactggacaccacggtcctagagacctgccaccgagcggggaggggggtaggacatgcgggggcagcggcgcctggggacaggtagagacgcaggctcccctcctgccccacggagcacactctgcacccaccagctgccagagactcccccgcatgctgcagtttcaggaggcctctgggtgctggtcgtgagcccaagcccatctcagctgctcccccaaactctgcccattcctcaccccgtcccctaagctgaggtgtggccgggcacctgagtcccaccccacgctccacagtctcaggccaccccctccagccgtgccacactcccttggtgctcacgccgcctgcctggagctgcccttaggggacagcctgcaccctctaccgagcagcctcagatcccgcttcctcccaccctctcccgctaagttcgtctctggcaggaccctggacctggggcttcccagacccttcccaggccccagagctgacaggtccttcccaccaagactccatctccacgcccggctgccctcctccgcccaggactcagagcgggtctctgttggaagcgtgggttcagccccgaggcgcggcaggaaggtgggcacaggctgggctccttccacagcctcagggtcggcctcgtccaagctgttccagggatgcgcgtgggtgaaggccccgcctgctcctcactcccagccgaggtgttcgcctctgcgcgttcccccttctcctgggttcctgcccccgcctttctttccccggagccgtccaccccctcgccgggcgccggctttcaagcctcaaacttgggggatccccgggctgcctgcctgggagctctgggcgctccggcctcccctcgccctggaacccgctctccggccgctgtcgtggggggtcccctcttccgcacgcgagtcacctgtgctccttcctctcccccggacacgcgggacccctggcctcgggaccggaccctggtctcccctcccctccgacccacgcgcagacccagcacctgggcgcctgctcgccgcgctccgccccaggagccccggagctcgcgtcccctcccgcccctcctgccccgcggccgaacgcgcacttgcggactcgagcccccgccccgggtccccacagcagcggccccaggtcgggaggagcccagcgcccggcccagccgcgggctcccgctgcgcgcagactgcggagaaggatggagactgcgccgcggggcctcgagtggaactgggggtgcaacagggacgccgcagcacgagggccagggccgggcggagaaaggcccgcccgcgaaccgcgctcctcctcagccccgcgcccccggaccgggactcctaccctccccggccacgcgccccggcctcttcccgacccctgcccggtctcgcgtccccggacccggacccccacccgcaccccctccccagccccgcgcccctccccggccccgcgcccgcaccccggcacgccctccgcccgcgctcacccgccgggtggccgtacggggactcggccgcgccatcctgcaggctcgccaggatctcgcccttgcccacgtcgctgtcgcccaccagcaggaacttgagcagaaagtcgtaggcccggaccgggctgcccagggcgctcatcgtgacggcccggcgcccccacccatgcccggcctgcggggctgagcgcagaggcggcggcccggccccgagaggcgccgcgcgggccccgagtccttgctcgcctccggccccgccccgccgcccagcgctgacagcgcgcatccccgcccggccccgccattggtggaccgcagttgctagggcagctgcgcgctttcactggcttggttgtccgtccatcttactctcgtcaccgcctccgggctgtcgcccacccgcccctcctgaaaggtcgctgtcaccacagccaatggaggcccggagacggggcaggggcggagccagaacaagcaggaggcggggactctgctcccgcagccaatggcggggcggggtgggggcgatcagggggtggggccgggtgtttacactctcgcgtgcgcccgtgagcgccacgaactcgctcccacggtcgtcgggtctgcacgccccgagtcgggaggggcgaggggcggtgcagggtcccagcgtggggcctccccacctgcccaccagggagacctcgggtgcctggccgggtggggctcggggtcggtccagttggcggacgcggccggaaggcccccgcaggccgcctcgccggaggagtccctgtcgccgtagaatccaggctcgcggtctctccccacggttcatccagggcctcgtcgttgccccatttacgcggcgtgcctgaatgcctgtgtgtgcacatgcgcctgtgtacgtgtgcatgtgttcgtgtgtgtgcatgtctgcgtgtgcatgtgtgcctctgcagatatctgcacatgtatgtgtctgcgtgtgcatgtgtccctctgcaggtgtctgcacatctatgtgtctgcgtgtgcatgtgtccctctgcaggtgtctgcacatgtatgtgcgtgtgcatgtgtccctctgcagatgtctgcacatctgtgtgtctgcgtgtgcatgtgtgcctctgcaggtgtctgcacatgtatgtgcgtgtgcatgtgtgcctttgcaggcatctttgcatgtgtgtgtctgcgtgtgctgcttctatgcatgcgctcctatgtgtgcgtgcgcttgtttgtgcatccatgcatgtgtttgcgtgcgtgctggaggagagcattgggtgggaccctccagccttttggcttctcctctgctctagagagcaagggttgccaggccgaggtctgcccttcgctctgagggtctcaccaggtgcacattggtttatttggtgcagaattcaggcagcaggcaaagggcgagctccgtccaagaagaaggataatgcccccactacttcatcccctccaccctgcgttgtgtagggaactgctctagaccccattagaagttttttgtgggggaggaacagaagagggagcggaagaagaattacaaaagagactgaagtcaagattattatatttgtcatttgcattcatttggacctagaaaatgtttactttggaatgccaatttagtttgcaacacctgttattcattggttgattagttgctttagttactaatgcagccacatttttttttttttgagacagagtcttgctctgttgcccaggctggagtgcagtgatgtaatcttggctcactgcaacttccacctcctggattcaagcctcccaagtagctaggattacaggcatgtgccaccacacccagctaatttttgcatttttagtagagatgggattttgccatgttggccaggctggtctttgactcctgacctcaagtgatcgacctcggcctcccaaaatgctgggattgcagcactgtttttttttagaaggaaggtcagaggaagaaaagaggatggaaggtggacgctagaaaactatgagaaagatggcatttagtccccagccccaccactctgccaaaaagaattcaggggagtttccttcccatccctaaccctcagtctccatgttccaatcagctgtgggtcacatggctattacctagtgaggaaagggtaccttcttttgctcgctccccacctacacatccagactcactgtacaataggggtcaggaggcccccagcccaccctcggggtcacacccagcagtccagcagtgttc

SEQ ID NO: 1244586 - DNA, 4001 bp, Homo sapiens
gaacccacacagatacagagcctgtgatccagctgttgaccctaataaggaaggcttcttctgttgtccgataaaaagtgaaataagtaggccgggcacggtggttcacacctgtaatctcagcactttgggaggctgaggcgggtggatcacctgaagtcaggagttcgagaccagcccggccaacatggcgaaaccccatctctactaaaaatacaaaaattagccgggtgtggtggcaggcgcctgttaatcccagctactcaggaggctgaggcaagagaactgcttgaacccaggaggcagaggttgcagtgagccaagatcacgccactgcactccagcctgggcgacagagcaagactccatctcaaaaacaaacaaacaaaaaagtgaagaaagtacatcctagctctactcaaaagactgtaggaatcagatactagccactgtccagaagccctcaaacacacctcaaggccaaaaaacacagcacttttaagtggcaagcgagggtggtaaaggtagcccagaacactgaagagctacagaagttcccacaaactgcacggctttccgtcccttcctccactgtagatagcaagggtcagtcatggcctcagagccaggctactcctcgttaaggtacagtctccggcctgtactttggccacataacaaagcttggtctgagacagcagctatttcacacacctaagccccaagcaacagacaaggatcagtcaatatggttgagggaacctgcactttctggcatgtatcggaattcctcaggctacaattaaaaatccagaactgccattgtgatcttgacttagtcctcagtaataagtccaagccctgaagggattgcagacagaccctggcgtggtgtggacctgttgctcagggaggtgtatgtgtgtgtgtttgggagtgggaaagagatggcccttcaattccagactcctcattttgggtcttattctcctccctatagacacacggacagcagtcccaagaaaagcagtccctttgaggcggctgggaaaccactcacgtgctctgggaggacagagctgagcctggagcaaggggggaggggaaagaagataatgaatgggcacatccaccctgatctgtgatctgtagctaggattgagcaaacctcagctaaattcttcagaggcagaaagagagagacactcaaagaacaacataactagaggacagggctgggagacagaaggggcaaaacaggaaaacagctcatttctagtaagtgactttaaactcagctgaggtcctggttggttctctggcttgaggaaagagaggaagtaaggagttgcgggagcgcacacacacttctgtgcgtgtggaacggtctcacccagacgacccccctcccccaaaggaaatcgagatattcctctagggctagaggggacaactggttttgtgggacaggaggaaggaaaacggcgacagacagcactccctgtcacttctaaaagagaagagggacaggttccttcacacctagcaaagatcctccgattctggaagcagggggagcggaacttagggtacctctctcccacaactagaatggacaggccagaggacagtcatagcggtttccttaaggctcaccaaaggcaggtaagctaaggaaagaagctccccacctcctatggcccgacgcctggggagcccctcaagagggggctacgggtcgggggaggggtcagtatccccctaaactggggctgggcgggaggaagggctgccctggagatgcttcaacgcaggcgagacaccaggtcctgggacaagcatactcacggcggctccggggcggcggcgttacttggggccggggctcggacgggatccgcttctctccccgccggcggtgtcccaggctccggcctccacttccgcctttcagccgctccggatccggatctccacctccgccccgcccctcaatactcccaggtgattgacagtgcggagaccaatgggaggcactcttggccgacctacccagcggcgccggtaggaacgcgggagtggcggtagggagcgcgcgagggatcgcgggacttgtagttcgcagcgctgggaggagtcagtggctgcctgggacttgggcttagggtggagccggctgactgcgaggcggagcccggccggaactttttttttttttttgagacggagtcttactctgtcgcccaggctggagtgcagtggtgcgatctcactgcaacctctgcctcccgggttcaagcgattctcctgcctcagcctcccgaggagctggattataggcacgcaccaccacgcccgactaatttttgtattttttagtagagacgggggtttcgccatgttggccaggctggtctcgaactcctgacctcaggtgatccgccctcttcggcctctcaaagtgctgagattacaggcctgagccaccgcgcccagcctacggccgggaactttttaaggctaaccctgccatccgcgtcaccgccggttccggacgccccgagggaaggcgggtggtggagcgttggaagaaggcagaggattgtgtgtgcagaattgggaaagaaaaaacgtggtgcgaatgaatatgcacgcgaggcctcagtcctgtgaactcgctgatctggagaagcccttgtctgcactgtccgcccgattgccaggggcgtctgtgattgggaaggtgaggaaagcgctgcaggaagagttctctgcaggatgctgggtgagatcaaagggagagcttctgccaccacctcctacttggtgtgtgcgggggccggcacaaagaccatctctgcctctgccttcccctgctcctagccagggtcagctcttctctctgacgcggaatacagagctggacaacctctgcctcggccctctccatccgtaaataaagactagaaccacccccactctgcactctccccctctatggatcaggaatatttgttttttctgctcctctcaatatggactgggcccgctcctgattcctcccacccttacctctcaacacaaaccagtacctcctcttcttttgcatctcatcctcaagggacactactgaaaacctgtgtggaatcaaagctcaccggagacagctgtggccattgtgcctataacgccaacaccaggcatatcctggagcctcagctggagaatttacctgtcttggacaacctgccacaaaactgtgcccacatctagttccatctggtcatcagggcgtctctctttcttacacccataacacacaatccccacttccgcgccagtgttcatgagaagtgaaaaggaagagggaagagagggcttgttgggaggacagaggggatggggcagagtgggattcctagcaggttctggctggtgacaagctcttcccccagcccccttgccatacccagttctggaacagttccttatacaggagggatgggtagtcccctaggcccacctttccaaggctggaggtgggccaaagccaggactctgtccttcccacatactgtgtgcatacatggctgtgactggggtgcaggggagagaagggggtataataggcccatagtgactaattaagtttcttcctcaaccctggggcccctggtggtgtgaatgtggtgccaagtagattggctggtgcctctgcccttcctagagatagcaactgggccctggggtacaacgaaggtgagggtggggagtgattgctgtgttggctcctccaaagccctggggctctcagagtaacccccagaaacacccagagccaataactacaaaaataaagagtttatttcctatccaaaagtgagcccagggtgttgggtggtagaggagagctggagacctgggcgagttttggagcagtccaggccctgagtgagaccatgttgtaatgggggagaacaggcttggcagcggtctggggt

SEQ ID NO: 1244587 - DNA, 4001 bp, Homo sapiens
aagatttcctaaagctagttttccctagcctcgttcaagtgcttagtcacttctgcctatttacaaggaagaccatttcatatcttcaaagaggcagggaattttgattccagacggtcatgtcacctgagctgccctagacgtttctttccatgcaactcaagagaaggcagcagccagctatgcatacctaccactcctgttcagaaccacaagctctctgtatcttgcctctgtgtgcagtaacaaagtgggattgtggaagaacaaagttttcttgcctgacaccaaatgcaaaaggtgatcattaaaatgcagcctgaagacatcccagtttcctctctctgacagcccaccaaaaatgcttcccttcccttctcctggaacagaaacagcaaagcaggttcttataaaagtctaaatgcttactggacatctccccttaggcaagcaacaacacccaaaactacaggctaacaggctctgaagcacatttcccagagagcagccagaaccttaaaatctgataacatggtttcaagttccccaaaggcaaaaataaaaagtaagggtttcacgaaaggttattttgagacaaccccaaggaaagccaagttttaaagtacctactccgtaccaagccccttttcccaacattctactctactcacacttaaagatgctaagcacacacgctgattatagaaatacaccagaaagtactttcacaactagatacagtgggaccttggaaaagcccaagcacactatttccaaacatctattctaggtggtaaaacctggaaccatgtagtcaatctgtgaagcacagcttagtccaatttcccagaaggtcacgaagggctctgacaaccaactttgattatttaggatggggcccttttttccttccaagaatataaatgacacatttcttcgacttcacttttttttttttagttccacaagcaaatatcttcaagtagtgcaagtaggcctcagcattctcaaacactattctcattattcctaatacctccataatactattattgtatatacacattcgtgttgctatttttatagataaaatataaaggcatgaattaacctcttggttaattcgtgggtgagaatactgaggctcaacgaggctaagaaatgagcccagagcttgctggttaagaatacaggtcctctagactcccaggccccaacacttaaccattaagccacactgccattcagggaatgctactaaatccagttactgtacacaactactttcaggtcacataactgggtgcaaagagttctatagcaaggattggggcggcagggagggtacactacctaagctaagattttttttctttaacgaatatagcacatgttcccgatttccatcctcccccacgggcagaacccacgtgccggtcccccgctacccagaaccgctccctccccacactaccccacgctacccagcagcctccccacgcccttccctctgccctcccgcaagcgctgcacccgcgcctcccgccccctccccagcgacggcagccggggcgcccgcgccgccctcgcgcgccgcagcccgcgcgcccccgcctccgcccggcggggtcacccccggggcctgcgcgcgcccttgccgccgcctgcccgccccgaaatcctcccgcgacgccgacgccgggcaggccgcgcccgccgcgcctgccatggtgggcgcctcaccgtcaggctgggaagccgggcccggctgcgccatgaccaggcggccggcctcggggagcggggatgggcggggaagcggcgtcctgggctcccgcgggctcagctggcggaggaggcgtcaaccgagccgccgccgccgccgcccagagagaaaccgctaaggctggatccgccggcgccgccacagccgcgggcagagacggacccgaccgccgacctccgcctcctcatcctgacagcgggaaataagcagtgcgcaggcgcagggggatggggcggcacgtgacgttggcccgaggggaggggcggggcctcgggagcgcggagggagcgcggagggagcgcggagggagcgcggagggagcgcggagggagcgcggagggagcgcggagggagcgcggagggagcgcggagggagcgcggcgggaggggagggtttcggcggagctgggcgcctgacccagcggcgcggggaggctgagtgccgagcggagctggagaagaggggctgcagcagaggcctggcctctcgaaggtgccggtcccggttctccaccccagcacagtgaggggaaaaaaaaaaatgagtaagagaggaggaccgatggcggggtgcagttccagcctctacctcttctagctttgcgaccttgggagagtcacttcacctcttggaatttttatcaatataatggctaagaaaagtttaaacgaggtaataaagtatgaagaactgtttccgacagtactgggcctggaccccaggtcttctggtgcagaggccagtatactatccattcagcaaatacgtttgggttttcagtcgtgatagatgctggagatacagccaggtacagaccctgcactcatggcaggaaaggagaaatcatatacacaaagtgtggcccttatacttgggcccctgggccctatactttaggaactcccctctaatcaccactccccgtctgatttcgacacctggagtgccccatgccaaggaggtagtttaaaaagctttttttttttttttggagatagagtctcactctgacacccaggctggagtgccatggtgcgatctcggctcactgcaacctctgcctcccgggttcaagcaattctcctgcctcagcctcccgactagctgggacaacaggcgcacgccaccacacccggctaatttttgtatttttagtagagacggggtttcactatgttggtcaggctggtctcaaacccttgacctcgtgatccgcctgcctcagcctcccaaagtgctgggattacaggcgtgagccaccgcgcccggcctaaaaagctattttgaaatcagagaggagcatcaggaattatgtacattttaagacccagcaatcccaccccaggatgagggagtccacagggtttggcacttcaggaccaagttctgaatacttgtggccccagaattccctttccagatggctgaagctgtggtctctttcccagatccattctctctatggcagagtctagacatccctaaaagaagctaaagtgaaagcataaagaatgagttcatgtcctttgcagggacatgcatgaagctggaaaccatcattctcagcaaactaacacaggaaaagaaaaccaaacacctcatgttctcactcataagtgggaattgaataatgagaacacatggacacagggaggggaacatcacacaccggggcctgtggggggtggggggaaggggagggagagcattaggacaaatacctaatgcatgcggggcttaaaacctagatgacgggttgatagatgcagcaaaccaccatggcacatgtatacctatgtaacaaacctgcacgtttagcacatgtatccaagaatttaaagtataataaaaaaataataataggccgggcacagtggctcacgcctgtaatcccagcactttgggagactgaggcaggtggatcacgaggtcaggagttcaagatcagcctctccaagatggtgaaaccccatctctactaaaaatacaaaaaattagtcgggtgtggtggcaggcgcctgtactcccagctactcgggaggctgaggcagagaattgcttgaacccagaaggcggaggttgcagtgagccaagatcgcaccactgccagcctgggcgacagatcgagactccatctcaaataataataataataatcagaaaatccactaattagaatcagtttctactttctttaaatcatttgttttaaat

SEQ ID NO: 1244588 - DNA, 4001 bp, Homo sapiens
ggaggcccttactgcgcctccccacccctcccctgcaggccgccagcgcctacccaccaatctcccgggccatggccaggccctgtgggtaggtgatgggtgccagcttcttgtcccgcagccgctcaatggtgtccttgtcgtcgcggaggtccagcttggtgcccaccaggaggatgggcgtgtgggggcagtggtgccgcacctccgggtaccactgcagggacagacgctctgatccctaggcccggagtcggctaccccagccccacctgagcaagtcacggccctcagggactttccccactgttccagagctacacttggctcttcttccttcaaggggtgaccaggggcggatttggtggggagataccaggaacaaacacgcagccagggaacctggagacctcccagggcctcctagtcaaggcccatccccagcagccagagccctcagaaccctccattctgagagctgtgaccaccaccacggcaccccatcagcccccatggtcatcttcagaccccactccgtgtgcctaccccaggcagaacccgtatcgcaattgcctctaaaggacaacttgtcggggcaggtactggggcaagccctctccccacaggggcccccagccttgccctaccttggcacgaacattctcgaaggaggccgggctcaccagagagaagcagatcagaaagacgtccttgggaaaaaggtgggacctggtggagtggtcaggggctccccagggccctgctccctcccttgtgcggatctcagggacccccccagctcccggggctggccccattgttacgtacagtttgggggtaggagagtggccgcagccgatcgtagtcctcctgacccgctgtgtcccacagccccaagttgactggtttcccgtccaccatcacgttggcagagtagttgtcaaaactgcagagcagtgagggcagggtcagggcttgggaggggtcccagaaacccccagccctgctggcctgtgtcttggggttcacaagtctgcacagaactagaactctggccagcacctcagctccagccgggaagcccagagacagggccacctgagccgacgtggaagcccagaggagaccctgcccgtgtcccccccatgccacactcacacggagggcctgtgctctcccgggaagcccccacactcacacggtggggatgtactctccggggaaggcgttggtcgtgtagctgatcagcaagcatgtcttccccacggcgctgcggacagggcaagccacgtggctcccgggcccggcctcggaccctctgcccagcaagggcagccccctctcccggagccagaggcgagttaggggcgtctggggtcgagagggggacccagcccaccagatccgtggcgacctaaggctggaggacgacctgggcaggccgggctccgggggctggggtggtgaataagggcgcagggcgccccacactggggccccaggcagaggccccgactccgagggtggcggcaggagagggtggggccggctgagggttcagcccaggtgagaggcctggccccacccactgggaggacagggcggcggccccgcctcgcccgcagccagcccaagcgggagccgggcagcatcaggtgggcccgagctggaggcccgcggaccccgccccgccccaccccgccctcctcgaccccggggcgcacgcggctcgggcggggtacggcggggccgcctcgcgaggacccgggcgccacccccgccccgccccggctgcgccccgagcccccgagcccccctcccgcccagcccagccaagcggcctccgggccgcgcactcacccgtcgccgaccaccacgcacttgatggcctgcatgggcgcgggccgggcggcggcgggcgcggccgcgagccgagctgcggagaaatgcccggcgccgcagcggccgcggacccgagcgccgagcgatcggccggagacagccgagcgccgccgagcgccgggcgcggagacagccgagcgcggccggcggggggcggggggcgggggcgggggcgggcggggggcgcccggccgcgcggctggcggggcggggccgcccgaacccgggcagagctgcgcgagctgcggcgcccccgcctccagcgcgaccccggcccgggggtctcctacgggtccctcggggcgcagcgcaggccggagagagcccagcgacctggacccggcggggagggctccgcgcgctgcgctttctcggggacccgccccctgccgccgggagccagctgggaactccggggtctgcagccgcccgaacccccagacggacagcccccgcggccctcccgtcccttcaaggcagcggcgaggaggggcgaacagccgcaccccggcaggccctccctgcagggctgggggcagagggccgcgcgtttggagaggcacggacggtcgcgcgtttggagggagaggcggggccagaatgtatcacaaagtgcaaacgcgctgtatttccaaaccccgccgcgcgcaggcggccgcagcgttcacggtgacatcgcaaaaggcgagggggagacgcgcccgcgggaccccttcccggtgtgctcccacgtggcgtcgaccgggaagaaggggccggtagggagcccttcccaggcgcctcccacggggttcccccgcagccgcgacaccaccaacagtcgccgcaaccgccgcgtggaacagacgacccgggtctcaaagaggcggcgcgggcgggacgcagcccctggtccatctcgggcgccgcctgatgcactcctactgcgcccgggtcctcccggcctgtctcactttggggggctcagggtcctcacgggggacgcctgcacgtaagccaggacggcgttctgcaggaagctcgccctctgggcctcctcgtcccggatgcgggcgatctccgcctcccggagccgcagcttctcccggagagacgcgttctcgctctccctgtccagcagcgcctctcggtggtcgctcgccatcactgcagggcaaggagcgcagtgagcggacgcagccccagcgcaccgtggcacggcctcagcacgggagacctggccagccccgctctctggctggcctcacgtcccaccagtgggcggcgggaggacaagggtctggctcacctttcagctggcgctccagggccgccgccttctccctcagcgcctcctgagccgccagctccgcctgcagccggccgttctgctcctgcagctccacgcgcaccctgctcacctcggccaccctttcctggtccttgaggctcagctcctgccaggcacgaaggctggggagtgaggcgagggttgggggctagcacgcccggggccccccaccggagccccgcctacctgctgcagctcttccaggcgccgccgcaggccctcaacttgcaggcccagctggctgacccgggtctgggcctcggccaccacctgcttctgctgtaggcaagcgccctgcgcctcgtcccgtgcctgcgccagcagtctcagcttgtcctccaggtgagccaggcgctgttgctgtgagcacaggggccgccacgaagcatgaggggctcagcctgagctcagctgagggaatgtctgcacgggcacgaccccacctctctgcaggactggctgctctagttactatgactctgaacccgctcccctggcagccacctcctccagatgccctctgggctctcctcctccctcttcggtcacaccacccctcccatccatccatgcgtgtagtcacaggctgcagagatgggccaaacctctccaccgtctcaggccctgatccaaggctgaagcggacccaccagtgtccagggtgtgctcatctgacctcaacaccacactcccgcctccccactcagaccgaagctctggagtctgcatgcgggccgcaatgccgggcagcctggctcccccggagggt

SEQ ID NO: 1244589 - DNA, 4001 bp, Homo sapiens
aacctgcaccactgcactccagcctggatcgcaccactgcattccagcctggatgacagtgcgagactccgtctcaaaaaaaaaaaaaaaaaaattcagcttaataaaggtattcgttttcttagtcatcacataaagaattacctattacctcagaaacaattcaactaaagcatttctgagtacctacaagtgtctcaggaagcagaaataaaaatgtactcactattaccatatttttactatcccttttggtcttatgaagccataattatctcgctctcataaggtatacaaattatttttcagatgagaatgaaaatagatgttttaactgcctaaaacaaggtacaactttaagaagcacatatgcatgtattatttataataaaaacttttcatggaaataactgatgtaaaaaattcatgtatcactccaaactaatgagaacaattattcaaggcacaagcattttaaagaatacatttatgcttcctcgactacacaatttcacccatctgacagtgtggcctgagaaaagaaaatggcaattacaaaacaagctggtgaagaaataatggtgaggatgacatcacttatcagtttgatatatcagtgcttgatctgataagaatatgagccataaatatggggctaataaaagacaatggtgatgacagcatttaggaaatgaaaatcctatcaagagcctgaatgctggaattagattgcctgggtttgtaaatcctggcaccacttactgcatgactttgggcaagttacttcactttttcttttttgctcagatttttttcgtctataaaatgggaatgagacgatacatgtaaaaagcttggtagaatatcaagaccatctaaagtagtcaatagttgttagtgatcattattattcagggtctcacatttcttctttgaaaagccaacttgttgaagaaaaaagagcccatcaaatcttgggggacacagtctgcgcgcggtatgacttaaacagttaaggctgggtccacgagacttattctttagaggcgaattgaaacctctgtattttccatcagtaagggcagtaacttaaaattctgttccatcttcttcagtgaatagcacaggtccagacatgtcatagagagatgtgcacaacaagtgaccaccgccagcctcatatttgtatgtctcaggatgcagtggttcccatctgcaatgctctggaatatgaggttttgggtgtttcagttaattacgtaagagaatattctttctatgcttcctcaagattccggggattctactctctttctcattcttagtgtctctagtcctacacaaaatcctgcatttctgaaatttaacccttaccccttggatcttggaacagcaaaaattagacaaccaattctgactccagtatttcctaacccagttagcatgaaaagttacctaagctccccaagatatcagttctctcatccatatactgaatataataatctacgtaagcgggttgagggttaaatgagacaatcctcaaagcattcagcaggcattgccagaggaaaagcaattagtaaatgttttcacgaccacagttctcctaaccattcagacaacttgtaagtggagtcgaggagctctttcacgctgtaaacatggacgtgggaggaagcagaatctaacggagactgggctgaaggccgaggcgagagaacgaagactgaggcggcgctgacggcggccggtgtgcctcagcttgccatcaggagtcgttacctttgctaagctcggagggtttcacctctaggagttcctcagcagtctggaaccccgcagacaccagcttcacccgcaccgctggagacagcgggaaactcaccaaatcccgctgcatttcaaagcggaacgtcttcccgcgcatcgcaggctcacctgctaaccccggagcagccaaactccgcacgccctcgctggggcgtgcggcgtgacgtcagacgtaaagcggaaggggccggctctgcggcctggccgcacggggctccgggccttgcagctttgcgcagtcttgtaaattttcacacttatgcaccattccgttttgattccccaaaatcccatttagagattcctcatcaaatgtacaccctgactgtaaaacgatggacggagaccataggacggagagccaggcccagtgggttctccacgccacatttccttgcctccaccgtggcctgttaggtgaagcctcagagtcattaataggaatgatctcgagtgggagtagtgagcgtaacgggcacacactagccagttaccattattttggtgtgaaaagctcagggaacaatcattagaattaatctgcgtgctctttgtagagttgcagtctcttggctcttcccgctgaccgtcccccttttctgaccccccccccccgcaacgaccacattgcttttcccgccctcgcgagggattgtgggccagcccccaacggccgctgggagggatcagtccgcattccccgcacccacccacgtcttcccgggagtcgtatcccgagcatggaggttactgagaccgttatttcttcatggcctgcctagcttaagcagtagctggaaaagtaagcaactaatgtccccattagtgtgtctgggctcctggggtcctgagaaggaggggctgggctacacaagagctccttttgtggtacagacttgggaaggggtgttcaagcagtggtagtgaccgcctctaaattacagaacttcggggaggaaggcaagcagtttagaaggtggtttatgagttccttccttgcctaggtgagtgtaacttatttagcagggggtaacttattccctacctattggcgatttttttttttttttttttgagacagagtctcactgtgttgcccatgatggagtgcagtggcacgatgtcggctcactgcaaccttcgcctcccgggttcaagtgagtctcctgcctcagcctcttgagtacctgggattacaggcgcacgccaccatgcccggctaatttttgtattattattagagaaggggtttcaccatattggccaggctggtctcgaactcctgacctcgtgatccgcctgcctcggcctcccaaaatgctgggagtacaggcgtgagccaccgcgcccggccctgttggcaatgattcttagtcttgacttttcttcccagcttagaagaactttctaaatattgcaaatcagagccctctacatacttagatctaaaaaaggaaacaacgtatgttgagcactttagcaaatcccacacatttcaaatggccatagccatgccaaaaggaagataaggacatggaagctcagcatatagtttaatatcaattctgataaaagaaaaaaagctggccgggcgcagtggctcgtgcctgtaatcccagcactttgggaggtcgaggcaggtggatctctttgagctcatgagtttgagaccagcctcgacaacatggcgaaacactgtctgtaccaaaagtacaaaaaattagccgggcatggtggcatgcaccggtcgtcccagctactcagaagtctgtggtgggaggatcccttcagcctgggagtgagctatgatcacgccactgcactccagcttgggtgatagagtgaaaccctgtctcaaacaaacaaaacacctcagcacagttttcttaaagccaagattcaaacctagcatcctttttactaccccgagctattaagattttgagtccctactggcggggagaatacgagaagcatttataccccatttggtaggtcaaagaaagtcttgtaggactggccaaaatgtggttggccactcaacccattgcttaacttctaatatggtctatatttgagcgctcagtggatgcataaatactatcttcagggagatttcatgcttatgcttataaagcacccagattcttgggtgaagaaaaaacatg

SEQ ID NO: 1244590 - DNA, 4001 bp, Homo sapiens
acatactcccgcgcttgagcctcacctttgccacttgctcctcttaggctaaactcaagtagggttaattatctctaactggtagagtcactgaagagattacctagaacatacaggtaatgcctgcacatagtaggcactcagtaaatgttctctcttgccatatccttaagtaaaataagaagtagggccagagaagatggtgaaaataatgagatactgacagcttgtgttataggacaatgcttctcaaccagaggcaattgtgcctcccaggggacatttagccatgtcaggagacatttttgatggttacaactggagcagggctggtgctactggcatctagtgggcagaggccagagatgctgctaaacatcctacactgcacaggacagcctccaccccccaacaaataattacctgtccctaaatatcaatagtgccaaggctgagataccccataaccctgttataggataagaattcagatgtcctgacccctttccttcccatccattattggttaaaaaaaaaacccctcccgtctagactcaagcatcaaaagcagagctgagaggaggccccatcctcctgcctctctccttcttccccaagtacacacacaaacctgccaatgccagtggacaggatggcagtggaggtcttcagttcctcgtagagatcagcgccattcacggggaaagccgagaactgagccagcagcacccgcctcagggcaaccagggcctgccaaagggccccagactgctcagcaacaaattgcccgtagaagctggcatcccagggtgtcattcaccctacttctcaatatctgagaaccctctgctccctttggcttgggatggacttttgttattgttgttgtttcagacagggtctcactctgtcgcccagattggagtgcagtagcacgatctcggctcactgcaacctctgcctcccgggctcaaatgattctccttcctcagcctcccgagtagctgggattgtaggcgtgggccaccacacccagctaatttttgtatttttagtagggacagggtttcaccatgttggcctggatggtctcgaactcctgacttctgactccaagtgacccacccgcctcggcctcccaaagtgctgggattacaggcatgagccaccgcgcccagctggcttgggatggactttttaaaaagacactcaggtttggaatgtggagatcaggagctcaccttgtaagacaagccacatttctgagctacctcttccaggtctgcagaaaccaggtccaccactgaaaacaaaacacgtatagcggattggcagagaggactggggcctcccacacttggtttttcctcatctgtcaaatggggtgtcaattctaccccccggcaggccgtctcaggaggccagtgtgaaataacaaagctgcaggagccggcgcggtgccctgcacacagtaggaatctctaccctgttttagagcttggctccccacgcccacccttcctgagcctctccagaagcgcggccctctaggaatggaggggaagcgccctgcaggtatgccagggcagtgcgccagccctcggggcctgcccaggttgtgcgaggcccgcgcggctccctggcacgcgcacacccggtcacctgtcttgatcctgtggctcctgagaagctggatcatctcctcggtaaggccagggcacagtccgaccctgagcacgcccatgttccccgcaggccggaacagccccagggggactgcacgtcacgtgggcattcgcggggggtcctctccagacgcccctcccctaccccttcctagagaggacacaggcgcgctggctgccggaggagaaaggagagaggaggaggcggcaccaagggtagggctgggggtcatccgcccgcccgggatccgccgggattcccgcgcccagagcccgcccgccgggtcgcgccgcgctgccgcttccgggttccaggctggcgcgcggcgaggacctggcctgcagcgccatctgcgggccgcacggggcagagccgctgcgcccctctccaccgcctgcacaggttcccgagtcccacgaccccctccgcgctcaacacgccacccgcggccacattcggcctctaccttctgccgcaacacacacaccgaccttctaaagagccttctgtgcgccagcttccgttccaaacggaacggatctccgctggagacaaaatgcgacacaagacgacccgcccttacccccagggagcttactgtgagcaagggaaagacagacaatgaaaaggaatcgcagaaatcacatcattacagattatacgacaggtgtcaagaagcagcaaagcatccagagggcacctgcgtctatttttcaaaagtttgttttgttttggttgagacagggtctcgatcggccgcccaggctggagtgccctggtgagatctcagctttgcagcctcgacctcctgggttcaagcgatcctcctgcctcagcctcctgagtagctgggactacagtcacgtgccaccttgcccagctaatttttgtattttttgtagaggtttcgcctctacaaaatggggttacaccatgttgcccacacaggtctcgaactactgggctcaaacaatcctcctgccttggtctcccgaagtgcggggattacaggtgtgagccaccgtgcccggcctctattttttattttattttttattttttttaagggcaagaaaccttggttatatagaacacacacaaaaagatatgatttggtatttttaaatgtcctttgctttgcctcatccataggaagaaataaaactttacatggttatctcatcacaaatctgtgagggaggcgctattttttatccctgtttcaccaatgaagaaactgaggttcagtgaggttaaatcacttgccaaaggtcacccagctaggcggcacagggctggacttcacatccacatctgactctgcaaagccagtgctttctaacagcccccctccccacccctgaagctgtgtacatgttttcctactgtaaggtggtttctctgagagcagagatcatgtgtggcccatctctgtatcccactgcaactgccaccattgtcactccacacaggaaagtacttgggagtgtgggtgtggcacatttagaattctagcagtgaagtctgatcatatgtgagccatgaacccctatgaaccatgtgggctttccctttcactaaccgactgggcacagtggagtctgcagcctatggtttcaggatagagagccttagcttctacggacaaagtttccctccccagcagacactttccaatactgcctatctctcagggccacaccaccatcctctacatcccacgcccatctctcaccatccttattctccttcccagggcagtgcggaaggacacaggtgtcaggcattttgagatcttcagagaagggcagggctgccatcaccatggagtattagagctggaaggggcccaagggctcatgcagtctgttccttggttttacccctctcatgatgctgcttcacagtcacactggcccttggtctggccagccacatagctagcctggcagcagtagcctcaaatcaaggggggaggctggcctgtaattgttacactctgtgatgattatgaagtcagctcattgcacctgcagactgtccaaactaaaggtgggccactgcccccacagtttctctctgcttctggtcagctgggttgtcctgcatggtgacgggtgtcatcccgaacaaatcagatggcatcagaggcactccatcaagtgggagatggggaggaggctgtactgaagaaagaaaacttcaacatgatgaatgcccttgaccaactgccaaaacccttttcaaaccccaagtctatgaaccggaccgtcactaccaaaggactcccactagcctcaaagggcaatttggtc

SEQ ID NO: 1244591 - DNA, 4001 bp, Homo sapiens
ggaaagcctctgaaaacccagctgtgtggtcagcagggaggggccaccattcagtctgcagcgagggctgccccccacctggggtgggcctgaccctgagcagagcgaggactgtatggagaatggaggggggcaggggcaggaagagaagcagagcccccagctcggggctcccatcacgctggcgcctccacatcagagctagcctaacccacccccgcctctcctcccagggcagcagacaactaaaaaaagataaaataaaaagaagtaattcccctgctctgacgtcagcgcgaggtcttaacagcccggcagcggcatgaaactggattgcaaccagatgtaatgcccttgaattctcaacacactactgcattggaaagacataaaaggggggcgggggacagtattggtgggaggaaccgtgcagatcccgagtgggtccctgaatccgggcccgccgaaaccgcggggaaggcggcgcgggagagtgtgcggcgcgcggagcagcgcccggccggctccgccattcaggcgcgcggcctcccctcccccagcccccaccggcgcattgttacactcgctcccatccattcagagcccgaggcccgccgcgcccccgccagcccgggctccgcgcaggagagcaccgcggcagcccgcactccggcccctgcgtggactggataacgaccaagagccccaagaaagaaaactgctagccgggaaaacgggcgccccaggaagctggggccgcgacggcctagggcctggctggtgtttcgcttcccctccgccccaccacggaggcccctggcgcgaccaggctccaaatgtcaccctcgcgtcctgccaccccttgtccccgccgcactcggcccccatgtcctcctcccgggttccctgccttcaaggcgcgtgagagggggggccggcctcgaaaagggcggcgggctgcgccgccgtctgtggggcgcaaggctcgcgtgtccggggcccccgcccgtgacgtcatccccgaagggcccgtgcctcccgggcctggccgctacagagctccccaggtcgcgggggccgcttcctgcccggcctcggggcctgcgcacaggccccggggccgctgcccgggtagggacaccgcagagagcccgagcacccatctcgccacgcacggccttcgccggccctgactcccaagcgatggccacgccgggcccgggtcacgcatggggaagtcagctccccgtcccccacctcggacgcactcacaaagctcacctccgcccccggcgccccgcgaatgcaccccacgtccccaccccacgctccgcaaagactccgcgcctcggcgcaagcagatcccttgccacactcgcccctcgcgcccccatgcccccacccgacctcagctggccgcacatcccccagaagaccctcagccgcggcgcagggcgcccccaccctgcagctccccagacgtccatccggtgacctcgcgcaccccccacaccacacaaagcaaggaccccgcggaccccacatctccacccagcgcgcgcgctcggcgtccgaacccgcctcggctcatcacccggcctaggatcccgacgcctcgcgccgcccccgccccggggcaggatacactgcgccccccgcgccccggcgctcgctgctcacctcggcgcccgcgctcactcgggggccttgggtctggcgctgcgacttcgcggcccggaggcctgggtggccatgggggtcggggcgcggcggcccggccggcccgcggccaggcaggaaggagggtgggccgcggcgccccctcctcgcgccggcgctagggccgcgggcagggcggcctgctcggctcgcctctcgccctcgctgcactcgctctcccactcgtctctcggagcccagccgcgggcgggggcggcgcccggggacgcggggagcgggccttggccgcgcacccggccgggcctgcctggtgtccgcgggtgccgcgaggaatgcgatcccctccgcacaggaagagcggacgagcggacgggcgggcgggcgacgcgcggggggagaaggagagcaagagcgcgaggaaaaaagttcccgggcggcctggctgcgctcgctcgcggccccgggcgccaggtgggccgtgcgcgccccgacagcaccccctggcggtccgcgcgccccactgcgcgccccccgcccgctggccggcctgcgggagggggcctctgcggtgggatcccggtgcggcctgggaggacactagcgccctgcgtacaggagcttccagcgtcaggccaggcccccaccctcaccccaccattagccctcacctgtgcccacttctttgcagtttgagaaacattttcgatttcaaaactccattggcttcatgtaaacttcatttactgggcacctggcaccttgctgagtcttgaggaatcagcagagacaatgcggtccctgctgtcgtggagctggcatcctggtgggaagagacagacagcaaacaaatgcttagatacatgacgaagataattttagagcagtaagtgctaggacgaaaattagcaggtgaagtgacggctagggctccttggctgggggagagagaaggaggcctgtctgtgcaaagatctaaatagcaagaggaaccgccatgggtagagtctgggaagagcattttgttcttttagaggcagggtcttgctgtgttgcccaggccgaacttgaattcctggcctcaaacagtcctcccacctcagccttctgagtagctgggactacaggggcctgccctcctgggaagagcatcattggcagaaagaacatcaagtgcaaaggtcctgaggcaggagagaacttggtgagtaagtggaattgtgaggaggccgtcagcaaggggacaagtaatgggcacattgaagtcagagccatatcgggagggccagagcctgcagggctgcagagagctcagtgaggaatttgtttgcaattctagtgcaaggaaggtagccactggcagactttaaacagaggcatgttgaatgagagagtccttgcatgaaacttaaggtacagacctcggagcaatttcatgcctaggtctctacttgccatagctcaggtgggagctcactgccacctgcttgggaagcctctcagccccacccaggctctagggtctgtgggatatgaccccattaacagccccatcgaagcctccctcatttgtcctttggtagggcagaggggagctggtcaaggcatcagagcttgtgggtgacctgggacaagtgaatcctgcatctgcaaaataaggtattgtgatagatggggggccctcactctgtcccaggcctgctgtgccccttctgtgcatggtctcattagatcctggtgccccctctgtgaggtcggctcatcacattttgtggatgaggaaacaggcgcagagtggtgaagtcccctgtccaggttctcaagctacaggacagaatcaacacaggtccccacagtccttcctactggacttggctacccgtctcccagggtgaatgtcaagagcaagacagagctggatcccagtgcgaactgtgttgttttaagcttgttttaagtgcggtttctggatgacagatctggtttatttttatttatttatttatgtattttttttttgagacggagttttgcccctgttgccctgcctggagtgcaatggtgcgatcttggctcaccacaacctctgcctcccagattcaagcaattctcctgcctcagcctcccgagtagctgggattacagacatgcaccgccacacccacctaattttgtatttttagtagagacagggtttctccatgttggtcaagctgatcttgaactcctgacctcaggtgatccacctgcctcggactcccaaagtgctgagatttcagacatgagctaccgcgcctggcaaatctggtttctaaacgtggctc

SEQ ID NO: 1244592 - DNA, 4001 bp, Homo sapiens
ggtgtgaccttcatggaggcagggagcaggggggcaggtgaaatgaacagaacaatgggccatccagatttttccagttctactacccagggctgagggcctgtggcagtggcagggaaggacacaggttccactgaaatggggagaaggacattgtacaaaaaaaaagttttattttgaagattacagaacttgtgccatgaccccacctggcttccattcccagcaatccagggatctgtggtggggatgagagtgagaaaagggagtaggaggggaggagggaggcctggtgggggtggggaagtggagtaacatggttgttgagaagctcgtggccccctaggcctgggcctcactgtctttactcctccatactacaagagtgatgaggaaggggatgaggcagatgggggctatgatcatggccaggagtacatcctctggggggtcagagaaggtgggctgcaccagggagcagttggcaaagtggatctggtgagtctcaaagatgatcctctctgccaagggattggggaagcccaggtcaaacaactctgcaaagtgctccaggcaatctcgcagggtgctataaggcctaggggcagaagaggacttgagtgagagagggggtggacccagggagaagagtgccccactctcactcagggtctacctgcaatgagcaggtccaccccctggcctgagccaccctccatcactgcccctacctgctaatcatggcccagtcgcaccaatccttttcgataggatccatttgatccttataatgattccagcaaaattggacagctgtctcatagttcttcaccgtcccccctgtaggtacagatgctacacaatgaccacacccctacccctccctacaaaccctcctgcccaggtgcttgcaaggtgaactgcctgtcttcaaacgtgggaacccttcagaaagtttccctagcaaaacattctggctgaggacagagtcccagctcaggaatcctataatgacttccatgtgctaagcactttccatcccagcctgataagaacttccacgtacaccttttcctggggtcttctcgcccacttgtgaggtgggcagctcagagccgtgcaggggctttgtaggaggacagggagaaagaccacgaggaaccccaagaaagaacagaggggagtgtagtggggcatcagctggggttgggcaggcctcgtgggaaaggaaccctccccactgaacttgctctcgtccttaccctcggccacccttccacaccctgggtacccaccttctgaccctggtgtgcctgtggtgggaagaggctgagccagggcctcgtggggattcaggacagctgtgggaagaaacgggagaggagggtaacatagcggggaccccggcagtggagcctgcgaggggggttgggggactgagaccctccgaaaataggctaccttggaagaaaaggaggaataatctagcccccacggacgcctcagtgccggggagggaggggctggcaccagctccttgtcactcacacccaggcccaaagccccctcatctctggccagcttccgtcctcctaagccctcttcgaggggccggggccagcaccccagctttccctgggtgggaagcagctcatgctgcgcccgccccgaggtggggtcagggaccgtccgagggccagtgctgctaggtacgtcggtcctaacccgcaccccagggcccgttccggcctcggccatccagcccctctcccctctcccctctcccctccggggcctctcgcgcctcccgcccgggcctcggggcgccgcgctcaccgcccagcaggaggaggaggcggagcgctgccggccgcccgactcgggtcctagggagacgcgggccgccggcgcgctccacccggagcgaggccatcgtgcagcaaggaggcgaggagcggcggcggcgctgagccgggcccgggtgtgggggcgcctatatccccagcccaagctgcaggaagccgcgccgcttcctcggaggggctgggacggcggcggccacgtggggggcgggggcgacgctcggggcccgcggctggagggggagtcgctgcctcacccgcgcctggcgcccgcggctccctccgcctcgccggcgttggcccaccctctcgtagctcaccccgcgaggctggacagctcccggaaccccggaaccgggatctatttcgggggctcggctgcgtggcgcccaggactctccagggtctcccaggatcgctccccgaattcgagtcgccccctctctctttcgggtctggaggggtcggcaagctgctctcccagacgtggagaagagggagggggctgggagctccagcggcctctcgacgccgctgcttctaaggggctgtcctgggttgtgggggaaggggcgcctggagctgagccatgcagctcagggttccttatcctatccctaggaataccagctgatgtcagtccgccagccaaaaccagggaggagaagcgggagccagccctctggagtcgggagaaggtctggggagtggggtagaggggaaagcaaagtccaaataccttcccttcagacacctcctggggcctagaccccacaaacctgttgtggggagggcaaaatacgatgactacgttcccaggaagaaggtgccacagctcttcaggaccacggttgggagaaagaatggaggggttttagaaccttcagtgtgcgacttcatgtgccaggtgagtgtaacaccattttacagaccgagaagctaaagctcagggccaacagcccgggatttgaattcagaagctctgggttctaattctgtcttcttactccccagctatagagccttgaatgacacgtttaccttcaggacttctcatgtgaaatagggacattcccctcctcactgtatgatggcagctgtgaaagggcactgcactcgctaaatgctagtttcctttcctcttttcctaagtgacttatctaaggtcacactgttaaggaagcagcaaggctgagtctgggcctccgggggtcctgacttcagccacaccacagctgcttcttgtgtcctgggccagaggttcattagtctgaagcagctgaggagcccaggagctggtttggccatgacgttcaagtcccagacacagctgtcagcaccaaactttcctaaattactcccagacactgacccttggactcagctgctgctgttgtcccagtttactgattcctgcccaccacaaattatctgtcctgatctctcctgaagtcttcatctcaggatctcaagctcttggatcatgggcacggataacctgttgtcctcctctatggtcaagaggctgcttttgcaaagaatccagtgggagagagtcaatggcctgcttgacgtgaactccaaagtcctcctggtaaggatcatttctacaatgatgcagaaaagagccatgcagtctctgagacatttcaggctgggaccaaatctagtccttcctgcctgcctaggattgctcctttcaagaaggaagcatgggagatttctgagtgataagatgggaggaaggagcaaggaggtgcagaaagcaaaacaagccattttcactgggttggggccagaagcacatgagcccactatgggttaggactggggttggggtcaagattaaaggggacaaaagcaaatgttagatttaaaatagagcctgggcaacatagtgaaaccctgtctctacaaaaaaaaaactataaaaaaatttttaaaaaattagcctggcatagtggtgtgcacctgtagtcccagctactcgggaggctgaggcaggaggatcacttgagccccagaggttgaggctgcagagagctgtgattgtgccctatctcaaaaaaaaaaaaaaaggacaatatggcataatgataatggataatcataacggatgaaagaaaaaaactgatgagg

SEQ ID NO: 1244593 - DNA, 4001 bp, Homo sapiens
gctctgctgcagacagctcggaccgagggcatttttggcatgtacaagggtataggtgcctcctacttccgcctcggcccccacaccatcctctccctcttcttctgggaccagctgcgctccctctactacacagacactaaataacagccgctttcccagtctccaccaaatgagcactccttggccacttgtgcctccaccactatgtcctggtgactactgattaggtgacctttcatccatccatgggggacagccaaccccactccccatctgttctcagggttgaatcactacaagagatgagtttcccttctttccttgggtgttgctttaaaccttccctacccattccctgggtaactcacacccctctctcagggctgaacgagtcatcccaaagtgtatttcctcccactcaccactgccacccttgagtccctcctgctcccatgcacagttttaaactcctccctccaaaaccaaagggaatcgagagacccaattcccaggcgtctgggacccaggtgtcctgttagattcaaaggcacagagattatattgattataaagcaagtttattctgaagagggattgtcttatgtttacgcacagggaagaaataagaggaaaccctcttttcaacctcttttccccctcacagaaccgagtccccaagttctcagcaacatcatgcagtgcttcagcgcctttactggggaccaaagatgttaggatcgtgaagggtcagactggtcaccagctgttcaaagtcacccaggctccagggtgcaggtgacagattttcggggccaagagatgacctgttgtcagggcttggggtgggggaacagatggagacagaacatcatccaggcctgaggtttggaaattgccaattcctgttccccagaggacctgggtatcagttaccccaaacctctggcccactcctgcttccttggaggatcccaccagtgagtctccctgttctgtccctcccagcccgattctcctgggaacccagtcatgagatacccgcccgttccttcctccttacgggggctgattgaaggtaagcaagagatcagtctggtactggggcagcctcagcaaggcctgatgaagtgtcacgtcctttgctacctaaggggatcagagtcaggatgcttacctggatctctgcgtccccgctaccgcccttccaggacattacacactctcgggccctcacctgctggttttccttagctatctgctgcttgccagagaggacccaggcttcttgacagcggcccctcagggccaggttctccaaactgagaggctgaacagactccacatggacagccctagccccctgcacgccaccaacatcctcaaagtggtacctggagtagggaagcggggtcaggaagggacatctctggtcgcctccccgggagcatctttaagttgcaggcctggctcccggcccgtgcgtggtctcaccgcccggattaaccgtcggccgcgggccccgcccactggtccgaccccgcccctgccattggccagccgggggccattccctcaccgcgcagccgcttcgccccgtacgtgggcctgcagctcgagaagttccactatcaggctctggtccgtcacgggatggcagaaaacttcttgattgtccgggaccggtcggaggtcgctggagtgaggcgaggcagaccctggttgaccccggtctcttcccacaacccacccagtcagccgcccctgggcgccccggccttctcaccttacgtcaatggcccccatggggaggatggcggaaaaggcgcccccgaacagcgggcagtctctcgtgggctccatgggtctgaggctgggttatgggcattagaaaggtttaaaagaagtccacattgggtcacgtggcatcggctccctgggtttcgcagctgccaccgccacccgggtctggcttagctcccggatcctttaagatttggctccgccctgcgctctcgttggccaatcggcgccaagaccctgggggcgggggtcagcggctttgctccggaagccgcgctcttaggagtgcgcctggcgggacggtggggtctgccttggggttggacttagggttagggtctatgtcgcccccggtggtcacgagcatgctcccgccagcctcctcttgattgattgattgattgattgattgacaggtctcgctgtgtcgcccaggctgtaatgcagtggcgcgatcaccgctcactgcagtctccacctccaggactcaagtgatactcctgcctcagcctcttgagtggctcctgctcccgccaccacgcccggctaaatttttaattacttgtagaaatggggcggggtggggagtgtctcccaatcttgcccaggctggcctcaaactcctggactcaagcgatcctcccgcctcggctccctaagtgctggaattacaggcgagagccacagcgcctggcctcctcgtccttttcaagtggtcacaccttccaagaaggtcgcctgagaccctcctgaggggcaggtgctcgtcaaaggggcccacgtctaggtagggtctcttgagtcaggaaagcatagtttcacggtgttctgggcctctgaaagaagaatgggctgccacccagaccgctaattcatagatctgctgctgggaattaggggaacaatgcgtccaggttaggattcaggtctcacatcttcctgaaagtgagagccaacctgggtattagaaatctaattcctctcaaatatttgccttgggaatgctcccgggcaggtgcaaccccacccccagctccacacacctggacagaagcacagattaaaccctcttttgtttgtcttttacagatttgttgtgttctttaagttttaacttcactatatcatttcagttcatttctctattcatctttgatcctcagcacccggcacggtgtttagagcataacagacctgatatatattgggtttttttgttttgttttgtttttgagatggagtttcactcttgttgcccaggctggagtgcaatggcatgatcttggctcactgcaacctccgcctcctgggttcaagctgttctcctgccccaacctcccaagtagctggattacaggcatgcaccaccacacccagctaattttgtatttttagtagagatggagtttctccatgttggtcaggtgagtctcgaacttccgacctcagatgatccgcctgccttggcctcccaaagtgctgggattattacaggcgtgagccagcgtgcccagcccagacctaatatatattgttaagtgattgaataaactcaatgcaaatgtctggaacccaggagatcacccataccctcatggattctagatgtcacctacttcccagccaagaattgggcaagaggactctgatcttgaggccattccacagggttccaagtgctgaccatacctctggaccctaatgacttagtgaaatgaagccaaagggtacatatttattggtctcttaccttgccaggccctaatgtgaagggctggagatacaaagacatttaggacacagcccccgatgcctcactgaaggaacagtggagcacactttgagtctttttttgtttttttttttgagaggcggtctcactgttgccaagactagactgtagtggtgcagtcgtagctcactgcagcctcaaccttgtgggctcaagccatcctcctgcctcagcctcctgagtagctgggactacaggcatgcaccaccatgctccggtaatttttgtgtgtgtgtgtgtgttttattttagggatggagtctcactgtgttgcccaggctggtctcggacttctggtctcaagtgatcctcctgccttggcctcccaaagtgatgggattataggcatgcgccaccatgcctggcccatactttgagtcttaaagtttgactcagaattcagtag

SEQ ID NO: 1244594 - DNA, 4001 bp, Homo sapiens
gcccagaaggccccgccatcccgtcaacctcaaggggccccaagcagacacctgctgtgtgcaaaagacctcgatgagtccacaagcatcgactgagcctgtgtgacatgccaggcttccaggtgaacgcgacggggcagggcctgccctcctggaacccacagcctagtggacactgagccagcacacaagggcgtctgggacatcctagggctcttcctccaccttcggctcaccctagacctcctgaatctgaatgtgcatttcattaaggaagccccagtgagaagggctgctagagaagaacttggaattctgctttctatcttggcagccctgggcagccacactcctgtcttccccctcacctgcccagattcaaatctcaggcctggctttgccttgtgctctggagctgtgggtctcaacacagagggcttcatatggaatgaagctaggctgagaccgggacctgtgcacccggagctttctggcgaccagccttccatctgctccacacctcccagagaaaggcgggccttggagggcacaatctaattgctgggccctgccctgcaaggcccacagccaagacacacacacccctcccaaccagaagccaagtcctctgctgcctcccggacactggcacctaccctcggggtggcagctcccagatccaggcgtcagggagggcccgagagcagacacaggcgacgctgtgccatcttctcatccgcaccatcccatctgccaaacatggagtgcccacagtccccccctgccagaggatggatggcaaagtgcttttgaagaggaggaagagggaaataagccacacacacggaagcgaaaaattaccgaggaacacagcccctctccccctcgcccttcgtgccacccccattagtccaccattttccacaccgggacaccccccggccacctcccgcggggccctctcccagtctgacaacgcccccagcccaggcactgaaaggaaaccgatcatgaaaaccaccagactctgttccccagctgcgaagaagctgccagcactgggaaccagagacaagcctttggccttcgtgtgcctaccttctgccccccgccgggaagaaaaagcacatccctcatcccagacagaagcttagaggcaagagtgtccagagggccaggcaggaggctggggacagatgcagctgctcaggctaggacagagctagggtgggctgcctggggtgcaggtgggagaccttctctcacaacccacccccaagacagcaggcagcccagaggtccagcaggtacagactcccctgccacaaggccacaacaacagcacagacaggagcatcacacacacaaacacgcagacacaagcacacacagacacagaaggccagaagtgcagacaggcagctgcccacatgcacaggcacacacctcacacacggtcacacggactggcagtcacagccacacacacacgcctgcacacacaggctcaaacgcgcacacacacacttacacataatcccagacacgcacacacatacatgggaacctgcggacacagagacacacacattcaactgcagtcacactcatgctatccacctccccacgggcagccggcgcagacctccaggattcgccagcagattgtgcccagggacagtggggaaggcttacggtctctgatgtccccaccaggatcctgcatctcgacctgccagggcgtcagcagacccagctctcaggcacagcccgagcccctctgttcccacggccgccaatgcacttaacaagacttcacttctaagttctctcccatcattcccccaccctcccacctgtcacccaccatccgaagcccccaaaggagacactgcgcttccggccaaacatggttgtggctgcagagcccggggtcccagcgatgtcccaacgacgtccccggggctgtccgcaagagggccgtggtacagcggggtcagtgccggtgcagggcggggagcccagcgtggcacctccctcttcgcctgcccccaacccgagcttcctgtgggtgaggctgcagagctgggaggtgtgtcctgcactccaggaggcaccaagataggccgaggaggttgtggagggcagcttccccacacccagaggaacccacagctccggaaggggctcggctggcagattgctccacagccccagttagcagcccggcccacacagccccagcttcctggaacccaaaggcgccccaaggattcccacagccacgcctaggagggacagaaagattcagctggaagcctcagggacgcctgagcactggggaccttcacacccactcccgagggctgcctgagacagggacctttgcctgcctgccccaccatggctcggcacacgccagaggaaccagccacacacatgtcattccactagcacacgtggatgtaagtatacatgcacacgcatgggcacaggggcacgtgggatgcacacatggacacacacacgcccaggatacccaggtacacacagatacatgcacgcagacatacgtatcattagacacctgtacacacctgagcacagcgcggcacacacgctcccgtgcacatccacacaccacttcacacaggcatcagtagacacacctgcacacgcttctcacatactgacaaagccccattggacacgtgcacagacatgaacgcatacacatgtgcccgcaggcactcatccacatactcagaccacatcacactgcaaggggcattcgcatgtacacacacatgggcacagagctgtacctgtcagccgccccccacccccgccgccaagtgtctagacagaggtcagagcagtggcatgcttcacgctggctgtgtggggtgggggggcggtacccatgtgcgggtggatttgtcttcccagctgaaccgcagggttcgtcctcatctctgcatgctcaggtgctggtcctcatgccacagggctagcgtgtcctgcacgcatcccagtctgcacaccacagggccagtgctcatctctgcacgcactggtgctgaccacacctggtacacagcaggcacttactaatggcagcccctcaaagggatgtggcacgtacactacaacagacactggggggagtgggcacagatagggccccaggccccaccctacccccaagcagtggagaaagggaagaaaacgtctcaaaaaaaaaaaaagaagaagaagaaaggccgggtgtggcggctcacacctgtaatcccagcactttgggaggccaacgcgggtggatcacctgaggtcaggagttcgagaccagcctggccaacatggtgaaaccccatctctactaaaaatacaaaaatgagccaggcatgatggcaggtacctataatcccagctactctggaggctgaggcaggagaatcgtttgaacctgggaggcagaggttgcagtgagccaagatcatgctgttgtactccagcctgtgcaacaaagagcaaaactccatctcaaaaaaaaaaaaaaaaaaaaaaaggaaaaaaacggccctagctggtgccattggcctctctctctggccaaccctccctgaaatttcctctctggcacctgctgccactgtgaaggtcctagactccgtgctgaggtgccaggggccaaccccagcttgtggacgaagggtacaaggatttctattttcttgactccttcacagcaggggacagcacaggggcctcaagccctgagtgggctgggggagcagcttcagggtcctgggccagagcagggctgggggctgactctctacctccaaggcagctagtccccagcaggagcccggaggcttcccccaaccctcacctctgccccaggaaagttaggattgtgtggttcatgctctggggtggcttcaggctgctggcttcccacaggatggccactgcagagtgccacaagcgcctctctc

SEQ ID NO: 1244595 - DNA, 4001 bp, Homo sapiens
atgtgtcatagagacacagggtgtgtggtgtaggcgggaagttatggttaggagagctgtgtgtgtctgatatttttctaattaaatccaaaaggtgtcagctccccagggcaactacagcctgctccaaaggagaggacccaggtcttgagaaggatctaggagagtggagcccccctccacacatctaggttggggttccctgccgagggctgagagcaagtgtgaaagccctcaccattagggcctcagccggggctcccaaacctcagaccctcctgggcttagagtaatgcctagagctagacctaaagaaccctcggtcttctacctcagaactaaccagatttggggccttggtttcctcaaaggccccttagtaggggtgctgaaagggagtggtgaaatagtatcatcatttagggaataagcttctcagggtgtggtgattatattttaaagaggccgtgtgccaggtccggtggctcacgcctgtaatcccagcactttgggaggccgtggggtgggggtggggggaggtagataacgaggtcaggagttcaagaccagcctgaccaagttggtgaaaccccgaaaccccgtctctactaaaactacaaaaattagccaggccagtggctcacgcctgtaatcccagcactttgggaggccaaggcaggtggatcacgaggtcaggagttcgagaccatcctggctaacacggtgaaacccctgtctctactaaaaatacaaaaattagccaggcgtggtgccacatgcctgtagtcccagctactcaggaggctgaggcaggagaatcgcttgaacctgggcggtggaggttgcagtgagctgagatggcgccactgcactccagcctgggtgacagtgagactacatctccaaaagaaaaaaaaaaaaaagccgggtgctgaggcctgccaccgaagggtggaagctggaggcgcttggacaccctggatgctgcagggccatgatgccggcccagccacctctcccctcccagacaccttctgagtccagcccaaggagaatactatcccccccaccaaactgctaaggacaacgcatccctttgctgatgcctaaaaggcagcttggggcctgtgcctgtctggcactgcctccctgggtgggtcagcctgcgctgtgtaggcctctgaacagtcagggaccccagggttttcagggctaaagcacctctggcgggtggcatggctgcgctgggcagctcccattttaatgtgtcaggccctaatttggggccacaggaggaggtattcaacatcagggacccatgggagtcagtggctccaatgcccaggggaaaggaagggtggctgaaggagagtaagaggctcagctgcttctccagacgagggtgaggctgctgtagggaggaaggtgagtactgctctcctcttccgcgggagggtctgtacctccgctaggcccctagccggcttccgcggaccactcaaccctataaccaagccccggcacggcgccacccctacgctccaagggcaaggaagaggagccggggccagcccctgctctgggtgttcgagcccaccggctccttacctgaggcggcgctgtccctggtagcccctccagcaagccgctccagaacccggttcagaagatgctcgggccgctcgggggcgcccagaggggcccagggcggcgaagtcaagggctcgcctggggacagctcgtcagatgagtaggaggaaggggagcgcaggggcccccctcccccgagaggcccgggccccggcacctcctccagctgcagccagcagggccccccgctgcccggctcctccgcgacccccgccggctctcctccttcctcctcagggggcggctccagccccggctcggcggggggctcccggaggaaagcggggagcagcaggcgagacacgctctgacgccgctgcaacgaccgctgtcccccggctggaccgccgcccccgccgggtcccccaccccctccaggcccaccgcagctccccagacccccgccgggacctcccgccaccgttcggcccgccagctgcgacgtctgcttcttcagaaatttctccagcggcttcatgcccccccccgcccctctcctaggggtcgccgggggacccaggtatcccaggcgcgggcggggggggcggcgaagacacgatgctcagagctggaggagcagagtagagggccgtgccaggcgccagactgggggccagaggggccgagcctcgctggccagagtccagtggccagtagccgggggaggtgccagaggaaaggagtgctcgctctcagcaaccccccatgccggctgcagccggcacgcggcccgaagagtgggcaggctgcggggccggtgcgcccggctctgcgctgcggcggcagaggcagcgggcggagcgcaaggctgagaggacgcggcggcggcggcggcggcggctgcgctcctggccgtgaagagggggaaggtggcagaaccgagaccgcgccccctcctccagtccccgcccagtccccgcccctacccttcctcggctcgcccccgcgccgcacgaggcttgaactcgcgcgctggggttgaccgcgagggaaacagtaagggacttgggttctaagcagaagaaattaagggcaaaggtaagtcagagatttaccaatggggaaggattcctggctcaagggataaccgggtctcagcatcatttcaaagagtcaggacaggtctgtggcctggacaccttcactcacctacctgtgtacccaagtcaggcctacagattgctgaacccaagagtgtgcacctttctcatactcacagaaatatgtggagtttatcttccttctgtgagaagagctgggaaggcctcttgggtgaattagcattgccactggaggcggtgcccatctgtcctctctggtagggcacaataggtggtgtgggcctggtctgtgggcaggtactggcaggcaggtaggagccaggcagggagcagcaggttgtggcaggtctagctggggtgaggaggggataataggcagtggggaggagaccaggagcacaagggcacctgagcccagctggcagcagaaggaagcagggccatggagacaggtgacaagccccagaactgccgactatcatcaagcacagagcccaagtgtacatggccatggagtgggaaaagtggtgccaattagcactccaagtaatccttactcctgatgcccacaccaggagcattctgtccttaaggatatgctgccccagaaggagtgtgggggaggaggggggtgcatcgtaaagccatgctaagtgtgagaacatccaggttagacttacaaggtgtgggagtggcagcaggttctcgatgggttgaggctctctggacaatgccccacccctgtttaccgagcaccaaccaggcagagacaggaatgctaatggctgggagtggtagtaaaactgaacagggtgtgtatgacatacgtatcaatgtatgtgcatatctgttcccatgtgtgctagagcatgtgttcacagaaataaagctttgcacacccatctgtttgtggatttggaaacagtaaaaagaagacagcgcacaattttggctaagaagctgtattagaggtctgagtatcagcttcctgtgctccccttattggacactccaatatcccctggcttgaaaggggaaagtggctggaatgggttggagctccccaggtagcattttatgaactgaataggaagagggaagggcttctctcccagcacatgccacagttaccagattaagccggttgccttggtaaccttctctctgggcaggatttgggaattgttggttaggaagggcgaattggggagtgtgaagggtgtagggggttgaaaataaaacagactgagagacttctggaagctagaagcttgggacacaggaccccag

SEQ ID NO: 1244596 - DNA, 4001 bp, Homo sapiens
ctcctgcccagtgagccagacaaggaggccactgggcaggggagagagagacaaggacgccaagcagggatggcagaaggaaggtggagacatggctcaggggagcaagtatggggccccagaggaagaaatgcctggtggagagatctgtactctgtgaccacaggtgctctggtaacagctacaacctgcattaggggaattctgcagtaaccggggcaatagccctgcctagttcctccatcccccagatgggcaaaggatgggggaagaaaactaaaggcggagagattgacctagatttaggaagaggattccatcctagattcccccagccattactaccgtttgcagtgagctttacgatacattgtctctgtggttttagtggcaatgtccctgcttgctactgatagccatttttacaaatggagaaactaaggcttagcaaaggggaagacctatataaacacatatagttaagtaaccagtctaagtctccagttcaggcctctgattcctagttcactgctcacagtcagaatctctactttccttgttggatcaagaccagaacgaagtctgaagccaattcattatccaccctgtcctctaaaaccaacctttaggggacccggggagccatggaagaatgcagagcacaccccacacctagacagagctaccagatggggacatgccacccattcctatcatacattgattgctagaggagttccctcagtgtgaccagtctcttctatcacccccctccccagtctactacccccagaagcaagacacacactcacacatggtaagtcagacaaggtgtacacccttcctgtaaacccaccaaaccagaatgacacgccctagatcttcagagagcagggcctgtctgcccaccacaggagagaaaaataagccactgtaaacagtaggtgccatctagccctctcccagagagcctgtagcggggcagaagcttggggaccttgtagctctagagaaacaccaggagcctgagattctgaaagccaagaagctcagggagctggcaaggctgggtgacctcctcaatctggtccacacccccttccctagccatctggactgagcctgttctggcctgggccacactctggtatccctccccttcaatgcatgcagccacctctatccaaagcttctagatcttacaaccacattgtccctacacacacacacacacaggtggggtcggggggcttctgcagcaggtgttgaaatgttgacatggatgggggctctaagctgaaagaactttcctagaggaaaagctcaccaaaatgctcacaacctccactaccctctagcaaagcctttagccacccaagtgtgagatgaacctggaaggggacattagttcccctacaaggtgtgtagggagtaggggcaaagtcctgagctctttgggtgaggaagcaagaaagaaatcccttgggaaagctcaggtccctctctggctctctcctctctctgttacctcagcacttgccaattctccagtctaggtgaggtgggggaaggggtattaggcaataccgcaaaggagggtgcaagggcgtggggcctgggcagaccttccccctactccccactcttatctagagaacgggaactgcctcaggagaaatgcaggaagggtgctggagggtgcagagggctctgagctttcagacaccccactgttcccaggctcccacctcccaggactacagtgagcgacgggagaggagggatggggaaagccagaactggcgagaaggaaatggctagatcagaagcagaggccggggtcaaaggcggccaaagaattgggaaggggtgtgcatggtcctacctgctcaggtgtgtgctggcagggggccgatggggttcccaggagaaccggggaagccctctcagctcgattcaggattcccccctgcttctgggttaggctgctgcaagaggcacgggttcccgttgggtcctaaagcccactcgccaactagaaggctctccccgccctcttccaccagccagccccgactgggtcagcgggcgcagagcgaaggactgatgggggagaagtaacccactggaagaaagatgggcgtctggtcatcggctggggacaggaacagttccctgtctcaaatacacagcatatggataactcgaggataggatgacctgaaacaggagaaaatagacatttcttcctgcctgccctgagcagatggatttaggttttggtgctggaggtggggttaagatctctttccctgccactcctgctaaggcattcagctagagattttggaaagggagcattcattttggttgggcgctcacttctgtcctcttcctcatggactgcaggagtcccttcatccctcccaattattcccaaggacctaggaggccatagagggtgaaaaaagattttcagcatgtaaaaagtgcaggctcacttagatggcagctggaaacaggggaaacatgtaggaccaatgtatgtgtatctgggaatgtgtggggtctgcaaatacacatatataggcaagagtataaacaggtggggttagggaaggagaaaaaaacaaaaaagaactttgggttacacctattactggaaatggtaattgtcagtggaagaacaggacgtagaacctagaggtcaactagtgcccctacccagccctcagtaatgtcccgaatctttatgaccagaataaacaagttaaagagagaatattttcctagataccatttaggataaatataggggcagagggacctcaatacaacagatcaacttcaaggtcactgattcagtttagtatagccagtcttctcagtagctcaaaagggagaattcaggtttggtgggctagatgggcaagagaaagctggataagaattctgaagttgtggattgagaacattttgcaaggagagttgcacatatctctagcagcagagcagggaaaacgtcatgaggggaagggccagaggaagtcagcgacagacttgaggggagagggcatggcctctccctagaaggggagaagacaccagcaatgcctccacctctgtcttgcaggaagaactgagtaaaggagctggactaaggatggaaggccccagggtggagtccatggggtgagtttaggtcaaacctttcaccctaatgtgcctcagttctctcccagctgttaaacagggctcttcgttcttcccaggcagttaatgagtgtttacaaaagggtttggagatcctcagatctcagctgggccaccactacagttataaagttcaataagagctgagtgttatttggggaggagaggagtaggggaaggaaacagatactctcttataaactaaggataaaactaagctcagagagaagcacaagcctagctgccacaggatatccttgtgcccatggatggaggtcaccccacccccccatcaaccaccaccaaaggctggcctccagctagctgtaggcagaacccagactagcagctggtcttcattaactccagctttttcaccccccactgtgaacccacagcttctacaggcctaggctagagggggctgccctagcccgaccttgcagctgacactggggtggggggcaccgcaccaaaggccaagttaccagctgaaaagaaagttgaagcaagagtcctttttcccattgggagcaagaagaaagcagtgtgggggtgagagggtggaggtgggggaatttagggcaaacagcaggcagtgaagtcagctggattgaggcccagaaacccccacaccctggggccaagtcttactctagctttgctttcagcttaagtcttggcgaggccccaaactagggaaggccctggttgcccctttccgcctccctacccccacccttattaaatacacattttatctctcagcatcttcattatcttaactg

SEQ ID NO: 1244597 - DNA, 4001 bp, Homo sapiens
cccctccagcaaagagcccaaagcccaggaggggaagaaacctgagccatctaacaataacccccttgcgcctgctcccgcccacccagtgtacactgcctcacagctgcgcaggaaaatgcccaggtgtacaccctggtgctccgagctcctgagtgtgcacagagcccttcctcccagaggagcctgcacccaggcagggggcaacaaggagagaaagtgaccaggctgccaggatgctaggattctcatcagtgcccctcttaggaaggcacagcccaggacctggccctatccccaagtgaagtcagggtaacaaaaggactcggtggcggagctgggaagggatgcagtcctcatttccagagcagccccagacccacaaaaacaaactcattccccagagaacaaaccggattaggattagggggagagggattcttctcaccagagcagcttctcccctccactcctggggatgaaagcctcaaagatgacagccaagtgtctggggccaggacaacaaccccataaggacccagtgccccttgccaagatggaaggttaggatggcagacgggtgtctgatgaagttgcccctttctgccacaccccactgtcaataccaaagacactgagtgctcccctgacacccactctaatgacgcaagagcaagggctgggggcagcagctgtcgcacaggaaggggctctccctcgggctttggcaagtgggatctggcgggggggccttcccccgggagcagacaaacccacacagacaggacctttaccccaccctccagcctgctgtgaagctgttggattccaggcaagaagatataaactgggggcaaggggcttgggcttcatttctcctggaagaagtgaaacaagagatgaaggaatgttgcttgaaagaaggaactctcaaagttcctcagccctaatctaacacaaattgcacttagggttactggggggagggtgcggccgggagggttcaattgtccagcaagggcaacacgggttaagtgaaaggtagagacaggacctccactacaccccgggactctcacccccgagtagtagtggaagccctaccgcccactcccaccccctacaacagcagactgagaggccggtacgtacagtggtttgagccattccaaagcggagtccggagcggggtggagtacggacccggggcggggagccccttctctgggagcaaacaggcccggttctggttataaaaatccaccactaggaagggattaggggtgggaccccccacttctacactctcgtacatctttcccctcgaaggcaagaggtccgagctgggaagtcctgcgcgccgcccccgtcactcagccggcggcgccatccgagcagagcagctgggggagaggagacgtcccctcgccccgactggtgacccgggcagggggcgccccctgccctgaagtccccgcgtctaagtccgccggccgctccgccagtcccggtgaaaagcagggaagttgtgtgtgctgggagggggggtccgtcggctctcccagggaagcctggcggggcccgggaactcagcggcttcacctcgaggggactcccgtctagagtctcgtggcgtccgaggcagagtacagcggctccccaagtccgcaggccgggggcgggatcagcgcggggctgggggtcaacgagcacttcctcctcccagccggggatccggggcttctccagggattctccgtggcgaggattccgggtgggggtggggatcccgcgcggttccgcccccgccaggccaggggcagctggcgactcgctcggtctctggtggtacgcgccacggcccccccaccccagctctgcgcgccccctcccctccgggcaccaccccctttccaccgccccgccccgtccaggcaccgcccctggcttaacccattcccggcgcgtccggctgcagcgggagaaacgcagggaaccgagagggagaggcggcatgtggacaggcaagtgggggcagcctgggaagggggaggagaggagagaagcaggaagggggaaaggctccagatgaggagtacacagagtacagagggacgccgagtacagggagaggagggggctgcgaggggacaaggacggaagaggggcgggcgtcctcccttgtaccagttccggctcccaggctcccccaaggtttggtcagtccctggccgagcgaagccgtggtggaggaggtggtggggcggggaagaggggggtggtcccggtgtcctccccttaacacacacccccacccaggccgggcctcatttgcctaatgcaatgcggctgaactctcgctgaactcgcctggcggcgcctcacctccgagtgacccacccaccgctgcccgtgacatcacccgctcgccagcccgcccgcggggctcgcccgccagccccctgcccggccgaaccgggccacctcccccggagacgcggagagcggcggcaggaggcgtagggccgggtcgcgcggggccaagtgtttggcacccgggtgtgacattgtgcagctcggacgctgtgtcggaatgagacaccggcttgtgtcattgtctgtgacatcatgtgtgactccggccgccggaacccgacgcggcagcgcgggtgctgttggcacaaacacaggcagagggggccctcctccccacgctctgcgtgcttccggcgagcaaagccccgcccaaggtgtctcctagctggggaaccagtaccggcccctggtgcactgtccagctctggagagataaaaggaagagctggtgccttccagtggactacttcatcctagaagccctcgggatgcacgtttcactggaagaaaggcctagcttgggtaggtccctagaaagaggggatacccctggaggagggggtatcctattacccccactctctaaaaggaaggatggaaatgtacatgctacccaaggacattcttctagaagaagcctggctctttatatatgttgtcattttatcctcacagcaactccaagagatgttttacaaataaaacaggtctcagcaaggctatgtgggttgtccaagatcacattactaataataaagagtagagcaggtatttgaacttcctgctgccaaagcccatgttcttaccaagctaggccaattcaaggtatttttctgagcaccttctatgtggacaccctggggaacctgcccttgtagaccttagggagcaacagccattaagcaaataatcactgtatgcacacacaattgcaaactgagataaatgctattatgctctgaagaattaacataggtacctaatttaggtttaactaaattagggaagaactcaaataaaacagacctaccataagagaaagtttgtaagttaatcaggcaaagagtagaaaggagtgtagttccagttaaagggcgagtctgtgcaaaggccctggggttacagcagttgatgagttcattgaaggaactggcagaaggctagaatcatggggcacaaaattcaaaaggaaaaggtacacaagaccaggctagagaggtgggctcaggccagaccaggggggcttataggcctcagtaaggcttttggattttatcctaaatgcaaggaaaagccatagaaaggttccaagcaaaggaaagatcagatttacagtgtaaaaagatctttccagtagttgtgtgaagaatggattataggagggcaagagagaccaggtaaaagctactgcagcagtccaggcatcagacaagggtggcttggcctaggaaactggaagtgctgatggacagaggaaggtggattcaataaacattttaaaggtacaaataacgtgggggggtgggggtaaggggtatgggaaaagaggtagcaaagagacttgtgtgtgacttacgcatcagtgaagttcctgagactgcaaagcagagaagtccactgggctg

SEQ ID NO: 1244598 - DNA, 4001 bp, Homo sapiens
aggatgtggccaggattaagccatttcaaccccaggatcttctcagaactgccactgcatctgtgccaccgtcgccagtctgatggtgaaacccctgcagtgacacctcatatacactcaatcacaccctcaaaatccttgcaaatccaagatcctcagctcccaagaggctactccagtctgaccctcctgacctctctttcaggacaccacatggtccagactcccaggcagtactgatgtcccagctccctccagcataccatttttcacagccacaaactccctgactccacaaccaccccctcttattcctccaggaagaagcatcatacaaccaactccaaatattttttctcttgttccttcccccagcctcatctctacccgccccccccggccccctccaggggaagccccaaggctccaagccacccccactccaacccggggcttccccggcacagcctcttcatggagccctgtaggagagtttggggcctgaggtccaatttcctagcaagacctggaaggtccttacagaaccacttcccccaaaacaatcttgccctatgaagactgcaaccagagaagggtataagagacatcccagaatgtcttggccaggaaactgaggagggggagtgtcaggggcagaagtgatccttggggtaagcagcagggggtgggggggtcggggggtgttctcagaaacaatcctttccaagaatatctacatacacatatgtgcacacagccatcagacagaaggcaacctggttacagaagacagagccagagggggcaggaggtacccttccaggccatcacactgggcatctgatccaagacaggatggagggtgcagaaacatctccaaggctggggagctcttctgtctggtttccgggttagttggtccccatccccaccctagcacactggaggcctgtctttcctttcgcaaggagcagcctgacaataggccagtgcccagagaggagatgaggggacatagccaagctcatttcccagccgtccccccaaccccacaacaggctcacacacacatctggccagcagcttccaagcctcgtgggtggcaccaggtcccagacaccctcagcagagcaaagtcgacaagtcagtctattccgtcttcccctcaccccaaaaagttcccacaccccatggtggcacaagacccaggaacacccctacacacatactgcattggctcccgcacccaattctgacggttcccctcactccacgggggacaccagctgaaccggcccggcccccggccggctccctctggtgggagtgggccccctggctgattctccccaaaccacagggcagctcagataacaggagggaaaaagagagggggctagtccgttgagcatccgatctctccccaaacaggtttgaattcaagtctttttgttttgcttatcattaaagagaaaaagaacagaagttcccagcggcggttctgcaacagctcgagcgcgggggacacgcgcagcagacggccccagacgcctcaaggctgcgcgcgaagacacggcgcaggcagactcacagacggggctcccccaccctggacacggcggcagcgagttgggaagcccaggaaaccccgggttcccgtcggaagcctcccggtacccagtcccctcccgcagcaccaatctggggcaggacatggggccccgacgcctgcgggaaccaggggctccccaaaatccccaggggaggaattacctcgcagcgggggaagcaacccgttcggggtgccagcgagcacagcgtctgccctaacccggcgccctggtgctgctcggcatcagggtgcggggtcccgggagaggagccgtccagggggccgcggctcaggggcgcggggcgatggcagcggccatagcgagtcacgtgcggaggctgaaactttacccggagccccagactgaaggggcggagggtacggagcagaggtagggggaggccctgtccctcaggcccgcccctgcccgcccaccgaccaatcaccagtcaggggcggatctacaggctcacgcccgcccccgcctctccttaatagacctcgggaagggcgagtcttaaaggagccactcctagttgaagactggaccgtgggaatccgggagaatccctccctcagacccagaaccgaagattcagagcaagaacggggtgaggttctgcggaaagaatgaaaatagcgctcggtggagaagaccgcagcgtgtggtatcctacactcctttccccccaaccacacacacacccacacctaaatctgagaagtgaggcggcggcgtaatatggaagtgagtgcggtgactcctgccctagctgtcaagcccctgaatcctataattataatcctcttctagggaccagctggaactgagagctgtgtgaccttgaccaagtcacttcccttccctggatcttaattatctcagctgcaagaaaaagaaaaaaaaaaaaagagtccaggagtagatctcccgcaagtatatctcttctttccccaaacacctctgcagctccagtgggtcctaggaaccctggctcaacccaaccctcccagcccccttaaagtactcttctcctcaaagggcaagacttttggatcttccagtaggggcgcccaggagcacccctccgtgctcaaagactcacactcaagcttctctctcccgaacaagtctggagaagccaggaaagctctttttcatgttccagctggacaggatctgaatcaccctccatctgagagacccccagtccccaatacagtcatgacccccctcccagcctgcagctctgtttgggaggatcctgtccccatcgctagcagtccactggcgggcttagggggaagcagaattgcttagaatactcccctctcgccctgttcccaggcagagaagtggccacaagtgcccccacagaacttcccactggaaggggaagtgctgcactcccaggcctccagcccagtgaggagactctcagcctgacccggtggcagagctctcaaacccactggtccgacggaccccgctttacaaacaaggaaagagagtccaagagcaggcactgggttttgtgcacagtcgcaccggttgcagagccgggtctagaattgaagtatctgattgtccctggctttagcccaagagccatggtaaggtaggacaagccaggatggcgggaccctttgccctgagggccggcgcacgggaaactgccccagcagtgctgggccgcgcttccccaggccccttcccgcctgctgggccggagctgtctcccgctcccgtctggatttccgtccgccggtgcgaacctcccgcccagcccctcccgccctgtcctgtccagattcatccgcaaacatgcgctcagccggcaggaatgcgccaatggctcccagatgtggacgccaccgcttaaccccttaccccccagccgcgctcccccaagggccttccagcctgagccccgccaacagcagggagctctgcccaggtgagaaccagcccaggactggagtcagcgccagcccgcccctagtgcccacggacacctcccaacctagatcctacctgtcttccttccttgaggctggaggggaaggctcatggacacaagaatgcaagcatgcatgcacacagctacactgcctcccaagtgggacgaccttcaggtacacctgccatcatagggtcaggcatcctggtacaaatgcatttccacgtgcacattcagggcagggatgtgtacatccccgacgcatgtatgcacatccacgcatgaacaagtacatccaaacacatttgtgcacagacaagggcatgaagcagagggtggggcacacttctgcacagacacagaagtagccccatgtgtggatgagggaagaaattcatacacacaaacccaccccccgcaggggtcag

SEQ ID NO: 1244599 - DNA, 4001 bp, Homo sapiens
ccagccatctctaaaagcaaaaaaaaaaaaaaaaaaaccggttttccattttaaattattttattgtatattaaaaaaccaaataaagcaataactttaaagacctcagacacacacagtataaacacctgggtaaggttttgttcgtgtccatgttgacaccggaactaccgttaaagtgcaagttttgttttgtgttcctttgtgcagtttcactcacatgtaaacaagtcacttggctatgatttgacccacgcccccccgcttagttttgggagggcagaggctctaccggctgtcacagcaacccggaatcacagacaagataatgccccgtgggtcctgaccctcaagcgggcatgacggtttcttgaagcctagcagaggctggataacttcacatccctcccccaccccgcgctcactcttaggtctttgagaagataaatccaccctcggctgggccctcgctcccaaagttatgggggtggcgggcctcaatgggggaccgggggtggggaatagtcccagtcttggcccgttctctttccttccggagcagatgaccgtcccttctcggttcagtggcgcctccccagtgctgggggcggatcgccgggaggggagacgccagtccgcgcgcgctcccggcctggggcgcaccgggccgttggatttgacttaacaaaaaggtcctccttaggttgtgtcgccagcgcggcggggctcctagctgatgacgcagcgctccttgtccttggcctggctgccggcgctggccttctcgcggatgtacatgaggtcgctgtgtacgctgggccggcgcgcgaagggtgccacgatgccaaaggcgtcgcccgggtcgccgccgccgccgccgctgccggcccgcagcagcttcttgttccgcagcgccttcttgtgcagcacgtcgcagtactgcaccgagaccttgcggtgcaggtctgggctcatctcgctgggcagcttggccatggcgaagagcgcgcggaacatctggtccaggctgctgttcttcttggccgagatctcgaagtaggcgcagcgctgggggtcgtcgcccaccagctgctcgatctcgcgctggtccacctcgcggtagaagtcgcggtcacccttgttgccgcagatgaccaggggcacgtccacgttctccttggttttgttcttgaggcaagacttggtgtcgaggatctgctgcctgagccgctgcacctcctcgaaggagtcgcggttgtccagactgaacaccaggatgaaaacgtctcctagagggggcacagagagcagaaaaggagaaggtgagggtggccgcccaggggacaagtcgggctgactttgaggccgcgcggggcgcgctagcctctctaagcgcgaagcgcactactcggcgcgcggcagccggaccggcgctcgcggggcgccctggccgagggttccccgcccttccctcccgcacctgcccggcccccggctcacctgtgaggatggagaggcgccgcatggcggggaacgggtggttgccggacgtgtcgaggatgtcgagctggtagacctcgccgcggatggagtagaacttgcggtggaagtcctcgatggtaggcgtgtaggcgtcctcgaagcggccggtgaggaagcgcgacacgatggccgtcttgcccaccttggacgagccgaggatgaccatgcgatagcagttcttggccgggatactcagctccgagtcgctcgggcacatcttcttgatcatcgcggccagtttcattgggcagaggggccgcgagggcgggcgcggggccgagagaagggcagagagcggctgagggtcgctggggtggcacgcggggtgagcggctggagggctctgctcgggctgggcgcggctcgggcttggggctccggctccgctcgggctgggctcgggctaggctgggctcggctggggttctcccaggatctgggcacaggccgcttgctctggctttggcgcccggccgccgcccttatatgcagcctgctcggctgccccgccccggccctcccagctcggtgcgtcacgccccgcggggcccgcctcccccgcaccggctcccagtcccggcgacctcgtcacccgctgccgggctcctgctctctgggcgcgggggctggggggagcagtccagggtcgggctgaggctggaggcgctcggactccgcttttccactgccgcgggctcggcggccgcaggggcgtcggggttctggtcccggcggtgcccctgtccctctgcgacttcgggcaaggacccccattcctgcacctcccgcgcgcgtacacttattttctttggttctcagtttccccagagaataggaatctagtaagtaacccagtaagcgcagcagcgtttgctgagtgcttgcgcggaccgtatattgcagtcctcagagcacagccccagccccagcccccttccgctccggtccccagccgggctcttgttcccgggaggcgaccgccgggcggacgcggggtttcagggcctcaggcgcggagctcggcaccgcgcgctcgggccgccagagggcagcagagggcccggccggcggctcggggaggctgtggccgccgcgggcagagctagaacagaggctaggagcaggcgggtggggagcggcagggatggagcaggggtctcagggcgccttgctggggcccaacaggagcggtccccaaccccgcgctctgctgcaggcctcagcctgctcctttctcccagccagagatgctctgtggtatggagggctctgcagccagcggcccaccccgtccatcatagcattttgggcttttactgtgccgcgcgtgggccgacgttctcattgtctagctgagagacctggagctcaaagccacagcgagccaggaaggccctgggagcacagcacagcctcttgctttctcctgggcctcagttttctcttctggaagatactgattctggttctgtgattaaggatgaaaatatgcaaatgctttaggagggcggggcctggtaataacaatagcaacaataacagtagtattgacccatgaggcctggtgggggtactctcaagagcacaccaggtcgatcagtaaccaggagtggggtgatgttgctgaacattggcaacaggctgtctggagccagctcctcagccctgagctcttgaggcagtcactgctcctcaaggcaacctgtgtgctcagtgttttgctttggccacgtctgacttacgagaaaactagggagccattagctggcaccaccggcccagctgtcaggtggtggtctgcaggcagtgctgtgagtgccataccacccaccccatgcctacccacctccctcccacgctggcacttgctgtaggggctgctgcaggacaccactaacttgtttctcagcccagcttggcccccatcctcagagtccctgcatctctcccaggcctcactcttactgtcagatatttcaaatgcacgcatcacacagtgagcatccaagggctcatcagtggccctggcctggctctgattcctggtgtcacttatgcagcagttatccgacaggctagctggggctggagccccgccattcttggttcctgcccccatctgaggtatgtctgccagagtctgggagaaggggagaaggaactgagtcgcagccctggatatagggctgcagtggtgcagggtgttcactgcataaaggagccagttgagggtacatgggggggctcagttaaggtacggacctgaaccaccttcagactgagcaccgccttcctgtgcctcccacagcggcactgcatgggcagccgggctctaacttgggatgactgatggccagggctatagtgaaggtggaccccacacagccattgcctcctggggctctagtcccaagagggtccatttgatatgagtggagggcccgagggtcaaggatcac

SEQ ID NO: 1244600 - DNA, 4001 bp, Homo sapiens
ggattcccaggagggtgacatcagcacttgctaactggctccagggcaggtgggttcgccggattctggcaaggccatgcttttccgcatgggtgcatacttctctgcagatgcatgttctttccacatatgcacaagccacagctgaatgtcccccaggttgtcctggttcagaggactcactccacggggtatgtgcgcacacagcatagtaaatacaggtcaggatgtggaatgagaaccgccagggcttgattcctagctctgccattcacctgaagtgtgaccttgggcaagaaactttattaagtgttatgatgtgtgcatgtaaagcccagtgcctaggccagagtaggtgttcaataaacagtgaccactgctatgggcaggggtcattcattcatctaagcttcccacaaacttagcagtggaacctcctagcaatcccaggaggggctgctatctactgttgcatgagctcacatgcatgcagtgtgcgtgagagagattcttctcattttattgaaggtttaaaaaacaaacaaaccccccaaaaaacaaacccagtgacttagggaagtgaagacctcatagccagttgagttgttaactaagattaggaccctgaactccttcctgccccatgcagtgtcccttctccaacaggtgtttatacacttacatgggctcccaactagggggaagtacctatccctcctccccatgtgtccctccaggtcccgaagccccttaggcatccctggacaccactaccaccagcatggcagagagactcagctgggttaattacataaccagtacaggcaggtggggagtggggagtcctaggggaggaagagagggcaaggaacgccaagaagagtcctggcctctctctgggtgtggcagctcagagatttctaggatgcaccctacctgcagattgtcgcggacaccacactccctgcccagaaaccagccctttctggggagcggcagggaaatgcaagaggggcactacccaggagctaggaagggggtgcaggaggcccctaggctggggccagcctcctggaactcatcaggtccaagtgtggccctgtccccaactcagaagcgatcggtgccccttccttctttccaggcagaggtcctggatctaagagtatattaatccaacacccttggctgagtgcggaagggagggggctgtcccaggaagcagggcccaggcccctgagcgctttctccccaaggcctgcgctctgcagtgagtctgcagacagcgcccggcaagagactgcccggaaagagaggcaagagaccagagacacacacagggggcgaagcctggttccgtccccttccctgcgtctggacacctgggtcgctgcccaaggctgagagcgggggcttcgcggatcccgagggccgggtcacaagtctgccagctgtttgttccaaccacgttcgcctgggggtgggctgggggcgacagaggatgctgcgctccccatgacctgattggtaggagtttggggggatgtagaagcccagctcgctctccgcctccagcaccttgcaggcacccccacccccagctccagctctcacgtggcggccccgcgccgcttccccgcccgcccgcccgccggccccctcctagtcccggacgcccctcgcccaggccgtctcctcctcccccgaccccggcccgaccccccgagcccctgacccggccccgctccacccctgaccgcttcccctcctcccgccgcttacccggggccgtcctagctgccccctgccctggccggccggtcggcggggctgagctccccccgggctccggcgctgccccccggctcccccgcccggggggagagaagtaggggctcccccgcctgcccagtcggggcgggctcagggcgggcgcgcgggggcagatgcgggccgccgagggggtaggaacctccagccccagctctccctccggagcgcgccgcctgctcgcgctggaaggaggagggggtgcgggggtgcgggctggcattccgctgggtccctgagcctgacatattcgcttgggcggccctggacgaattctttaatccctggcctcgaccttcgcacccctccagactctccctgcgggaatttagctgtaacttggaggagctgaagaaaggcatgggaaagccctcaaggcctttgctcattccgactcttggcctcatatgcccctcgcccaggcctgtcaccaggccactgtgtgcccggcacagtgtgttagagacatccaggctctgctcctccaccctcctcaagggctgagcgaagggtgatcactctcacccttcactgctgcagtgaaaggcagagctggctggcacaaagaaggtctcccctgccaatgctgacctccacgcccctaaaactgtcataggcctcttctctccagaatgggagataccagcatttgtcaggattgagggcaaaatcacccatgtatttattctaaaagtcatcatctctaacctttaatgatcaacgtcatgtcataatcaatgtcatcattgataggcaacctctattttgccagtgcgctatgagctttgcatgcatcctcagattgaatcctcacaattctacggggtagattgtttcctccactttacagatgagatagttgaggtcgagaagcttgtctcacttagatgtaaaatgtgaatacaaagattgggagtccctagctgagcagtcactgatgagtttggtattaggctcacagtccaacgtgagatcaaaagcagaccacacaacattaaaatgtgctgtgtgcaaagtcaaggttctgcggagggcaggggaagtgggacaactcattagacgagtcactgaagcttcgcaggaggcaactttcaaggaagcaaccttgaaagaagtagattttggggctgggtggagggagattgtagcagaagaaagctacggaagtcaagagcaattacacaggcttgagaagtgagtctgggaaccagacaggagcccatgaggaagcatggtgggtggagaggcgagaggttggtcacaaaggccctgattgacaggatgaggagttgggatccagccctgtgctggatgggaagtcatcgaagagttttttgttgttgttgttgtttttgtttttgtttttgagatggagtctcgctctgttgccaggctggagtgcagtggcacgatcttggctcacagcaacctctgcctcctgggttcacgcaattctcctgtctcagcctccagagtagctggaactacaggcacgcgccaccacacccagctaatttttgtatttttagtagagatggggtttcaccatcttggcccggatggtctccatctcttgacctcaggtggtccacctgcctcagcctcccaaagtgctgggattacaggcgtgagccactgcacccggctctatggaagagttttaaagcagggacacacctgctcaggttgcattttagagcctccagggcaggaggaggagcagaagcttgagagatatcccaagtgtttttacccctgggaccctgcatcctccactgtgacctcctattaccctgtgctccggctctcaggctcccaaacagaactcagttttcctccacagtctgacctctgcattttgggcaccttccctattcctcccttccctctcctgttcagtcacagaggagaatgggtatgagcctgggcttcagaatcagacagagctagatttaaatcttgactctgccacttactattgtaactgaggcaagtaacttgaagtctatagtctcatttattaaatggagtgtgattaattgtccctcactgttgttgacagggtgtaaatgagctgaggtgtgtaaaatccttaacacaatgcctggcatgtaggaagtctcagcatggggcctttactttttgcctttttagggacacgcaggcattct

SEQ ID NO: 1244601 - DNA, 4001 bp, Homo sapiens
tgctggacagaggaagccactggaagcagcagaaaacgcggccaacactcctgggattctgctcacctcccagcgtccacacagccaggcaccccctcaccccacccttcccaacagcatgcacctctgcagtgggctacattcagaacatgcacctgggtatccgacacacgggtacacactcggcggtcacgcagacatgcactccctgggcccagcactggtccaagcagtgggccactattgcctcactgagtcctctcacacctgccaggtaggttctagaaccaccacattcacagatgaggtcacgggtgcgtggcctcacacacccaggtggcctgagtcacgcctcgttgttgtgatcttgacaaagcaccgctgtctcctggatctcggcaaccacacagcgatatcctgcccttttgtggccactgcccgacaggctctggggccacaggcaagtttccctggctgccaccacacccctagtgtccctcagcaacaccacagccacccctagtaaccctggccctaacccacagcatctagcacaagcctctgggtggcatctgcatccccccaggccatgtggatccactggaccctggagcatttctatttggttaaggccacagcttgggaaggacaaagatggcccagtgcatgtgaacgtcctctgtgcactgtgaaatggaaccgtgcagaagctgtggttgatgtggagctgttctcttgggacttggtgggacaggatggggagctttccagaaagaccagacaggaggctggggctcggcgctgccccattcctaatccccacttccctagagccgtcacctctttgctgcctggggtgagggaattctcccgactctccaacacaccttcgggtgtcctgaggcagaagttggcctctgcctgggtccctcagcctgggtgcacctggtaacatctggccccacccacacatctacgggaaggtagaacttggcagaagggcagaagaccctttccggaggagcaacactcaagccaagtgctgagcttccatctggatcagcagagccctgctctggtgaagccctgtggcaagcctcccactgctccccaggccaggtcacctcatagctggggcccctgggggtgtgcagtgcccagcctacagctgggagacagcacatggcccagggcccagtgatccagccactcccccatctgacccccacgcagctcccggccatgtgtcaagccacttgtaccccaggtctctcccatctcctgtgttacactgatccccttccctgagacttgcaggagctcatcgacagggttacaagagaaccgcaatcggagaagagccaccagcacatagaaaaaacgagaaatgctggccgctggcagcacagttccttctcagagtctctgctctgctctttccttgaggatgttttctcttccctccatcagaaaacctgtttgcctttcagtttcaacccaatgccacctcccacattgcccctaagtacccaccctcctcaaggaggtatctgccccttctctgggtccttgctgtggcaaccacacaccatgttagtgtggtgggcaggcattcgaggctcccggctgaggttgcaccgcttcagagtccgtcgccacccttcacccctgcaccgagccccacacgctactagcacatcacagggactaaactgctgctgggtggattggctacaggccttctccagcaaggaacatagtttatcttcttccttccagaaacctagctttaatcgaggcgctcacctccaggaccgaagtcaaggtgtcctcgactccaacagccttgagtccaaggctctgtgtgcctacagccaagaacatttcaccaggccaacagagagagaggagagagtcagagagagagagcagagagtccgagagagagaggcagagagagcacgcacagcctggccaggagcaccagctgctgctgtatcagtctgcattctctgggcatgacaaatgttcaacacaacaaacgaagaaaaatgaaccatttccattgcctaaaatactcccatccccacggggcttaagataaaagtaagaagggacagacattgaattgaagagaacgcaggtggccatgagttctatgaaatgcccacgtgtggccacactcccctccctgggcacccctgcctttctaccagcatgcccgggcctgccccctgccctggagaaccaggatacccagctcctgggcagagagacacaggctctcaccccatgtaggattaaatgaggctaactcaaaagagctgcttcataaatattcacgtccagcccagaggggctccaggccttagaaagagccagagctctgttcacgccccgaggtcagagttcatccccagaggaggtcctgggaccctcattcctctaattactcctgagagcctggcccagatggtagagacgggatggaaagtctcaggtaactcagatgagaagctaggagcagcgagatggagccacagacttggggcctccccaggtgtgccctccgaaagcacgctggagcaacacactgtgcatggatggatggacggacagacggatggacgcgatgcgctggaacgatccctgccccaggaagaaaggaagctctgacacacgctgcaatatggatggacctcgaaaacgtgacgccgagacaagccagacacaaaaggtcggatgtcgtacaatccacagtccacccctcggggagtcatactcgtagacacagaaggtagaatgggggttgctgggctggggatgggaatggggagccggtgtttcataggggccgagctttggttggggaagatgagaacgttctggaggtggatggtcacgattgcacggcaatgtgaaggtgccgaatgccactggctgaactgtgccctcaaaatggttcgtgtggtaagtgttatgtcatgtgtattttatcacaataagaaaaaggagggccgggcgcagtggcttacgtctgtaatcccagcactttaggaagctgaggcaggtggattacttaaggtcaggagtttaagaccagcctgaccgacatggtaaaaccctgcctctactaaaaataaaaaattagccgggcatggtggcaggtgcctataatcccagctacttgggaggctgaggcaggagaatcgcttgaacccagggggcggaggttgcagggagccaagatcatgccactgcacatcagcctggactatacagtgagagtctgtctcaaaaaaaaaaaaaaaaacaaacaaaaacaaaagaaaggaaggaggaaaatgatggaggatgagacgaaaggaagagttctgaactttggaagcgggagtggggttcaggggcccccattcctatggctgagctcttgctcagtgcttcaattactcagcagggagagagattgtcaggacaactcaaaaactccaaggtgcagtgaaaaccccacccagcccaccactggcctctcacccacagcttcaaagagggaaggccagggaaaaaccccacggtcattaaatagattgtgttgggggaaagttatcatttcggtaacatcgacggaaacatcaggaaatttccgcttctgagacacatgatctccatccttccttccctctggcaacttcaggagccgcctcgcctgttcctgactcaacaccaaagctcccggcagatccctcaccttcttgaaagcagctagcccgaggtctgacccggtattgatcctgaagtgcagacaggaggcagccggagaaaccgaacgagactcccataattacatggagataagactatcaggtgtaattaaacagtatccacaggcagaccacttggctacatcctccgtctctcccctccctcctcctccttttccccaggactgcaaaataaattatcctgtgaagtcagcagaggctgagctatggaaacaatta

SEQ ID NO: 1244602 - DNA, 4001 bp, Homo sapiens
ggaaccatatggaagcctgtgcgcctcacagggaaactgtcaggagccggggagccacgccgcgcgtgggaagcgggggctcatgcgtggtgccatgatccgccccgcgctggggagaacatgaggactagaactcagagttcatgcccccaactttgacctctttctactttatattagaagcatattgtgtgtttagaatgaacagtgattcaacttgaatgtgtactgctgaaaatttcaaaggacattttaataaaggaaggaagaaacaaaggatggagagaaagaaaaaatgtaaatatagtcacgtgtcgctcagagacaggaatacattccgagaaacacatcttaaggcaacttctatgtgggaacatcatagagcatccttgcacgaacacagatggtagagccgactacatccctgagctccatggtccagccttttgctcctaggctacaaacctgtgcagcacgtgactgtcctgaatgttgcaggcagttgtcacacgatggtaagtatttgtgcatctaaacatagctaaacatagaaatcatgcagtaaaaatacagtataaagataaaaaatgggccgggcacagtggctcatgcctgtaaatcccagcactttgggaggctgaggctggcggatcgctggaggtcgggagtttgagaccagcctgaccaacatggtgaaaccccgtctctactaaaaatacaaaaattagctaggcatagtggtgcacacctgtaatcccagctactcgggaggctgagacaggagaattgcttgaactcgggaggcagaggttgcagtgagccaagatcgcactattgcactccagctctgggctacagagtgagactccatctcaaaaaaataaaaaataaaaaaccaagatacaaaatggtagacctgtctagggcactcaccatgagtggagcttgcaggactgggagttgctctgggtgagtcagtgagtgagtagtgagtgaatgtgaagaactaggacattaccgtacacaactacagactttacggatacacttaggctacactaaatgcatttgaaaaataaagtaactgtgctatgacgtcactaggcagtaggaatttttcagctccattacaatcttatgggaccacagtggtctatatcgtccgttgttgacccaaacatcgtgaagccaagcataacatggctgtattaggaaacactcagattctgctccgggaagacaacgaagctgtgggcaagtgcccacccctctatcaatatcagcatctcggagcaccacgctctcagagccagtggcccgcatcccccgctccacccacagatccactccctctgcagcagctgcagcaggggacccccagcccggagcgaccccggcaccgcccagccagaaggggagaggggagactgaccatgacgatctccagcacttcattcttgctgatggtcccgttaccgtccacgtcgtagagggagaaggcccactccagcttctggttggtcttgcccgcggtggtcatgtgcagggcgatgacgtactccttgaagtccagggtgccgtcgaggttggaatcgaagctgcggaacacatgctgggcgtaggccttggggtcggtgtcggggaagaacttggcgtagatgctctggaactgctgctgggtgatgcggccggtgggacagtccttcaggaaggactggtaccaggagcacagctcctcctccgagaacttggtgttcagctgcagctcctccaggatctccttggacagggccccacttttgctgttccccatgagtgaggaagagtgggcagcggctggggagtcgctgggtgggtgggacgtgcgtggtcccctggccgcaggctgggctcaaggctggtgtgagctgaagaccgagatgctggtggcttaggaggatttgcgaccagttcttcgcaatccttgaagggaggaggggcccaggagctttgtggagggcgggagcggtgggggggggtgctcccagaaccctagtgagattaaaataaagagcccagggcaggcaggcaattcatctcggcctcccgggacgatactagaacaggacaggaggttggaaccctcagagctggggcctccggcacccccagccccagccctctaacagcagccatgttccctgtttctcttcctcactaactctgagcatctcggggcggggctggcatctcatatcaagccctagaatgcaatggttaggagcacagactctggggccagcatgggttcaagtcccagcttggctacttaactagctgtgtggccccaggcttgtttcttcacctctttccacctgggacactcttctaaaccttcactgcagtcatgtctctgcttaaatgtcacctgctcagccaggcctatactgaccctctatctataatagcacaacccccaccatcatcggcacgctgcatgtcccctcaccggaatgaaagctccgtgaaggatgggattttgtctgtgttgttcccggatgcatttccattgccagaacctgataggcttgggcccccagcaagtctttcttgaataaatgggcatcatagcatctaccacactgtcattgtgaggctgatgtgagtcaatatgtctgacacacttagaaactggcacatggctaatgctaaacactcgttttgttattgtccatcagtcacagggagtgaaggtgaactgcctgaagggaccagcagggggcagccaggcctgtgtcacctcgggaaggggctgccagagaacgtggtcacatgggatggtgagatttttgggtttttttaaattattcaagagaaatccaaaaatcagaatttttcttgcaatttccacacttttcaactttggcaattaattcaaaattttaatggtggctcacgtctgtaatcccagcactttgggagactgagtggggagattacaaggttaggagttcgagaccagcctggccaacatggtgaaaccctgtctctactaaaaatacaaaaaattagccgggcatggtggcaggtgactgtaatcccagctacttgggaggctgaggctggagaatcgcttgaacccgggaggcagaggttgcagtgagccgagattgcaccattgcactccagcctgggtgacaagtgtgagactccatctcaaaaaaacaaaacaaaaacaaaaacaaaaacaaaacaaaacatggtgtgggccaaacacaatctatctgtgggtccatggcaggctgcagggtgtccgtctgcagtggacttggagtgagcaggcaagaaaacgtgtttgctgagtgaatggataaataactgagtggtcagagacggagctgtgcaaaggcaggcttcgcgtctgtgcagctcagcggggagtatcaagcacgaggaagcaacctagtgaggacgctgcacacctggattcttgtcacccagaaggaagggagggtgggcgtgcactttccttagcggagcgcagtgctcgaggggacacactcagaaccccagccttgccaccgtggatggagagttgtctctttttgccctggggtgagaatgatgaagaataaaccccacggtctccaggcaggtaaactggtttttttttagacggagtctccctctgtcacttaggctgggcacgatcttggctcactgcaacctccgcctcctggtttcaagcaattctcctgtctcagtcccctgagaagctgggactacaggtgtctgccaccacgcccagctaatttttttttggtatttttagtagagtcgaggtttcaccatattggtcaggctggtctcgtaaactcctgacctcaggtgatccgcccgccttgcatctcaaagtgtaaagtggggattttagcctacttactaacaggctagtggcagcagaaggtaggtccctgctgctgggagaaagccacctgccaggcccacctcatgtcactctg

SEQ ID NO: 1244603 - DNA, 4001 bp, Homo sapiens
gtaaatatataatatatggctgggcacagtggctcacacctgtagtcccagcactttgggaggctgaggtgggtggatcacttgaggtcaggaattcgagaccagactggccaacatggtgaaaccccatctctactaaaatacaaaaattagccaggtgtggtggcaggcgcctgtagtcccagctactcaggaggttgaggcaggagaatcacttgaacccggaaggcagaggttgcagtgagccaagatcatgccactgctctccagcctgggtgacaaaatgagactccatctcaaaaaataaaaataaaaagtaaatatagctgggcatggtggcctgtacctagctacttaagaggctgaggcaggaggactgcttgaggccaggatttagagaccagcctgggcaacacagggatactctgtctctaaaaaaattaaaaagtaaatataagcagaagtcttctggcaaagatttcattcattcagtcattttttagagatagggtttcactctgtggcccaggcaggagtgcagtgatgcaattattgctcactgcatcctcaaactcctgggctcaagcgatcctcccacctcagtctcccaagtagctgggactacaggtgcatgccacatctggctgatatttaattttttatttttctttctttctttttttgagatggagtctcactctgtcacccaggctagagtgcagtggcacaatctcgggtcactgcagcctccacctcctgggttcaagtaattcccatgcttcagcctcccgagtagctgggactacaggcgcatgccaccatgcccggctagtttttgtatttatagtacagatggagttttgctatgttgcccaggctggtctcaaactgctggcctcaagtgatcagcccgcctcgatctcccaaagtgctgggattacaggcatgagccacggtgcccagccttatctttacaattttttttatagagatggggtctcattttgttgcccaagctgagatttcttaaaaagggacagcataaaatgacatgaggtttagcatcagtaggttttagttcaatctcgagtttccataattcttgtcaggaaccttaaacaagtcgctcaaccaccttgagtttgagtttcttcatgtaaaaaacccagagaactggaagattagtgtggcaatgcatctgaaaatattctgtaaaccagcgtgctggacaaatgctaacctattattgaattcagcacttcatttcagcggagctaggaattccatatttggacccaccttgactggagatttctgaaaaagctgcttccggtcgcatgccttttgggctctgtgggcagcccttgcagaataaaacttaatgacggcatagaaaccaggatgggccactgcagcatttgggaagacccggactgaatacagaaggccaaactgagaaaatgctgtgaacagagaatgctgtgggggtgggacaagtaaatgcatgaaatctcacgcccagaaaacaaaaccgcacatgccctcatattccccaaacctctcttcgcgaaggatgcgattcaaaacacttcccacttaatcaacaggttttcctcttaaaatcctaaactttaagaagcactggaaggtaaaacgttctgaaggtggagagatacctctccgggactctaaaaatctgttgggggtcgtcagttgtcagttgggatcccctttataattaagagtccttcagcggaggctcaggcaggtgagggtctgaggcaggactccggaactcccagtcagcgggtgggcagctttctccatccctccctccatcctggccccggctcacatgcaaagcctcggccgtgggtccggagctcagctcccacactagcaaggttttgtcactctcgatgggaaccgcaaaaggtaccaactccgccatcctcccttcaccgcacctgcgcggctaaccctcgccccagcattgcgcctgcgcaaggcacgcccgcgcttttttaaaaagaggcgcatgcgaggggcggggacggggctcggatcgctcccttgcccctcctacctagggccagcctctgagtctgttcccctcctccagtcacagccacaagatccctgagtttagagcttccgttcaatgcatgtttagggtaaagtcccaaaataggctgacaggatggaagggtagggacgtgtttatagaagccagcttcatcttcactcctgaaggagattagggtactaagtattagcacttgtgggaaataaccacgaaagatgcaatcttttgacttaagaggtttttttaagagtttaaaattgcaaataaaagtataactcactaaaccattaacagtctcgcatgaaatccttaaaaagaattccctgattgtcctacgtcattctggtgaatcgtgtatgtgtacttgtgggggtcagatgatgtgagaggttggaggtacgagtgagaaggagagattaattttgaaaaaagaaaaacaaacaaacaaacaaacaaacccacaaagaataagtccaaataaggcaccaacattggagctgatggtgtctgagaagggtaggtgtcataatcagctacgtggtggaggagtgtaatcaactggtgggttcatcatacccactgcccagaaaagctgatttactgagacagtgttattgaaataggcaaagagtttcataagcacagaaccagctaaatagaagactggagttttactattactcaacttagcctccctgaaaatttggaagctggtgttttttaaagggtaatttggcagtcagggggccagggaataggaaatgctgactggttgggtcaaggatgaaatcatagagagtcagagcttgtgttcttgtgctgagtgaattcctggttgggggccgcaagaccagatgagccagtttgcccatgtgagtggtgccagctggtccatcagaatgaagggtctgaaaaatacctagaaccccaatattaggttttacaatagtaatgttgaaagcagttagttagcttggacacaaagcaagggaagggtccccggagagatcccggctcacagggtcagtgccttacccccacataacataaaaagcagcctgggaaaaaattcaagctaccagcacccataagagaactagcatagggtgttgtgcctggagacatgcccacggctgcacagatggaaaaacctctggcccatttggataaaagcttgcacaaaacttcagctcactcagacaaaagaacaaggcctggcatagaaatgcctttgtcctttgtatagtcagtgggctcccaggatgaagttgcttctacttttgtgggcatgggcatagtgggctccggtgagttccagtgggcactctactttcctttttggacctgtaagtccagcctctatgaatcatcacttcagcccctgataggtcttgggccaagctaagcagcatctaagaatcatttcagctcctgattggtcctgggccaaggctccttgccaagctgagttctccaagacagctgtcggactaagcacattgcttccccttcccagtccataaagaccccagcctcacaggggacacccgttctggcccccacgctctgctggcagagagctttcttctttcgcttattaaacttttgctgtaaccccacctttgtgtccacgctccttaatcatcttggaggtaggacaaagaactccgggggttatatcagacaactacagagtgttatatcttggtgcattgctgagactacaacagtgttttgtataggagcaactggagaggttaggaatcttgtggcctctgtctacataatttctgagccataatttctaatcttgtggctaatttgttagttttacagaggagatctgattcccaagcagggaggtggtttgtttcaggaagggactattatctttgtttcaaagttaagcagcaaa

SEQ ID NO: 1244604 - DNA, 4001 bp, Homo sapiens
ccgcttaaagaatgttcccatcctctcagaactgaagggagtttcaaacaggcagtttgtgagccatggtgagtatgatgatgatgatgtgatgatgatgatacagtctcctttatgtaacagctggcagaagacctggtcacacccacacattttaaattcacataaaactaaatatataggctgggcgcggtggctcacgcttgtaatcccagcactttgggaggctgaggcgggtagatcacctgagttcaggagttcgagaccagcctgaccaacatggagaaacaccatctctaccaaaaatacaaaatcagccaggcgtggtggtgcatgcctgtaatccctgctacttgggaggctgaggcaggggaatcgcttgaacccgggaggcggaggttgtggtgagctgagatcacaccattgcactccagcctgggcaacaagagcgaaactctgtctttaaaaaaaaaaaaagtaaatatataatatatggctgggcacagtggctcacacctgtagtcccagcactttgggaggctgaggtgggtggatcacttgaggtcaggaattcgagaccagactggccaacatggtgaaaccccatctctactaaaatacaaaaattagccaggtgtggtggcaggcgcctgtagtcccagctactcaggaggttgaggcaggagaatcacttgaacccggaaggcagaggttgcagtgagccaagatcatgccactgctctccagcctgggtgacaaaatgagactccatctcaaaaaataaaaataaaaagtaaatatagctgggcatggtggcctgtacctagctacttaagaggctgaggcaggaggactgcttgaggccaggatttagagaccagcctgggcaacacagggatactctgtctctaaaaaaattaaaaagtaaatataagcagaagtcttctggcaaagatttcattcattcagtcattttttagagatagggtttcactctgtggcccaggcaggagtgcagtgatgcaattattgctcactgcatcctcaaactcctgggctcaagcgatcctcccacctcagtctcccaagtagctgggactacaggtgcatgccacatctggctgatatttaattttttatttttctttctttctttttttgagatggagtctcactctgtcacccaggctagagtgcagtggcacaatctcgggtcactgcagcctccacctcctgggttcaagtaattcccatgcttcagcctcccgagtagctgggactacaggcgcatgccaccatgcccggctagtttttgtatttatagtacagatggagttttgctatgttgcccaggctggtctcaaactgctggcctcaagtgatcagcccgcctcgatctcccaaagtgctgggattacaggcatgagccacggtgcccagccttatctttacaattttttttatagagatggggtctcattttgttgcccaagctgagatttcttaaaaagggacagcataaaatgacatgaggtttagcatcagtaggttttagttcaatctcgagtttccataattcttgtcaggaaccttaaacaagtcgctcaaccaccttgagtttgagtttcttcatgtaaaaaacccagagaactggaagattagtgtggcaatgcatctgaaaatattctgtaaaccagcgtgctggacaaatgctaacctattattgaattcagcacttcatttcagcggagctaggaattccatatttggacccaccttgactggagatttctgaaaaagctgcttccggtcgcatgccttttgggctctgtgggcagcccttgcagaataaaacttaatgacggcatagaaaccaggatgggccactgcagcatttgggaagacccggactgaatacagaaggccaaactgagaaaatgctgtgaacagagaatgctgtgggggtgggacaagtaaatgcatgaaatctcacgcccagaaaacaaaaccgcacatgccctcatattccccaaacctctcttcgcgaaggatgcgattcaaaacacttcccacttaatcaacaggttttcctcttaaaatcctaaactttaagaagcactggaaggtaaaacgttctgaaggtggagagatacctctccgggactctaaaaatctgttgggggtcgtcagttgtcagttgggatcccctttataattaagagtccttcagcggaggctcaggcaggtgagggtctgaggcaggactccggaactcccagtcagcgggtgggcagctttctccatccctccctccatcctggccccggctcacatgcaaagcctcggccgtgggtccggagctcagctcccacactagcaaggttttgtcactctcgatgggaaccgcaaaaggtaccaactccgccatcctcccttcaccgcacctgcgcggctaaccctcgccccagcattgcgcctgcgcaaggcacgcccgcgcttttttaaaaagaggcgcatgcgaggggcggggacggggctcggatcgctcccttgcccctcctacctagggccagcctctgagtctgttcccctcctccagtcacagccacaagatccctgagtttagagcttccgttcaatgcatgtttagggtaaagtcccaaaataggctgacaggatggaagggtagggacgtgtttatagaagccagcttcatcttcactcctgaaggagattagggtactaagtattagcacttgtgggaaataaccacgaaagatgcaatcttttgacttaagaggtttttttaagagtttaaaattgcaaataaaagtataactcactaaaccattaacagtctcgcatgaaatccttaaaaagaattccctgattgtcctacgtcattctggtgaatcgtgtatgtgtacttgtgggggtcagatgatgtgagaggttggaggtacgagtgagaaggagagattaattttgaaaaaagaaaaacaaacaaacaaacaaacaaacccacaaagaataagtccaaataaggcaccaacattggagctgatggtgtctgagaagggtaggtgtcataatcagctacgtggtggaggagtgtaatcaactggtgggttcatcatacccactgcccagaaaagctgatttactgagacagtgttattgaaataggcaaagagtttcataagcacagaaccagctaaatagaagactggagttttactattactcaacttagcctccctgaaaatttggaagctggtgttttttaaagggtaatttggcagtcagggggccagggaataggaaatgctgactggttgggtcaaggatgaaatcatagagagtcagagcttgtgttcttgtgctgagtgaattcctggttgggggccgcaagaccagatgagccagtttgcccatgtgagtggtgccagctggtccatcagaatgaagggtctgaaaaatacctagaaccccaatattaggttttacaatagtaatgttgaaagcagttagttagcttggacacaaagcaagggaagggtccccggagagatcccggctcacagggtcagtgccttacccccacataacataaaaagcagcctgggaaaaaattcaagctaccagcacccataagagaactagcatagggtgttgtgcctggagacatgcccacggctgcacagatggaaaaacctctggcccatttggataaaagcttgcacaaaacttcagctcactcagacaaaagaacaaggcctggcatagaaatgcctttgtcctttgtatagtcagtgggctcccaggatgaagttgcttctacttttgtgggcatgggcatagtgggctccggtgagttccagtgggcactctactttcctttttggacctgtaagtccagcctctatgaatcatcacttcagcccctgataggtcttgggccaagctaagcagcatctaagaatcatttcagctcctgattg

SEQ ID NO: 1244605 - DNA, 4001 bp, Homo sapiens
aacaatatctcagtgcttcctgccttttcattgaagttgttgaaaattaaatgagaatgtaggaaaagcacctagcagagtgtctggcacatgggagggtctcgatgtaatcctaattcccctcctgtcctttctatgaaaaaggcaaggatcctgggaaacttggatacatgcccaaaccatttctagtaatggttaaaaacaagatttaaaaagtctgggtcaagcgcagtggctcacgcctgtaatcccagcactttgggaggctaaggcaggcagatcacgagggcaagagtttgagaccagcctggccaacatggtgaaactctgtctctactaagaatacaaaaattacccaggcatggtggcacgtgcctgtaatcccagctactcaggaggctgaagcaggagaattgcttgaacccaggaggcggaggttgcagtgagccgagatcgcgccactgcactccagtgtgggcgacagagcaagactctgtttcaaaaaaaaaaaaaaaaaaaaagaagtctgagtctgctgtgatatggatgattgaactaaacagccatgaaagcagagtactgctagatgagtgggtacatctgtgtagacatgagaggacattacttagagggcttttgtttagacatgtatcattaatattacattgctgctcgcctcttggcaacttccatttgtcaccgtatctcaggtttataacattattactctttccttctctatctgggaccaaggccactcaacctgcaacaagggaattacctaggaggccagtgaccgagttaagttattcctaccaccctcactgttgctgttcgtttgtgtgtacaaacgaacaataatgagaatctgaagtgttttcaaagaccatgtgtaaatctagctatgaaatatagaccagctgggtggttctgccactaaaactacaagctttgggccgggcgtggtggctcatgcttgtaatcccagcaccttgggaggccgaggtgggaggattgcctgagcccaggatttggagaccagcctgagcaacatgccaagaccccatctctaattaaaacaaataaacgaaactacaagctttgacaactctaaagatttccaaatccagttatggaccaaaggtgaggcagtacgaagggtgaggaggagggtgttctgccgcagcgttatggtatagccagcataaatttaaaggaaggtagcttggtaatgttaccttttactacagccatggtcgcactctcctgtaaaggcgtcttaaaagagtcaaacccaaagaccttcttcagcgtactccggactcgccgctcagggtcaaaaggaaaggtggtatggtggctgctcatcttagccaagaacagtggccaaaggttaaggcaaaggtagtaaaaggttgccacgagaaccctctgttttgcattaaaaatacagattatttttctgtaacaatttgctatattacacttaaataatgtattatttttaagtaataaagctgaaggtgaactgcctcaagcaatacattcctcagtaattaacatctccacttttacgctcaatgaaaatgaaaacattgaactattccaggccacggtatagcacagagctagaaatcagatcaagagaagaaacataaatgtcttcagaacagcttggagaacggggaaccgttttcctaagatccaccacctgctcctacttctataagcgcaaccacgacgaccgttcttccaccccgggaccccgaaccccttctcccgtcttcctgagcccaagatccgcaattttctctcttggctggccgacacctccctctcttcaccctaagatatcagaaccggccgtggtccgcccaagaattaaaggctgctggctggttccggaactgttcgaagacccctatacacaaccccaactcagagaagccaaagcgctgggaattcagctttaggcagaacccacgcaatcttatatccgtcgcgcagtgatgacgtagcgcgagcgctggcatgagggcggagccaggcgcaggaaactgccgttttgattggtttccagtgtggcgcgggggtctcctgggatccgaaagaacctgcctttccgcccggaagtcggcgtcttgagtcataggagtgagccacgcccgggctgtgggaataagatggcggggaagaagaatgttctgtcgtctctcgcagtttacgcggaagattcagagcccgagtctgatggcgaggctggaatcgaggcggtgggcagcgcggctggtaaggcccaagtgcgaagctggaagggggaatcgggtgtctgcccggaatgctgtaccctcgctgggcgggagggaacaagatggtcattgtgctccaagcaccggaccccgaagaatggtccagggtccggggtgagatagagcattagagactgtggactaagaatgaagaatctccttcccgttatttcgattaatttgcctaaacttactgaaagactccgtgccggctatagtgatagacagagggatggacgaagagggagcggctgctcagccactgcctgtttcccctgggctcgttgtttgatgagggagagcgataagtaaaacatacgtggaagatggtaaagattgtgttcgttaactttataacttttagttaggaatgtgccctaaacacatcttggagcttttaaaaacaaacgtatctgatgcccaaagtgagagaacctaattcggtagaactggggtaggatgtgggcatttgtgaactttttaaggatcccaggtgatttttcttattttgtgagtttttaaagcctaacggtgatgttctcctcctcaggttgagaagcacaatgttagataatggaaacagattcctttgggagaataaagaacaagttacctaacaacatatcaggaccttagcttcctcatctggaaagtgaaggggattggattaggttaggtacttccatgttttgtgattttgtgtggtctcttccagtcagaaagttctctgatggtttcctataaacactttagtgtttatctagtgtttatagcattagaaacagaatttagtactcggttttgttccctgaccttttaatgattttattcagtaaatgctggccttctcagagagccgaatctgggcctattgtaacttaacatgagatttaggttccctttgtatcttcagagatagtcttggccactcaaatctctggacattttttcttacattgtaactcttgttttttttttcttgctttttgtttgtttgtttgttttttaacctttcagaggagaaaggcggattggtatctgatgcctatggggaggatgacttttctcgtctagggggtgatgaagatggttatgaagaagaagaagatgagaacagtagacagtcggtaggtaaatctcccagatccagagctactgaaagcacaatttcatttgtcagattttggaactgtgccaacagtgttccatttcatggttagctccatcccttgctctcccgttttgttttagtattagtggaagaaactggattggatatcagatctgtttgaaaatgtattttcacatggatcattttttattaatctttgaattgaaatttgggggaaaagatagtggattattttatttaacccagatatcaatgggtgttttatgttgatttttccctgtttaaatgatttactccatttatagcaggcattcatcctaactggtgtatcatttatatctacagtcaactctgcattatttttaatcttggttggggctcatttaagtcttctcagtttattaacaagataagaaaggaaaattcgttttcacctgctttttcttttcttttttttttttgagatagggtctcactctgctgtccagattggagtgcagtggtgtgatcatagatagttcactacagtcttgaactcctgggcgcaagtgatcctccca

SEQ ID NO: 1244606 - DNA, 4001 bp, Homo sapiens
tgtgatcctcgctcactgcaacctccacctcctgggttcaagtgattctcctgcttcagcatcctgagtaactgggattataggcacgtgccaccacgcccagctaattttttgtttttagtagagatggggtttcaccatgttagccaggctggtctcaaactcctgacctcaggtgatctgcccacctcggcctcccaaagtgctgggattacaggcgtgagccaccgtgcccagcctgactttaaacgtccagttttgacctctggtaaattaaggcaatgacagtgggaatgaagaaaagccacacatcaaacagtactccaacaaaatcaacagggtttagcacatttaaagatgtgagcataaaaagaatgaacaaggccgggcgcggtggctcacacctgtaaacccagcactttgggaggccaaggcaggtggaccatgaggtcaagagatcgagaccatcctcgccaacatggtgaaacactgtctctactaaaaatacaaaaattagctgggcgtggtggcacgtacctgtagtcccagcaactcaggaggctaaggcaggagaatcgcttgaaccaggaaggcagaggttgcagtgagctaagatcacaccactgcactgcagcctgggtgacagagcaagattcctctcagaagaaaaaaaaaagagttgatgagaggatcagagttgagaaagtacagtacaggctcttgctcattctacccttactgagaacctactatgtgcaacgtaccatggatacaattctagcaaagcagaccctgattctcaatacatactatgattggagtaaataccaggttctcctgagtactcaaccctggtaagtaagaagaggcttcatggaagaggtgacttctaggctgaaaccagttggccagattaagcttggggaaggtgtgtaaaagaacgcttacatatgctaaggtctgaggtgaaagagaacgtgggcaatttgttggaattataaggagcagaaacgtaatttggagggtgacgactacctagagatatcatagtctgattaggtgaaggactcaaaagtttggcgatgaaaagcaggagggagatagagtagtagcctagtagaattagagatgagggaggttcttcctattaattcagaaaggaatatgggaacaaactcactgataagacagtgttctccacaactcaatatttagttattaggaaggcaaccaaatgccttcacttcttttcctttaacaatggcttagtttgactaaagtgtttctcacaagatacacacaaaaaaacaaaatacaagagcaaatgacggataaagctgtaaacctaacgttttacttttctaagatttatataatcagtgatttaattggacctaactccacatccagaactcaaatgaaagaaaacttctggccgggggccgtggctcatgcctataattccagcactttgggaggctgaggagggtggatcacctgagcttgggagttcgaaaccagactgaccaacacagcaaaaccctgtctctactaaaaatacaaaattagccgggcatggtggcgcacatctataatcccagctacttgggaggctgaggcaggagaatcacttgaacccgggaggtgaaggttgcagtgagccgagatcacaccattgcactccagcttgggcaacaagagtgaaactccgtctcaaaaaaaaaaaaaaaaaaaaaaaaaaaaaaaacctgactcacttctgaagacaggattttcccagtttctaatgcagcttcatctagctaatgaaacttaagaaaacagtttgaggttacctgattttgccagtttcaaaacattgccacgacagaaagcaagctgtctctagttcctgtggctgaggtcgctggagccatgttcagatgagatcatctcaggaaccaagagcagcggctttcatgtgaagtgaatggtgccgcctggggatgtatctttggtaagcaagattgcaacacagcagggagtttacccagggcagtgctgactcacgctgggcaaaatttgtacttcccaaacaactcagcctgaaccaaccgcagtcaactgcaacctaggaaagaagaggcagctcactgattgttttaaatcaagtgctgattactgggggcaggtaaacctcattcccccactactggtaacttggccacctccagagcccttacccaaaaagttccagtggccagtttctaaaatttcatctgagaacaggctggggctggggccagcaagattactgaacatagcaggttcacagctctgaagatttccccaggaggctgataaataagtcactttgcatttacaaattagaacatctgggtcagtggactcagggaacttgcccagtcatcattagccagtcaaatcattagggtgaatttttgtcagttctaaccaggctcattgttcttttttcccactaggcctcctctgacctctctatttcttcagacaactcaagttctctcattaagatagatgcactggaattttttttttttaatcagctgccacattctctatgctaaagccaaatcatttaccatcacacctactggatgcatagggaatacagaagactatgaaaatcaccttaacacttgctctgaaaagagacatccctaaatttatgtcaattctcatttattagcctgcttatttaaaaaatcaatctagaatgactggctcatcaacagctattaattactgaatttgccctgacaggctagaattgacattggtgttatacaaaaaaaaaaaaaaaagatcaagtccttgctttttgtgtgctttaatttgacaagagagaaactaaagttcctattagatccttctgtttcctgcttaaaatgtatgacagttccccaaggccatcagctatttcttagcagggcatttgaggcctctgcacccagcttcgttcatcctttaaggtaggtctcacatggcatgaactctggatgtagctgccaactcagcttgtcattcaataatgttaggttaattaaaatgtacgtgcagacagaatttgagtttaaaaactatactacttaattttctattcaaggggctagttttaaaaagttatttatccaactcacttaattctccttaattacattattccagtaggatagccacgctgagctttgataaggtattataaaatgttccctgttttatttcctccccttcagtgttttcctttcagaaaatggctttgtttaaagaagtttccctatagtacatgttaattagtcctttctgaatgataaacacatctttatagcagctgacaaccattatctcttcaaccacactttaaaaaaaatttctgtagttgatgataagttacaaattctagtatgaaacaactctcaaggtacagacaaatatggaacctccttcagaaaaaaaaaaaatgattagaaaagctcctgacctgttctgtatttgcgaactttaaataagagggccgggcacagcggttcacgcctataattgcagcactttggaaggccgaggtgggcggatcacctgaggtcgggagttcaagactagcctaaccaacatggagaaacccccatctctactaaaaatacaaaattagccaggtgtggtggcacatgcctgtaatcccagctactcgggaggctgaggcaggagaatcgcttgaacccgggaggcagaggttgcagtcagccaagattgtgccattgcactccagcctgggcaacaacagagcaaaacttcgtctcaaaaaaaaaaaaaaaaaaagaaagagaaaatccagacagtactatgcccaggagacagatacgaactatataaagagcagcctgaaggccaaaggcatggaactcctaagttgactaagagaaacaccattgagcaagtgaacagagctgctgcagcttatcattcccctctttgggactctg

SEQ ID NO: 1244607 - DNA, 4001 bp, Homo sapiens
cgatgtagccaactgtgcagtcatccggcagccgcacctgctcagctgtgctcatgaagctgcccaggctggggggaggccggtcagcacctttcaggtctcagcctccgcctcccagcccgggcagctggacccccactcacctggcccatgggctcatcttgagggcaaggcctctgctgaggcagaacccggccccaccagtagcaaaccagaacttgaccgtggtcacctgaagatggggtggtggtcagagctgcccaggacagggcttctcacccctgactcttcatgggactccccaggcatctttcttaagctgccccttaggagatcccacccaggtaacagaagcttcttggagcaaaaagagccgggggcttctgcaggccattgacccgtagcctccagaccctccccacctggcccagacaccccctctctgcccagtacggtgagggcctcctggcctgctcctgaaacaccacatgcaaaccacctgggtggatcagcttgggcccccaaccctatgcccttctcaagccagctttccacgccctctgctgtgcctcccgggctggtgtcaaggaaggcgtctgctccgatggcgtctgctccgacactcacagttctgccaccctggaccctctcggtggcctcaatggggtggtccaggctgggccgccccaggtagacgtcctggctgggtgagaagctggagagcaggtgcaggaggctcctggcgttcacataattgtcatcatccacgtggcaaaaccacctgtgggcgaggggagtcctgggcacgagggcctggcatggctggacaggaggcccccacccagcttggctctgagctctctgcgggtcgggtcagcgccgcgtacttgcgcccggactcaatgaacttgtcatactccacggacatcttgcagcagagggcctgacgagtgcgcaccgccgagcagttggtgttgatgacacggtcgcctgcgaatcagagacgggaagcacgcacgtagaggatggcactggggttggggtaaggcctgtgccccacctgcccccaagggccagggcacaacgtggctgtctgacatgcctggacaccttgcctgggtccaaccacagccctagccctcacgcgctgaccctgctggtgccaccgaggctgaagcaggcggccatcggttgggatctcttgagtggaaacaggacggaggcagctcgccctgacctggcctggaagggcggattccctgctggcgcttcttcaggggacgtggcactagccccacgccccgggaagcggctagtgtgagaggctggtggggagcagagcttggctggcagggtgggccctccgcaggccgcgtgacctgggcagcgtcggggcctccccgggcctcgggagcctgggcagagaaaggcacccacagcagcgaaggggccgtggcttcggagcgagaaaggctcggggggcagatcccgcgggcgccggggagtgggggacactcaccgccctggagctcgagctcagggtcgtccccgtcggtgaagataaacgtctgggggagaaacaatctatgaggcttctggggcgctgcccaggccggagaccgacccgccccgcgcggagcctccgggggcctgggccgggcctagaccctgggaggcggggcgggtgggcgtggggctcgccgtcggggtcggggtccggcgcacctgctggcgggcccgggagatccaggtgcgcagcagcagccgcaggcgcggcccgtggttcttccgggtggtcttgacggcgatgaagacgtcgtcaggccgcaggctgggggcagcgggccgggacgggggcgcgcgcggggccggggcgggggtccgggccggggcgggcgcgcggggcagcggcagcggcagtaacagcagcgcggccagggccgcggccagcgcgaggcaggcccggcacagcgccccacgcgcgcggctcatgcggccgccgggacccccggcgctgcgagcggagaacctggccggagccgtgggtgggcggcggcccctttaagaacgcagcggccccgccccgccccgcgccccggaagcgacggcttcgctgccccggaagtggacggcacgccgcggcggggtgggtgcaagatgccgctgccggttcaggtgtttaacttgcaggtaacgagccgaggccgccccgggcctccgcgcccccgcgccccccgccactggggccgggctgaggtcgagcaggggcgcggggcctgcgccaggagtcggtcgggcacgctccgtgccgggcctccgcgggcagcgcgcgtcgggggctgcagggccgagggcgcgtctccgccgtggctgcgcgctgcgatcgggggccgccgggccgcgcccgccccgcctcccctcccagcagctcacgggagaggttcccggccgccccgacgctaacgctctttctcccttcagcagccagccagctctgtgtcagggtcggggggtgcagaaagtcaggacagaatgagggatagctcggcccccagctcggcctcctcgtcagtgacagatctgtactgcacccctcacagcagtaggtcagacctcgtcctgcccggcacggccggggacttcagcctgagcgccagcctgtcggcctgtacgctgctctacgaggtaccttccaggacagggacccccgagcgagggaggggggagcagggccccggccgcccctgctgtggctgggcccctgctgctctgctggccgaggacagggactcagtgccaagcgcaggaggggagggagccccggtgggcccggggcctgcggagggagccgagctcttggtgcttttcccgaaggagcgcgggaggcccacgggtccggcgagtgcccggcatggcggcttttccagcctgctttgtgttaagccgaggtcctggcttctctgtgtctcccagctgggggccatgaggctccctgagatgactcttttccccttctcccaactccgtggcgtgactctcagcccagtattgctgctccgctgctcaggacagattccgggggctggtcctcctgcctcctggggttgaggtggcgtcccgttcttctccgtggcttggaggaaactacatcaggatggtggctgggaacgtgtaggggccctcagaggcccctgtgtagttggttgtcccctgtctgctttctggctttcagagatgagcggctagaatcaggcgaggggtttctgcttctgagccttagagtcttgtgaggagacccctccctgatgtggtggcacaggagcctgggtgggggcgggggtgactgggagggcacacctgggggacagcagcggcgggagtgtggtccgactggcctggaagatcttgggcagagctgacctcagagaacagtgcgggtctctcgccctcctggggcagtccccaggacgaggtgccaggtgcctggcccatgttgcagggggccgtggagcccatgcagatcgacgtggacccccaggaagacccgcagaatgcacctgacgtcaactacgtggtggagaaccccagcctggtacggagcccagtggggggaccttgggtgtctcagtcctgctgaggggtccagggcacactccccgctgcagcctgcacagcaggtagaatgatcctcctcagtgatcgctgtcgtctttttctgaccccgaaaccatcagcgtttctgattgcgcactcacatgaggcttgtagctcagcttcagatgctgctcatggagaagccagggcaggtctcctccccgctcagcctagcgaccagcagtcactagtgggtgtctatccccgaaagcccccgggtgcagggtcccactcctgaggctcctgcgccaggcccaccccagcggtcttcgtagctcctgggacagcagtcagtctcgtacccccatgcccggttctggttatgggcccagggcgacattctggct

SEQ ID NO: 1244608 - DNA, 4001 bp, Homo sapiens
cattgatttgggggaaaaaaacagtgtgtgtaggaaagctgtcatggaggaggggagaccggggtggaagatggggagctgggatgcaggagggggaggttagggtagaggagaggtaagttaggatggaggaggagaaggctggggaggaggaggaggatggggtagaggaaggggaagacagggtggaggaagaggacctggggtggaggagggaaaggtggggtggaggggggagagctggggtggaggaggggagctggaatggaggagggagaggttagggtggaggaagggagactaaggtggaggagggagagtttgggtggaggaggggatgctggggtggaggaggggatgctggggtggaggaggggtggctggggaggaggagggaagcctggggtggaggagagaaactagagaccaagacactagtcagaagaccaaggtaaggagaggagaatctaccagagaagagtcatgatggaaaagaatgccagagattcaataaacaaactgaatttatctcttgacaattaccctctgagcccccaagccagagctgtcctgcctgggaggagacagtcctaggataaatcctggaagatgatgtgtggctttgagatagccgacttaggcagtttcttctgcttttagtaactggtatctgcaatacaggctctcagggttctttctgagtgagacaacattcagcctgtctgctttacagatgatacccacacctctgctacccggaagatgagcacgagcatcttgaaacaggtggaccaaatgcgaccgtctcggggtccccaggactgtccaggttttagcattgaaagtcctgggcaaatcaggacagcggtcactgactatacaaatttgctgagctccaggggctcagggagagctcagcttgtcacaaaacattcaactaattctactcaacaagataagcctaagaagatggacactacgctgtgaaaagtggctacgggtgggaggaaggacaaagatgtgacccgggacctaatcctctgtagatctcatcggacagtgattataccagaagctcagaactaaatgaaccactttgtccccaaacacatcaccccacaggtgcattccacctcccacatgtccatcctgtgtgcacaccctgtgcccggtcactttgtctgggaaagcattcgcaagggaagcgaaaaggttgggacttctgccgccagcgcagacagcaggagatgcacagatagacacactcaaatgagggctctcagggcattgtaaatggggtggccctttatcctacaaatcaccccgttttcatggtctatgtgtacacacacacacactttaaaatagtgcagtttgggatcagaaaaaaaaggcaaaaatggcaatgtcacatctggtcgtcttacaacaatatcagcaggctgtctcaaatctgccacagcctgaactgaacctgcctctcccgagtaacaggttgttttcacctcccgcagaccatcagcgctggcttcagattctccactacaggcagggcacacgaaaacctaattattatagccatcaatatcgacacacacagcaaagaagtcacttaataaaatcgagcagcacaaatcgacccaaaggggtgctctccactcctgcccctcttgtcctcggacgcttcgcagatgcggtcccccgccctcctcccagggtccaggtgaggggccagggttaccttttggagaaatgccatcctcggcctgtactgctggccttggtgtcggattgtcatcctggcccctggatggattcacagccagagcaccagtgggagacaagaggagaagccccccaagttcgaaaggcagcctggctcgccccagccctgggcgtcgacggggaggcggctgggcggggagggcgcgggccgggcccccctgactctcactaggcgccgctgacttggaaagcagctggaatccgcgccagccaatccgcgagcggcgccgcgggctcattagcatgcgctgcgcgggcgcccacctgccgccagggggcgctatccggcccccgccgggaccccgcggagcagcaggtgagacccgcagggcagggccccgggaggagaaggaggaggaggacctggcgggaggaggaggaggacctagcgggaggaggaggaggacctgtcgagagcagcgagccttttaacttggggcggagttatgcacagaagtgacacaaagagccctcactaatacagcgcggtggaaaatacggactttcccatcccagctctgccactaaccagccggcagccttgggcaagttccttacaatctctaagaatcaatgtccttcactcaaaagtaaaaattgaaaaatgggatcataatatcgaccagaaaaggttgctataccattttaatgaggagatgtgtaacacagtgcttggccctcaataaatgcttagaaaaaaaaattagaggtggcgatttaatgacccaatagcagaggaattgctaagatgtgggtttaaaaagagagagcaaagaagtgaagaaggaagagaggaaggttgtagtcctcaccgggctagctgtctggatgaagcgaattatattttacttctctgattcttagtgtttcggttagttggttgttgggtttgttgttgtttaactttttttttgagacagggtcttgctctgtcacccaggctggagtgcagtggcgtaatcatggctcattgcagctacaacctcccaggctcaaacaatcctcccacctcagcctccccagtagctggggctacaggcacgtgccaccacaccccgctaatttttacaaaaattgtttgtggagagggagtttcacaaactcctgggctcaatcgatctacccacctcggcctcccaaagtgctggaattacaggagtgagccactgcagctggctggtttgcttgttttaatagactttatttcttagagcagttttaggttcacagcacaattgagcggaaggtatagggacacgtcatatatcccctctccccacgcacgcacagcgtcccccatgatcaacatcctccactggagtggcccatttgttacaattgatgaacctaccttgacagctcattatgttagcgttttcatcttgagaaaaatgcaaggatgaagcctctaagttattatcaagagcctttctgctttgttatataaagcactttctcttaaacatactcgatggttattgagtgtagcagataaaatgtttaagttggaagaaaacaagaaggcctttaccttaggaaggcacagtcaaccaatgtccctttaaagcagtggttcttggctgggtgtgatggctcacgcctataattccagcactttgggaggcccaagcgggtgaatcacttgaagtcaggagttcaagaccagcctggccaacatggcaaaaccctatctctattaaaaatacagaaatcaatcagcatggtggagcaacctgtaatcccagctactcaggaggctgaggcacaagaatcacttgaacccagaggctgcagtgagccaagactgagccactgcattccagcctgggtgacagagtgagactctgtctcaaaaaaaaaaaaaagcagtggttcttatccattctctcgggtgatatttacctgtaagaatctgatgaaagctatggacactcaggaacacacacacatgcacatgtacacaacactgactgaagtttgcaaacaatttcaagaggttcatgcttgggcctctcttgtgccttttcaggaatccctgattcagagcctccaatttagaggacgctggaccctgcagagatccatccaagcagaagaccagagatcctgccaagcaaattgaaccactgagaagtatgctcctggtgtgagctgagatccaaagaaaatgctggaatatcttgattttttttctcatgaagcatcttttgagcctg

SEQ ID NO: 1244609 - DNA, 4001 bp, Homo sapiens
aagagggaaatctatagacagaagcagggtagtggttcttaggactgggaaggtggggactgggcagggggtgacagctaaagggtgcaggctttctttagggggtgatgaaagcaatctgaaactgtggtgatggtggcacaattctgtgaatatgtatatatatgtacacacacacacacacacacacacacacacacacacacatatagtttttgagacagagtcttgctctgtcacccaggctagagcgcagtggtgcgattttggctcactgccaacctccacttcccaggttcaagcgattctcctgcctcagtctcccgagtagctgggactacaggcgcaagccaccatgcctgggtaatgtttgtatctttagtagagatggggtttcaccatgttggccaggctagtctcgaactccttacctcaagtttgcttcggcctctcagaaagtgctgagattacaggtgtgagccactgtgcccagcctctgtgaatatatcaaaatcactgaaggttgggagcggtggttcatgcctgtaatcccagcaatttgagagactgaggcaggaagatcacttgagcccaggagttcaagaccagcctgagcaacatagtgagatcccatctgtataaaaaaattaaaaaattagccagatatggtggtgcgtgcatatagtcccagctactcaggaggctgaggcagaaggatggcttgagctaggaaggtcgaggctgcagtgaaccgtgatcgcgccactgtactccagcctgggtaacagagtgagaccctgtctcaaaatataaataaataaataaaaacactgatggtacactttaaatgggtgaatcgactggtgtgtgaattctctctcaatgaagcaggtgctccataatgttgggcctctgtccgagccagtcactctgtcccagaccatcacacagaggaggggctggctcttctcagcctcctggttgcagttcaagtgccctcctgccccaccttgagcagtgccggtcccacctcgcttcctgcctttttttttttttttttttttttgagactgagtttcattcttgttgcccaggctggagtgcagtggcacgatctgagctcactgcagcctccgcctcctgggttcaagcaattctcctgcctcagcctcccgagtagttgggattacaggcatgcaccgccatgcccagctaattttgtattttttagtagagactgggtttctccatgttggtcaggctggtctcaaactcctggcctccacccgccttggcctcccaaagtgcttggattacaggcgtgagccagcatgcctggcaaattttttttttttttgagatgtagtctcactctgcagcccaggctggagtgcagtggcatgatcttggctcactgcaacctctgcctcccaggttcgagcgattctcctgcctcagcctcccaagtagctgggactacaggcgcgcaccaccacgcccagctaaattttttgtatttttagtagagatggggttttgccatgttggccaggccagtctcgaactcctgacctcaggtgatccactcacctcggcctcccaaaatgctgggattacaggcgtgagccaccgcgcccgtcccttccctgcccttattcctccctctcgctccctgaattgactttcttcattcactgtccaccgctgttcagacagagagcgtgggccccgcaggaggtatctggacgtgggcacagcagccagcgccctgggtccagccacccggccgcccagcttcctaccttcgagtctgagtttgcccgcggcttcctgggtcttgctgtgaagggctttagagcatgttcttgtcttctccttgctctgtacagatgctccggtgtcaagcctcagtctgtggaagggtggctggacagacaggtggctggaaggacagatagacagctccaggccacacggtgcagcttcctgggtactcacagctggaagaaaggagggccggctccagggggcatgcccaccactgagtgctttaaccttcctcacctcagtctccccatctgtaaaatggggccaattccacctgcctcactggtaagggattaaaggtgctaatcaggcatctccgagtgccaagcagcgaggggcactggcctcagggtgttcacagccaatcacctaacaacagtcctctggtctgggaacctgattggagcagaacattagagtcaagatggcccctgttatttttctcaatattacttgaacagaacagaaacatttaactttcggccaggggcagtagctcacacctgtaatcccagcattttgggaggctgaggcaggtggatcacctgaggtcaggagttcgagatcggcctggccaacatggtaaaaacccatctctactaaaaatacaaaagttagctgggtatggtggtgcacacctttagtcccagctactcgggaggttgaggcaggagaattgcttgaacctgggaggcggaggttgcagtgagccgagattgtgccattacactccagcctgggcgacagagggagactctgcctcaaaaaacaaacaaaaccacatatttttgggcagggtgcaggcgctcacacctgtaatcccagcactttgggaggccaaggtgggggaatcatgaggtcaagagttcgagaccagcctggccaacatggtgaaaccctgtctctactaagaatacaaaaattagccggggctgggtgcagtggctcacgcctgtaatcccagcactttgggaggctgaggagggtggatcacgaggtcaggagttcgagaccagtctggccaacatagtgaaaccccatctctactaaaaatacaaaaaagtagccgggtgtggtggcgggcgcctgtaatcccagctactcaggaggctgaggcaggagaatcacttaaacatgggaggcggaggttgcagtgagccaagatcgcgccattgtactccagcccagatgacagtgtgagactctgtctcacaaccaaaaccaaaaccaaaaacaacaaaataattagctgggtgtggtgggcctgtaatcccagctactcgggaggctgaggcaggagagttacttgaacccgggagatggaggttgcagtgagccgagatcgcgccactgcactccagcctgggtgacagagcaagactccgtctcgaaacaaaacaaaacaaaacaaaagaaccccacatatttaacattcaaagtccaggaattactaactgccttctgatacttaaggcaaagttcaaatgatctggaagtgttttgttgctttgattggtaatttattgaacttaaaagtcacacaacataaaatcaaccattttaaagcacgaaacccaggggcattcctgttttttttttttttttgagatggagtctcgctctgtagcccaggctggagtgcagtggcatgatctcagctcccttcaagcaccgcctcccgggttcacgccattctcctgcctcagcctccggaggagctgggactacagacgcccgccaccacacccggctaattttttatacttttagtagagacggggtttcaccatgttagccaggatggtctcgatcccctgacctcgtgatccgcctgcctcggcctcccaaagtgctgggattacaggcgtgagccaccgcgcccagccgcctgtttgtttttaagaagtcctgcccaggccatcctttgaggggaaccccaagatgccggaagccctcccggggccgggcaggatttaagtccttaactgtgcggggccttgtttggccctttacacacattacccttcaaaacaccttccagggtgacattagcgtctcttccattctgtagatggtgaatggaggctcagaggggtttggtaacttgcccaagctcacatagccaggaaagggtgtagctaggacgcccgatgtctggctccagggcctggagg

SEQ ID NO: 1244610 - DNA, 4001 bp, Homo sapiens
acaactctgagtcatccctactggggggccacctggcctgtgctttgatgtctcccatctctcacctctgctcagctaacaccatgggcaggggtgcctccaccccatcagcagctgggcccactccagggctcgtcagctaacccagggtgccctctttattgcaggacaaaagcagcctggggaccccccaggaattaggagccctgatactccttggatgtcactttcaaaaggtgtacataattggaggagttaggtgtgagttcagaagggaaaattccagcaggtcacatggtatcaggcaaccatgccagcttcagcaatccagctttgggaaaatctatgggaagagagctcgccctctgcccaccctcccagcccagggatatttgagctcaagggctgcctcagcccagccttcctgggagattgccctggggttaagcaccccaggcctgggctgcaagggggtcctctgttcccaacctctcccccacagcacctagaccagcttcctgcagggccagtggagattgggaaaggcggtgtctcatggcaccaaaggaagactcttgtgaggggaataagtgccctcacactgccttacccctcatctcattcaggtttattccaagttcctcccctaaccactctggaaaactgaggtagtttccccagtgagggagcatcattgagaaggaacctgatggaccagctgctgcgcagggtttctcagcctcagcacagcccaacaccttgggctggataattcctcgttatgtgggctgttccgtgccctgaagatgtctggtagcgtccctggcctctacccactacctgccagtaacaacaacactcacttcccctcccaagtgtgtgacacccaaaatgactccaacattgccaaatatcccatggcaggcaaagtcgcccctggttgagaaccacagctctaaaacacgcctccctttccactgcctgccctacggacagtgagggtcgaataaggcagatgctggtctcattatattaccagcaaatggcacacactgggggcctgatgccagccgcccaggcaacagcagcctctccccaagtggggtcagctccccaccgccttctgctcctcagacacacccgctgccaccctctcagtagctccaaccctagagccccctccgttaatctttcatggaatggggcagggccaaaacctaggcttcctttgcgccctggcgtgggagtggggcggggtctgtaccctagggaacttatccgtctctatcccaatgccctgggggaacatccgaggggccaaacaggtaaaaggcaagcccagggccaaccttccccagcccctccatccagaagtcaggactcctgggtccaatttctgagctccggtccagccctgctgtgtgagtccctcatccccacccccgcacctgtttccaccttggctggctcaaccaacaaacttcggccccggtccgcccggtgctcacccgggagaaagtggaggggagagaagggtctgaactgcaggcacttctgggacgcaggcgggactgccctgcgcagtctcctctcttcctccggaggtttaaatctctgcccaatcgtcttgcccctacatctggcgccccgtcgcccagggaccccttaggcgtcctgtccgagccgagccctaggggccagcagaccgggtccagcggccccgccggcgccgtctgagccagcccgggcctccagccgagcccacgtgggacccaggcgctccgcagggcgggcaccgggcactgggcacccttcctggccgcgcaccaccgctccagggcaggctcgggcacaacctcgggacccttccggcgcctgcggctgggcggccgtgagtcctgccccgctcgtcgccccgcgctcacctccctgcggccccaagtccccgggacgcaactccgtgcggcgcctgcgagcggctgggcggtggctcctcgggggcggggcggcggcgctccgcctcttccctacctgcgcgcgggcggccgggaggcggggctgggctccagggggcgtggccgggctcatgggggcggggcctggacgcagtctttgctcagtcggcttcctgggttcctgcctccgccctccacccagctgggtccccgcctgggcagagccctgttttcgcctgagctggtctcttcagggcgccgtcctttccctcttggcgtcctcactccaccccagaccaaacacgtcatctaggtcttgattgccgtcttcaagtcgcccctccccatcaagaaaaagcacccaatctcccatccccttcttccagcgccctcatcctcaggccaagtgggcctgttcccttgacccttttagtctgtagtcacactctctccgggaagctgggcctgaacacctcctctccctcctggaccctgaggcctctctcctagctctgctgtgcccttgggttgggaacaggcactccgtggaggtcctatctgcatttgccctgcagctaaggccaacatttgtgactcctgccaaccccctacacaccccgtagaagcattgacagaacccacccagctctggcccttccagctgccatgcgggccagagccagactggagattggggacgctggcgacacctggccccttggcttgggtctgtctgcccaggtggttccttctctcttccctggactccaagggcctgcctcttgggactagacaaacaaaaccttggccagggcagctaggaccgaactccaaggtctggatgccccgttctcagccccagcgcttatcatctcgccgtccctctccaggaggcctggctaggccaggaggagcagagtttgaagagactcaggcttggaggggtgggggtggggttgtcagggccaaggcaaaacctctggcccttagagagctcctgagccaccctgccccccaacccaaggactctggtgtttattgctgacctgggtggaggtggggagcacctggctgctggagattatcctgagagatgcatctctcctccccagctctggggccatgaggagggcacaggctggaaggagggggagtgggccaaagctggggtgggggttgctcctagtaacaaatgtaagggaccatttattgtgcaaccagcacatcctggggttatgtgcagagaggaacaaaaccagggcctgcccacgaagtgccagcattctacagggagacgttggaactcaatactgtaacaggaagggtgagagcagctagccattccaaagtgctttagtctgtataatccgcagtacaggtctatgaagtgggtaccattatgatcatccccattttagggatgagaaaactgaggcagagggagatgtgaggggagcagctggggtttaaactcggtcatgatctgactttagactctaacaaacactgctgcaaatgcctgagctgggttctctctcctggagctctactggaagctctgcaggagtccccaggaggggagggattcatggtggtgcttaagctggtgtcagggatttgtcccatgcaaacatggcgtgctgcccggccacataggtgcagggaggctgattacagccttggctgcagcaacacgcacctgtgaggccagagagggaagaatgttaaataggccaggggtataacttgtgataatgtcacacagctgttaaaagcaacgaggcagctatccatgtactgagaaaggaattatctccaacttatagtaagttaaaaaaaaaaaagcaagctgcatgtttagtataatcctatttacctaaatttaaatagaacagacatatatatgttggtagatccatacaaactttctggaaggatatctgtggagtaaccctgcaggggtttagggggagagagtcacttgcttttcattttgtatcatgtgcatatattacttacataacttaaagagaaacactgtctaaa

SEQ ID NO: 1244611 - DNA, 4001 bp, Homo sapiens
catggtgtaaacccggctctggtgcagcagagtagggaggaggcaggagggagatcctctcaggggagcccatctcttcctcctgatacctggagagcagtgtcgttcagccctagagatgcacaaagccacacccccaccccacgtcaccatctcaggagcgcggagctagggaagcccacgcaagcagggagactgagaccgatttcagggagggctggaaggaaatggggggttaactgctcacatacctgatcaaacaggactttccagtgctggcagagagggaggccatgcaggagaggaagaagaggagagaaagaaagacacacttatcaccaaggtctctgtagtcctcggatgtttctgacatagcctcccagcggctgcccaggagtcatgaccaggctcagggactggccacaggagagcaggggaagtctgggaggagctccccaatgagtccacactgagcagagggaggaaactcacagtaagggatggggtgggggcgggggcggcaaggtgggtgttgctggttctggaactggcagaacaagtgattctcaacaattactaaataaaggcgtccaaatatgtccaagcgcctctaataatttctgctgcctaaagcttatgtccacagctactcccaggcctgggagagcatggccaggtgcaattccatcagaccccggcgcaatgagtctcacctgctgggagctagagcccccccctccccccccaggagaactcacctctgcataaacactaacattttgcctgcagttttttgtttgtttgttcgttttttgtttttttgcggggaagggggggtggtgaatgccgaatgcggtgaagcccacccattctcttccaaggctgagtctaagtggtgactacatcagattctgccaggggtttagggccagaaggaagtgatagatttaaccgcagacgccaaagagagaagatcgtaaactaccccccaaccccattcagactttcccgctttcgttgtgtgggttgggggcctggtttcacttccatctccccaccctgagggaggagtgggcagggcagggtgtctgcccggtttttcacccctatgtgtaggttagccccgggaggttaacccaagaaactccagttcccagggcttcgcagggccggcccgcaggaccggagggatggagacccgagcagcagacggcggggaagccctcggggcagcccctccctctcctcgcccaggggaccgtcccctggcaccgccacggtcttggactcccgggcctccttctaggagcaaagccgctcccagcactctttgcctccctgctccggccggggtcagaggcgggggccggcttgaatttcaatcagtgtcgcggcaaggcaggtgccgggcgggagctaatccgggagcggaggaaggggtcgccaggccggcttgcatggccagggacggggactctgcggcgtccgctccttccccagctccgggagctcgcaggtcgcgggcgtgaggggagggggagtcaccgccgtgacgcggccgcctctgcgggaaaacgccgtgtcccgggcactgcaccagcggcggggagggggctccggcggtgacaggtccgcggcgcagtggcggtgctgtgtcccgcagggaagccgcgggaaccagagcgggggaagcggtgcgcgcgcgtttcggggagaccggtccctccgccccctcctgcccgcggggacccggccaatccggggcgctcccgcgtcaccctgaaacctccaagttgcccggcgtggggcgagacaggggcggcttttccccccggcgccccctagaaagtttgccgggcggggagggggcactcacgtcctccggcgccgcgggcagccgctcctcggcctcgggttccagctcctcgatgcgctccgcctcggcgcaggcggccaccgcggggcccgggctggggtgctcgcccatggccgagacggggtccgggggcggcggcggctgcggggctcgtcccggggcgccgggctaactttgcgccgcggcggccgcgccgctccaggggctcagtgcgcgccgcgccgcctccgcgcccgctccgcagcccgcgcccgcccccatggccccggtccccgcgccgccgccgcctcctcgcgaccccgggacgcccggcccctccgccgccaaacttcactgcgctagctgccccgccggcctccgcctccgccccggccctcgcgcccggctccgaggcgagggcgcccttgggccggccccggccccgccgctccccgcgctcccttcccgcttctcgcggcccccgctctgcgcccgagtctcctcctccccgcggagtcctcgggggcggcgcgcgggcgggggcggggctgctcgcggggaacgccggcccccgccccgcaccccaccccgggcgccgccacccgggcccagtcggtcagagcggcgcggcccgggagcgggagggctgcggcggggctggcgaggaagtggtggcgctgcccggggcggggatggggactgcgccgtccccggcccggtcaccaccggcctgcactccgggcccgggcttggctcttccatcggcttaaccatcacttggaggtggcagatatgtgatggagacactatgttggcgacgtcagggttaactaggagtgaattgggggcgcgatgttgtaaggacgggattcctgcctcccgccccattatccttacgccctattcactgcggtctcagattctgggaggtctcgggaggcccagaaatgggagaagtcagattgcggggtcgtgggccccaaagcctaaatcttgcccttcctacacccagagctaagtgaccatgcccaggcttcatttgaccacatggacaaaggtaagcccagggaaatgccccatctggggagagggacggtaaagaaactaaagcaatcagaaaggaagttagccaaaacggagtaggggatcttttaaagaaaacaatcgatgctgtttccctgcaggaaagcgcccccaagagagaccatctcccgaagcagaggctctggctgtaaatggtgctagtggccggcctggcaggggccagctctccccagaggctcaggagcttctccaggaggcatctcgcagtcagtccccagcccacaccaaggctgtgcccttccactcctcttgctttcctcttcccaccacccactcactcactagtctttgccctcttccttcctctgggaaacggaacaggctcctttccattagtgagagctgcaactaatgcagtcatcttcagaaagcaaagacataaccccgtgcccaggatccgaactgcgaccatcacccagcaatgactgctccccttaaacaccgagaagggaattcacttgattctaattaggtgagtttgctacagacaccaattttcatctctgtttcagaaagtgtgatcatttcaactatttttgtttctcaccaccctcctccccatccctactctactaacaagtcaagatcctgccaagatttccttgtaaataaaactgtctgcatggggtgtgattttgaaaacagccttcaggggacagaagagaggctgattcctttgtgaagaggagcccagaaggacaaatgaccgctggggccctggggtctgtgtcgctgcctcccgcatcccaggctgtcatttgcatgaccggtatgggtgttggctctgttatacttagatctctgggactagagaagtgggccaggaagtctggttccaggggaactggaaggagaagggcacagaaaagggttggccactctgctgggatgcccagccaccctggacagtgttctgataccagctacccagggagctgcctcttcatcagcccagggacagctcttatcaacatatccaactctgtcatcccttcgtggggaagggagcttagcaggctcagttctgttcctgaacatgtat

SEQ ID NO: 1244612 - DNA, 4001 bp, Homo sapiens
tgcttcagcctccagagtagctgggactacaggtgtgtgccaccacacccggctaattttcgtatttttagtagagacggggtttcaccatgttggccaggctcgtctcgaactcctgacctcaagtgatctgcctgccttggcctcccaaagtgctgggattacaggcatgagccacagtgcctgtaatcccaggcactgcactccagcctcggtgacagagcgagactctgtctcaaaacaacaacaacaacaaactatttcatcatatatttaaggatcagttttttaagcaagtcgtctactcactttccctaccttgctccaaaagcataagcatgaattatatgttaaataacaccttcctgaaccttgtcaaggaagtccatgaaaaatacagattaagatatagttataaataaaaataaaaatttacaactgcaaatcaaaaagtaaactatggctggctaagcttactcctaaattctaattctaaaggaagatttctccaaacagcaggtggatgaaatttcaatgaactcaaagaacactacagaagagggtaaaaacgtgttaactttcttccttgggattccatcacggtgaccctgaggggttaccaagaatgaaataatggtttaaaacagaatgcttcgaaacagcaatggcagactattaacgaatgtattaactctttaaaacaaacaatccagttatccctggcccactttcttattttagtcctagcaactgagttacataacttgcagagtgaaatcaagaagtccccgctgttgcgtcctcatgtcagtgaacagagggaactctcctttattatattttcaaaaggtgaaatgtatgaaatttctgggtggggggagatatcaaatgtctgtgtgcctgtggttattaataagttaactacgaagtaactatggaataaataatgcttaaaaagagggcaaagattacgctttagggtaacaacaattggaccctccccagataattctaattcattgagcgcttgcataactcgaagttgagtaaaaatttttgatgaaatatctcgagtacgaggagttagtccaatgcaaagtacaagtactgctaaaaaggatccggccctttccactactcatatcttaatgtcaatacatagagagagtgaagactgcgagtgccaaaaaaatgcagaaacctgaccttgcccacaagtcgaatagttctgcacccctcccccagcttccccgggagccggttcacgcaatccctattggtcagtctgcttattccagcacctgcctggcagtgataagggaatctccagaagacaagaaggtctgaaaggaggcggcctgggaaactgtgaggcccagaaggacagggttcgaagaggaaaaggaggagagaagcttcggagggatgaggtcgggcggttagggctaatagggacatggcttgggaggacggctggggaacagggaaaggagatctctggagggcccaggtgaggtgacagggtgagggccgccggcggccagccaaaagagaagagtgaaggggctggaaggcctaggaacgcggagaaaggcgagcggagctgtgaggcgcgagaagggccggggctgcaaaggttggggctgcaggggcgacaggggcgacaggggctgcaggggcagggagggcagggactcaggggccggccagagggtgcggactcacgttctcccaccagcaggatccgcacgtctttcttcatgtcggcggctctcgggggccggcctccgcccgcacgcacggagtggactcctctcaccaggagcacccaccccacggcgccacctgccagcctcttcggccgccggggcccgccgcgccgccccctcagttgcttccccgcaagagagccgggacagcgccagctccgcctcctccggcccagcgggctgtggcggcggcggcggcggcggcggcggcggcggcggcggcggcggcggcggggacgacggcacgcggcgagggacacgcgctttcggaacgcgaacgcgctctgcgccggaacagcgctcccgctgtcaggccgccgcagcgcaggcccagggagcctcgcccaccctcctttgggcaccgcgaccccggagacacttgggccaggaatttgaatggcggattccctggtttaaccccgtttattttatagatagggacagaaattccctgttcaaagtcacatagctagagcttggcagtgactcagagcagggatcttctcaccagaccataaactccgggagggcagcgatcagcttgcatggttttcagctgcgtccccacgttattggatagggccgtcagaaaatgcttgatcgagtagggcgactggctcccaggatccggcgctttccactccccaaagcccgtcaccctagttgcttttgcctctgatgcttataaaatacgattataagattcgtttttacgctgtgtgaacaagactcctttctttataaccaaactaagtgactttttttctgtctatgtagtttattttatggcagggttttcggacactcttctttactcaggcttacccagcgtaatgctagacacggaggtggcactcgataataaactctagatgatttttctaacattgccttaattttctcgtgaccctctccatctggaggaatttgttgttacatgcttaatgtttggtacacaatggcaaatatatatatatacatacgcgtgcgaatatatatcacatccctaatacttggcacacagtgggaaatataaaatacataaattaatgaggaagcactatctgtgcataatgtacattttttctatcttaaatattacacaataaacacttaaagggaatgaaatgtgcgtaataccaacttccctttctcctaggagaagtcatgtggtctcttgcagcagttaagagttgctggcaaatttcctgggtttgaatctaggctccacataatagctctgtgatctcgactaagtgcttttatttttacttccctcagccactgttccttcttctgtagcatggaaataatgatgataataccttcctcttgagatggttgtgagtaataaatactataatacttgtcaagcatttggtacagtgccagactcagagcgtgtgctctactgatctcagctatcattattatattaaaaagtcactaaaaagttgtaatccacagattttttgttttgttttggttttgttttgagacggagtctcgctctgtcgcccaggctggagtgcagtggcgcaatctcggctcactgcaagctccgcctcctgggttcacgccattctcctgcctcagcctcccgagtagctgggactacaggcgtccgccaccacgcccggctaatttttttttttttttttttgtatttttagtggagacggggtttcaccgtgttagccaggatggtctcgatctcctgacgtcgtgatccgcctgccttggcctcccaaagtgctgggattacaggcgtgagccaccgcgcccagcctaatccacaggttttgaggcaaatatgttgttgtgtttactgcagaatttcaccatcttagttatttgatgtccataaggagcacaggggagaaagccctttcaaaaacaactctatccctgtccgtgttaggaaaaagagggagatgggaaagacatactccttgttcactgagagataatgaagtcgcgttcctgggtagatgtaaataaggtgctttcatctccctcctccccccacacctcaatgagtggaaatgtgaaattcaggaggcttggttacctgatctttcagggaaaagtagccctcagaattttagtgttacaaaatgtttgagttggaagaaccctgacagagctcctattccaatcccgttactctgtagataaaaaaaaaaaagcaaggcccacagagacgcaatgacctggcacagacggcatggc

SEQ ID NO: 1244613 - DNA, 4001 bp, Homo sapiens
ctgacaccctcagaccttaaattaggtggccccgtggccccctcctaggagagattccctggctgctgcagctgcaaccctttgtactgtccctctcccctgtctggatgacattgcaggagggcaagggctgtacaattcatgtcctcccagttcccagcgcaggcctggcacatgtcactgtggacatgtcaatgactggagaatgaggtggggtgatcggaggccccccggcttcccagcgtcctcaccgctggaagtaggccagttcctccttgagcaggaacactttggctttgagttcattccgctcctgaaggatctgctcaaactcctcccgactgaagcggcactgccctgcctccgaggggcgcccgagctgctgcgcggcctccgcctttggaaggacaggcacagtcagagggtcgcctcggctggcgttcccccgccccagggccatcatgggaatgctagaggaagtgacgggccgggagacttgggggacaagggtgccctaacagataacagagcagtgctccagctgagagcgggggccgaggccggccgggggcgcagatctgtctgccacctccccgcttcctggccgacctgctgtgcagcatgcaaaccttgcttgagtgcccaccgagggctggacgctgcgtcctgggctgggtccttgccctcatacggcactcaccgggtcctcagggttccctggggcgcctgcgccggcggtcgcccattcgggctcctgtccgtgctggtgcccgggccgcccggcctgcccccgcgctcgctctttagcctgcggagtcgcggcttcgccaggctgctggcgctccctctcgcggtcctgcgcggcgcgcagctgggtctgcatggccgccagcttgtgccgcagctcagcgttcaccagcaggaggcgctgcagctgctcctgcaactgggagcggagcaaagggtggggtgggcggggcaccgagggccccccggagccccgcccagcgcctgcctcgctccgcccccgcccccggagccccgcccagcgcctgccacgctccgcccccgccccgccccagagccccgccccgccctcaccgcctcggtctcctggccgcgctgccgcaggtcgcggttgtgcgcccggagttcgtcccgctgtcggtccgtgacctccttgagctgccgcagcagcgcgcgctcctctgaggaaggggcgttcttagcggcggcggcgcgcggcccgcgggagggaggggaggacccgagcaggtcgtcacccgccctgccctggccggggctgcgcttaccctgtggccccgcgcgcagctccctgcggaggcgctcgttctcctcccgcagccgccgcagctcctgctccgccggctgcgccgacacctgcagctggggagacccgggtctcaggcttcggccctgccggccccgtgggtggcgaagggagggccatgactcaccgagtccggggcgggccccacggcagcctgttccaagagctccagcgcccgcaccactagcggcaccagcccggccgccgcctccggcccgaaacggcgcgccagatcctgcagctcagtgcccagggccccggctagatggtacacaagctccgcggccgatgccgaccccgcggcctcccgagacccccagccaggcaccccgggcgccgccctcctgggctccatgtctcccagaggcttagggctgcgacccccccaccccaccctccactgggacggggaaaagcgaaacagttccgccccaggaagccgtttagggcggtgtgggcggggtagaagcgataagggtagggaggaacgaggaagggagaaggcgtggggtagggagatagtgccctaggtcgcctgggctctgtcctttccacccccaaggtcacaggaaacaagacagccaacttccagccaggcgtccaagagctgaggttcagggctgcaagtggtcacttgagtggagccctccccacaggcccaatccaggctccgcccgtttggagtcatggggccaacttggcagtggcccgctccaggcgagaggtgacaggtaggcagccggtctctggcctccgcccggctgtacacaaactgcctgcctgtgtgcttgttttcctgaccaggactgacacagaaagcttaaagggctgggctggacaccgcagccgctcagcacaagccacagagttcctagacccgggaaagggcaactgctcccaaaactgtggaaaggaggcgagagcttccaagtagttttgtggaaaaagcagcaaatgtggtcaaggcagcggagtgtgaaagcccagccctgcctcaggtctccactgagtccaggggctatctaccccaaagccctgaataggaagggggcctcatactccccccttcacagccgagcccagcatcttgctgtgaaccgctccagtccagcctcctgttagacctaaatccagaatttgagtttgggggggaaaaaaaaaacaaaccagcccctgaactcctatttatacaaaatttattattatattttattcaggatgacaagccatcaggaggtcaacaacacaagcacagacagagggaaagaggccaaactgctgaatgtcagcggcctgtctggaggggctgaggcttcggcctcgggaggctgaagcaggaggcagggaaacggtcaggcatacaggtcctcccgatccgcagagtaaacctccccctcctgcaggagagcaaagttgaggaagtgagagggcctgtgcacctcgtggtagaactctttggggttcgccagctgtagctcatatttcatgttggggtcatgccgaacaccttcggggagaaggaaacagccaatgttaacagggctcctgcctcatgcagcctgcgccacctccaagccagccaggccccaagtgcaaagggcgatggcctcaccttatccctactgctatccccacatccccaggctcctcccacttacccatgaagttgtagttccacgaggactgggcagggaccatgaagaagccaaggaaacggtccgacagcagcatctgcaccctctcatagtgtgaaggcaggtagcccttggggttgttgcccttgtctgtgttctggcggccccattcgtagccactgggggtcagcttgtaggccgtcagtgtacaggagcctggcgtgaagctgggggaggaacgaggacagagtaacagctcaggccactgttctgggccctggcctgcaatccctgccccaccatacttcctcccaaggagcccaggcccacctgcatgtgatgataatggtcttctcgccatcccaagatgggttgtcagccatgatcttggcatgggtggtgacatcctggggtgataactgcggggactcattgggctgagtgtggatccaacctaagggttccatctcctataggtaaagaggagtacagagctgaatcccatccacagacaggaatcgcaccagcttttccacactcccaggctccatcactccccattaccttgaggtactcatgctggggcagctggccaggcaggtgcacggtctggtgagtgccccactgcggcaccatcacaatgcagcggatctccttcacctgggggttatctggtgggctcaccccatataggtatcctgcaatctggagacaaaggggtcaggaaccaaaactcttcttagtaccaggtcagagttggagctgccagccctctgtttccttccttcccccaagaacgaggacagagtttcttaaaacgtgatcagaaccccctgtatcagaatcagctggggtgcttgttcaaaatgttagacatggacctcatcgcggacttaccacatcagaatctcctgagtggggtccaggaatctgcactgctcacaagctccccagctgattattaagcatagtattcacaagcaaatgagcacacatgcagctcagtgtattttcac

SEQ ID NO: 1244614 - DNA, 4001 bp, Homo sapiens
ggattcagtctctcgcccgggaaacccagtcccgcagagggcgccggcaagggtgggacgcgacctgggtgacacggtgcagggagtctttaaatagaggaggggctggagcggggaaacgcgccggggccctagcgcaccatgtattccttgcgcttattgagccgaacttggcagaaagagaagcctccgaggaggaggtaaaggcctgcagcgatgaaacagttgtagctgacttgctcgtaaaggttgtatatgttctgggggccattcctgggggtgggaatgaagcaaaggggtcaaactttaataggagccaacattttctgagcactatgtgcccgacacctgtttaggcgctgttacgtgtattactttattcaatcttcttgaccatcctatggggtgagatctgtcatagccattttgcagaggtggactgagaagcacagaaaagtaaaatacctaaagaggtcacacctaaggtggtgggtttgggatggccgctgaggtctgactccctggctcctaaccacattctcaagaaagccgctctcctctccaagtcctctaacctaggggccctaagcaccgggcctcccagacgtaattctgaccctaggcctcgccacctcccacctgctcccagcccgcctcccccacccgaatacttactcaaaatctttctccgtgaagggaacgtcctcaatcaacacagcggaatggacattgaaaaatattccgagcattatctggaaaaggggaatgggtagactgttgaattcaggcacctgacctcatgttcacttcgtaaacccctcccatttccaatgttgctacaacacccgagcctgagattaaccaaaacgaggtggtggttactggattcggactcagccacctggaacagggcgtgaggtggtgacattgagacaagtggtcgaggcaagggtgggaatagtgaccaagccatctctcccaggaacccagattatcgtcctctctggaggcgtcatcatcacgggacagtgcggaagaggggagggagaaccggcacttcttcatatcatttcttcttgaagtggcggtgggtggattactgggaaaacaaggcccagctacacatttctggaacaagcactctcttttcctcccatgtcctccattcaactcaagcacctctcaggcaccccgctcttgtttctcctaccttgaggggtctccacctttaccagccctggctcctcccactccagggccctccgctccagttcccttttttctttttctttggggacggagtctcgctctgtcacccaggctggagtgcagtggcgcgatctcggctcactgcaccctccgcctcccggattcaagcgattctcctgcctcagcctcctgagtagctgggattacaggcgggcgccaccacgcccggctaatttttgtatttttattggagacggggtttcaccatgttggtcaggctggtctcgaacagttcccatttttcaatttcagtctgtctccttctccggggcctgtagatccccggcccctccggcctgcctgcggcccagagtttcctcgcctcccagccctcccagcccggagcccctcaggccctctccgatccttgccggggagtcccctcaccaacatgatcactccccaggcgctgaggacgatgccgcaggcggccagcttcggcccacagcacaggagcgacgccataaagaagggagtcggggatcgccgaggtgcaagcgggctcggaaagcggtgggagaaagcccaggatgccctcgcaggggggcagagggggcgtggccccggcctcaaccatcccatccgggggcggcaggcggaaaaggctgggctcctctcaggactttcgcgggagacggcgccgtctgaaaccaaaactgctcctggggaaaccttccttgacctctgtagctagggcgtgagtattggaagagcgagggcctccggtttgttggtccccctccccccgcacacgggaatggaaggagctggtatgtcacgtgaccaagcctgtcacgtcacgtgacgaggaactagccttagcgaggccatgggggaaaaagtctaactggcggaactcctgggaactggggcgatgggctcttagtatcggaggattggagccatctgatttttacctgaaattccttagtctctcctgtgttggggaaatggtaagtaagacagattttcaccaacagagagcgtttctatctcttctctactcctcccttttaaaattgagattctgacagtgtaaaggagttaggacccccttttggggatcgggcatggttttgtggctttaaaatgctttaaaattgctgaagtttcttggtattggaactgtttctcctaagtaacattttatcatcgcacgtgaaatactgtaactctcggtgccaaatccaggaaaaatgggcggttaggagaagtccagggaaagccgactgagcaggttgtgaaggtaagcagtcctgttaaatgtacacaaaaatgtcactttgcttctctaaactaggaaaactgataggacttttgaataaggtaggatataagatttaaaaatataaataggtcatcccctccaaaaaagccgtttgtatgtttaactggtgagtgacagatctgtaataattatttagaaataggaatgtcgaggcgggcggatcacctgaggtcgggagttcgagaccagccaggtcaacatggcgaaaccctgtctctactaaaaattacaaaaattagctggatgtggtggcatgagcttgtgatcccagccactcgggatggtgaggcgggataatcccttgaacccgggaggcgaaggttgcagtgagctgagatggcgccactgcattcccgcctgggcgatagagactacttctaaaaaaaaaaaaaaaaagaaaagaaaagaagtagggatgtttgaagaacacagttttgcagtgagcaagttgtacccactctagtgaggacagtgacctcagaataattgagagggatcatttgaccttgagaccccaggacctaacaaataaacactatcattggctagaataactttgtagttcttgtccatttattttgtgcatgttgttcttaaaaggcttgtgaaagataacttggaatgtgggaaacacatagatcccagagtattaaaggggctggaaaagtagccttaagacatgaattatgtgcctttcatctgggactgtttggagaaagaagccattttggggcagtggtttgtattctgccccaaaaacatgattcttattcagggacttttggggtacatgggtgaataggagaaatatgggtggaaggaatttgccaaagaactgagtcaggaatttgtacattggccaccaggcatgaaggttagttcctgggaatggagagttagctgaggtaagctgatttttctaagaaatccccctgctccatgatcttggatgttttggaagtagggtcagggcctcaggctagtgcagggttcaagggccaaatccagtctgtagcctggctgtgcatgtctcaaacaaagcacatttgtttgtggattttttttgcattttaaatggttgaataaaccaaaagaagactactttgtgatgtaacattcatatctcagtgtccataaagttttattggaacatagtcacactcatttccatgttgtctgtggctgccttcatgctgcagcaggagagctgagtagttgagacagtgactatgcggtctgcaaagcgtaaaaaaggatctagtctttgcagagaaagtttactgctcccctgggctagtgggatactaatgtagggggtttaactgggggaggaaatagagccttagcagcagagactttaggaaagcatgaaattcaagatagaaatgtcagtcctaaagctgatgtgaaatcttgcaggtagagtcactctagggctcagatg

SEQ ID NO: 1244615 - DNA, 4001 bp, Homo sapiens
gagcacagcatcagaatcaggataggccagaggccggacattatcatagtaagaggaacctgaaggaagacagggcatgaggggcctgagtggatgggaggcctggaagggaatgggagaccttacagatcctggtcaagggatgctgggagcagagaatggaaaagagcaaccattaatacccatcattaatacccatcatggagtctgggtttcccaagtgggggagcgggcagaagggaggtcacatggtgggaaacggctctctgcttccctagtggtttaaaaagtaataatttttattcttgactgaggtttggacccctttgagaagctcataaaatctatagacattctcataaaatgttgcatgtgctttctgggctttggcagtctaaagccctgaagggaactcttgtaaaaataaaaaccctccttatgttgggaggaggaaaagagcagtggcagggagagcactctcccattctcctgggacttgacctcagatttatctagttcaatggagagaaacagcctcctgaccacccctcactcaagacattctaaatgtcttttctgcttttttattttttgagatggagtctcgctctatcgctcaggctggagtgcagcggcatgatctcggctcactgcagcctccgcctcccaggttccagcgattctcttgcctcagcctcctggtagctgagattacaggcacgtgccacacgcccgattaatttttgtatttttagtagagacggagtttcaaccatgttggccaggctggtctcaaactcctgacctcaggtgatccccccaccccagcctcccaaagtgctaggattacaggcgtgagccaccgtgcctggcctctaaatgtcttttctaaacccagtcttatctctgaaggaacatgttccaaattaaaagccattccttcccaactttcccaggtaggcaggacccagctgaggggctcagatcctaggctttctccttcaggacatggtttctgtcaggctctgcaagttctacctcagtttccctggattttagcagaatattgatttttcccttcctgttggaattggatggatgggctgggcttacctggaacctaagggtctaaccaagggaggggacagagtgggccgccttggaagtcagggtgacccccagggacttggctacctgaagtgtcccacatgttgagctcaatgcggcgcttgtcgatctcaaagctcgcagtgtagttctcaaacacggtggggacataactctgcagacacggatggatccagatgagatcatctctccaagtcctcaccccagataaatgccctcctcactcccacaccccgtccagcccagcccctggacacaagttggtctgggattgggcaaaggggagatcccgggagctcctgcccccccccccccccccccggagaatctctgctaagctcccagacctcctcctgttcccttctggtcccttcagccccctagttcttcccctctccattgcccaggacctccgacattcccctcgccctccctcccggatgctctggttctcccaaaccccatctatctcaccctgctccctaattcctcccaccccaatcctctgcagtccttcctgagccctcaaggcctccccgcgtcctccgaccccctgtctcttgtccctggttacccgagtacccattcccatccgtcgccagggcccctgtcacccaccccccagcagccttagcgtccccctcccaagacgcaggtccctcaccccgggataggcgtccttggcgaacacctgcagcagcgccgtcttgccgcactctgcgtctcccaccaccacgatcttgcagcggccgctctgcccctccatggtcccggctacgcgccggtcccccacgccacccctctcccgggccccgccgccgcctcccccgcccctgcaactgcagccgctcgggccgccaacaccggcatctcgcgggcccgcgccgagcccccgccccgggtccgcggccccccctccgccccgcccccagccaggcggccgcgcccccccggcccctcctcccacccccgcagccggggggcggggcccagaagatctgggcggagccctgggaacagaggcctcagagccggggtccagcccgccggtgtggtctgaggggcccctgccggtttgggacaggccgaactgggcttatttgactttctcggatataagggcaggtcagagttcaagcgaagttcttaggggtagaatatgagcggcacaagcgcgaagctcgggcctgctgtgtacccacgcgtgcacgcaggtgtaccagtgcggacaagagctggggcagccatccacttcctgaacacggcgggagagagatgctaaggggaaggagggagcctctttggttttctctcccgcgtccgcctatgtcctggcagggggtcttggggaaatgggagggtgaaccccagcacacccacccggacggtggtgacatcatagctttccgtccccatggcaacgggcagccgggtctccggttacattgacttaaccgccggcctagactagcagagaagcgtggactgagttcctccagccaagcactgggtggaaagttttgggggagctgcgtcctctggtggatgcttggggacaaggagataaggaagagaaagaaccaaccgccagagttgctctgctggagccagagctaaacccaaaagtcaggcttgattaagagtctgacaataggccgggcgcggtggctcacgcctgtaataccagcactttgggaggccgaggcgggcggatcaagaggtcaggagatcgagactatcatcctggctaacacggtgaaacccgcacggtgggcgcctgtaatcccagctactcaggaggctgaggcaggagaatggcgtgaacccgggaggcggagcttgcagtgagccgagattgcctcactgcactccagcttgtgcaatagagtttcgaaaaaaaaaaagtgcttttttatatcgaggcaattcgagtcaataatatatgctgcaaataattctgtaaagataactagaagctgggcgcggtggctcacgcctgtaaactcagcactttgggaggccaaggcttgcttgcgtgcaggagtttgaggccatcctgggcaacattagcgagaccctctctctagaaaaaaaaatcaaaacttagctaggtttggccactctaggcacgctgcctatggggtagccctgctctgcaaagagcagtaaaacataaagttagccgggcgtggtgacacatgcctgtggtcccagctattcaggaggctgaggtgggaggattgcttgaagccgggagtttgaggctgtagggagctgtgatcgccccacctcgctcagcctgggtgacagagtgagaccctgtatcaaaaaaataaaaatataaatataactagagcacgcagcatcatcactatgttacagaagggaaaatgaggaacagaacgttaacaccaaagtcagaaagttttaaaggcttggtctccatgcttctactttgccactgcaagaccacagtgaattaagtctcatccctgcctgggttagatgtcagagcctgagacacaatgtagttggactccagtccacaggtggctgactccaaatctgatatgagttaactccaaatctgatgtaagttcaagttttgggactgttccttaactttttttttttttttttgagacggagtctcgctctgtagcccaggctggagtgcagtggcgcgatctcgactcactgcaagctctgcctcctgggttcatgccattctcctgcctcagcctcccaggtagctgggactacaggcgcctgccaccacgcctggctaattttttgtattttttagtagagacggggtttcaccgtgttagccaggtgaatctcctgacctcgtaatctgcccgcctcggcct

SEQ ID NO: 1244616 - DNA, 4001 bp, Homo sapiens
tccccgcctccctcctgccccgccccgccctcaccaggcccggcaagccctgaagcaaatggttgaggaggaaggacttccctgagtgctgctcccccaggacagcgaggaggcagactggggtgtccctggccagagggtgcttcaggcagcggttgatggcccccatcctaaggatgaggcccccagaggcattgatgcgaaccagcagcagcggctccgccctcacaggacacgtctcctgggccaggagaagagaggggcccctgagcatccaggaccagctcctgaccctggaatgtgttcagcctggagctctgtgtcctgatgttctagaatagggccaaagccaccccctcctcttgggtctgactgattaggcccagtccccagacctgcagtgcagggggcagcggccgctgcggcaggagcttcatcttctcgcccaggctccggaggcccctcttctgcttgcatatcttccggcactcaggacagcagggcggctcacagcccgggagacggtgtgtgctgaagcaccgtatgcagaagtcgtggccacagtccagcgagatggggtcgcgcaacctctccaggcagatggagcaggtagggagctcccggggcgccatgggctggggccccaggcctagctccaacttggggaaaggtgtatgggacctgtggggcaaaacaggccattgaaaagcaggatgtctattgggggcagggggtaccggccagggttgtggtggaagactgatggcttgggagtggaggtccctttgtgccaacccaatttccatcagtgcctccatggacaggcggagctgctcccagagaggccaagctctgcccgttcctcactgacatgtgtcctaggacctgggggcctcagagtgggggcagcagagcaatggtgagagagtctgagagggagaaaatctgagtggaatggactccaccacatcccagccatgcaaatgcaagcaagttccttcccctctctgggcctcaatttcctaactgtcccaatggagaggatagcaatacccctcatggggccgttggggtggccatccgagaggaggcgtgtgcagctgtctgcacagtgcctggtgcaaatgcttgggaagagcctctcccggcgttctacagcggggctccctccatgaggtgctgacttcagccaggcccccagggatgataccctccacaaccccatgctacagggacagtgaggagaagccatcagcctgtgctgcagttgggcagatggctctggatcttagaagattccttccgctctctgctctgagctggcatctgcctccctgcagcacccacctgcttcttcctgtccctccctccacagcctggcggatccagcctcaggcggacagccctcccggctgggctgccgggctctgtgttccaggaccggccatttcaactgacctgcctggcctcactgcacccatcccagcctggaaggccctgctacttaccaactgttgccgctgtttcccatgaagctctgttttctctccttggagaaaaaaaaaaaaaaaaaagatttagaacataatccagacttctatcttcaccctggatttccagggacccctcatcctccccacccccggcccatcccccagcccaaggagggcccttcccaccccactctccttcccgatcttaggactgaagacttgcccgtttgccaagccgatgacaaaaggaagtgactgacaaggcgggccttggcatgggaggctgggatggggagagggtccggatgcagagggggaggccccgagaccttcaaccagaggtaaggatgccttttctcccggaaaggctagcaggctgcggtaggtagaaggtgaggtcgggggatggtatccccgaggagctgactcccggtcagagctggaaaagaaatgtgacagtcaggaaagaggaggctgctgctggactcaccccagggggaggagacacggctgcgggtagcagggctccgaggagggagggatggagcccggctcagaatccctggcagaggctgggatgcaggcaagccgaggtggtgagtcgccatggagacagaagggaaagataaggacagggagggggagggggacagagagggagaaggcgtgcggtgcacccgcaaacatggaggcgcctccggcagaaccatgggccagcactgcctctactgggccagctgaggtctccccagggccacaggacagggtgggcaaagagaagaggtgtgagaaacaggagagggtaagaccagagctgacccagagacaaggagttattcatccattcatccaatgaacagttactgagtacctactatgtacagagcccccaaatgcagaccctacttcacatggccctgcacatcctcctgctctctctcaggtttatgtcatcgacgcccaacccagctgcagccttcttcagcactcatgggccctccgtgtcctctggtgtatttccctcccaatagctttcactctgcctcaaacttgagcaggatgaaatctatcaaaactatgagccacctctggaccttctaatggcctcttgactgggctccttgcctcccttccactccccagtgcacagccagcataggctccccaagcacagatgacctcacactgcgcaaacaccttttgtgtctccctactaccatcagatcaaaatccaaactctccggcctgcggactgggctgaaccttccttccacccttctctcgccccactcttccctgcctctgcaccctggcttggctgctctgctccttctcatccctcctgggacaccctcttaggcccagtgcaggtgctgtggcctccctagagcctcctttcctcacccctcccaactgggtgcggtcttgttcttggacagttgagggctgggatatgtgataggcttggcgcagcccaggcttcagagccaggcagatctgggcttgattctcggctcaggggctctgggactccactgcacctctctgtgctctgaggagccaccattacctatgtaaagccactagtccaggcacgggagtcattcgtacatcctatgagctaggatgcagaagggttggggtgaggtgggattcagaacctagaaaagttcagcagagaccaccttcagcaggtggagacacccctgaagctggggctggatcttgttcattttggtgtctggagggcctgagattgtggggctgaatcaatcagattcagagaagcagtgccatagactctgcctcctcctgccccaggtgggacaagcccctgtgtgttggcagcaaagcctcacactcaggggatgaggaagcaagcctgagccgtgccacagctctgccttcagggcagaagggagggttttctcaacccctgtagcctttcatccttgcaggagagaaagcgtgggcgctggactcagattcaagctctaaacctgcctccatcccagcatgaaatgctggtgagtcactgccctctctgagcttccatttgctcatcaccaggcaaagatgtgaggaagcagatgggacaatcagtcttcacttaatgatacttactgagcaccaggtactgtgtctcacactgcagtacagctggaaacaagagagacaaagctccatcctccccaagatcccaactggacaattaaaaggcattgctatgatctgggtgagaacctggatgcggggagggtgaggaggggtgtcaggctgtcctgataagcaaggaggtagaaaaaggttgtcaaggcagggcaaaccacaggtacagggcccagaggagaggggacacagaacccattctggggaacaaaggaggtccggctggcctggcaggaatatttgatgcaaagatgggtgcaccaaggtgaagggcagagcaggcctgggtcatgcaggccctcaggggccaaaggaggggatagggacttcaccagtcag

SEQ ID NO: 1244617 - DNA, 4001 bp, Homo sapiens
ctgggtgtggtggtgcatgcctgtagtcccagctacttgggaggctgaggcaggagaatcacttgaacccagggggcagaggttgcagtgagccaagatcatgccactacactccagcctggcaacagagcaagactccatctcaaaacaaaacaaacaaaaaaaatgtggcacatccacccaatggaatatcattcagccccataaaaggaataaagttctgacacatgctacaacatgaatgaactttgaaaacactatgctaagtgaaagaaaccaggcacaaagggacaaacattgaacgattccagttatatgaaatatctagaacaggcaaactcagatacagaaagtagcttagatgtgagcaggggctagagggaggagaaatgaggagttactgcttaatgagtacaaagtttctgtttatgatgatgaaacagttttggaaacagaagtgatagttgcacaacaggaaatgtaactaatttgtcactgaattgtacacttaaaaatggttaaaataggcggggcgcggtggctcacacctgtaatcccagcactttaggaagccgaggcgggcagatcacgaggtcagaagatcgagaccatcctggctaacaacggtgaaaccccgtccctattttttaaaaaaagaaaaaaacatacaaaaaattagccaggcgtggtggcgggcgcctgtagtcccagttactcgggaggctgaggcaggagaatggcgtgaacccgggaggcggagcttgcagtgagacaagatggcgccactgcactccagcctgggccacaaagcaaaactccgtctcaaaaaaataaaaggttaaaatgaggccaggcgctgtggctcatgactgtaatcccagcactttgggaggccgaggcggacggatcatctgtggtcaagagtttgagactagcctggctaacatgtcgaaaccccgtctctactaaaaataccaaaattagccgggcgtgatggcgcacgcctgtaatcccagctactctcgagcctgaagcaagagaatcactcgaccctggggggcggaggttgcagtgagccgagatcacgcacgccattgcactccatccagcctgggcgacagagcgagactccgtctcaaagaaataaagaaaaaggttaaaatggccagttttaatgttatatagatcttaccacaattttacaagtttcagagaaagagaccgaagatcgattgggaagaagttgaaatatgccaagctgtgtaacagctaagttgacaagctttcggaagatggggaatttgtttttttctacttcttcatacttttatgaactttccaaagtgcctccgaagagcggaactcgacttttagactgagaaaaggaacgtaaaagtagaacggctgaggaaaggggttcgagccacatgggaaagggtcaggcggcgggcagcccgggggagccaggggagctgcgggcccggcctccctacccgctgcagttccgggcggcgccggggcctcgcggccgcgctggagagggaactggagcccgggcaggggcagtgggcagggtcggagcccgcctgtatctcgcgtgcggcgcggcggtacttgtcggccaggtcctgcagtagcgtgttcttccgcaggtgcggctgctgcgcggcgccctggcggcaagtggggcaggcccagcggcgggcgtcgcgggcgccccacagggcctccaggcagtggcggcagaagctgtggccgcagggcagcgtggcgggccagtccagcagcccctggcagatgatgcagccgaggtcgtcctcggccagccacacgggaacggcggagcccaggcccaggcccgccatggccaacaggcggccggggcgcggacgtcggggttgagccgggcgagtctcctcaggctcctccctcgcccttcctcttccccttgccctcctccttttctcggccgccttttctcctccttccttggcgccaccccgtctccttcctccgatcctgctgaaaacagacttagagcctccagtgcccagctggaaagacagagctgaccttcagtggcggcctcttgccctgggaaaccaacatgccgcgagctgctagaaacccgcggaggtctccaagattccctttagctggatgtccctccattaagatgcagcaccgttggatgtcttcgtccgttggcttaaaaaaaaataaacaacaaaaaagatgcaacaccgacaactcttgggaggagaggactccattcagcagcttatttatgagaatgagcccacgaagtgtcatccagctcctctaacaagtagcaggggattaaagatcaccgatgcacagccacagggagcgtcctcaaaaatgctgatgttcggccccgctcgcagggagtctgatttcattgtcttgggtggagcacgggtattttgtaaaacctcccccaggtgattctgacgcgcattcaaggttgagtgagcgaacccttggctttttaactcgcaggtataatgcagagttgtgcgctgtgtccttaccgccttctgcgggatgtaagcgcgtttcccaacagacactcggacaaaattctagaaagtgttttcctgagaaggctcactcactcactcacttcgcatcccagtcctaaacgcattgcaaccagaaaatgttagagctaaaagagcaccacgtcctcccagatgacccaaagaggttaaaaaaaaaaaaaagagaaaaaagaaaaacttgcaggctctcatggtaacaatgaagcgtcagagactaaaacccacaactccccaatctgttgaaatgaactaacaacgtctcatgctttactttatcctttctggcctgggctcaaagtaggtatcagataatacaagtttgtagccgacctttggatcacttgaagtcaggagttcaagaccagcctggccaacatggtgaaccctcatctctactgaaaatacaaaaagaaaagaaaagaaaagccaggcgccctggcgcatgcctgtaatcccagctacttgggaggctgaggcaggagaatctcttgaacccgggaggcggaggtttcagtgagccaagactgcgccactgcactccagcctgggcgacatagggagactccgtctcaaaaaaaaaaaaaaaaaaaaaaagaaaaaaaagaaagaaaagaaagaaaaaaaagcgtttgtggttatttctaatactggaagtgtcatggagtaggcagcgctgctcatcaacgtttccagtgctttccctttctgggcacatggtaggactggcacttccctgacccacttgaaacacacagaggtaatatgttacttcccaccagctttaaaggcgactgagccggccattgtatccctttctgccagctgccccaattatggagatgaaaccatcatccggtgacctgggtcactgagtggctaagatgagcagactccctgccaacgcaccctaggatacgtagtaagagggagaagaaaactaggatgtattcagcttactgagatttagtgggtgtgtgctgctacagcataacctagcctatcctgactgatgtattacctggatcttgttctagaatctccgcatcggagtaaaatcgtagtttctaagagcctctttttttctgtaaaacgggcatgatactaaacacttaaacatgctcagatcttccaacttaaaaaatgaaatcactggcggggcgtggtggcttatgcctgtaatctcagcactttgggaggctgaggcaggtggattgcctgaactcaggagttcgagacctgcctgagcaacatggtgaaaccttgcctctacaaaaaaaatacaaaaactacctagacatggtagcgcaggcctgtgatcccagctactcaggagactgaggtgggaggattgcttgagccagggaggtggaggctgtaatgagccatgagatctcaggaggtcaagactgtggttag

SEQ ID NO: 1244618 - DNA, 4001 bp, Homo sapiens
ctatgttttagcttcaacagaaataatgtggtccacttgctataaagacttctctcatgtataacttctgatttaacatgaattacagttttacagttaaacttttaaaactggtagagaggagaggattatttattgagtgtgctaattaacaaaagttttggtttggtctattgtctttttattatcatcacccaagattcatacttgtacaaatatgctttggggaacagccttccagaggtttacctatgttaagtcccacatatgaaagagcggtgaatactttcctgaggcagcaaacactattgaaaattccaagctcagcaaagtatgctccatattttgatcaataaaagccatgtggtttaagaaaaacagagcccacaaatactgctgcatatttttgtctattttaaaaagttttcctcatgccgccctaagaatatttttgtctattaaaaaacaaaatctatgccttggttagcgttgattttatgtagtcataatcagtcagagctttattaaaatactaacgacccacagctttatcttagacctttctaaaacaattcttcaccatattcatctttgcaaggattcattctttggtacaaaagcagtgagaaacacagctctggcagacactctgcagggatgcgggcaggttcatcgtctggcccctgctttcacctggcagacactggacacactgctgagaaaccagctcatctcagtatgtctctattctaccaaaaagagacgaggctctgctccaattctgacacctcattccgaaatcaccaaaatctccatcgggtcctaagcagacagaatgtcgcagccattcatcctcagaagtcttgagaataaaattaaaagtaattaattaaaataaaactacttgcaattaaaagtaaacaccggctaggtcatgcaattcatactggccggtgctcacataactgaactaccttgtgattctctgctttgctgtcaaaatcctcctccacctccaatgctgataccacaatccagaggctagagacatttaagtgaagggatgattctaataacaaacatacttctatacgtttccaatacctctgccctgtcccagagctggtcccactccaaaacccaggcttgccactacgctagcaaaggggcaatccgagtaactctgatactcagattcccaaacatttctgttactttccaccaccaccaccccccccaccccccggcttctgacagcctctgcaaaagcaccagcactgcaaatgcctgtttggcttccatccttcagcaggcaatggaagcttttccaggagaaacctaattctaacctttccagaggccaggagacggcagcgcagggatagcacctggcgcaagtgcctgtttggatgccgaggtcgcctccctcgcggccctcggaccccgcgaggcaggtaggctttgggccgggccggccgggtccgtgcggggcgccgacctcgcctacgacgccgcagccccgctccccaggagcctcggtccctgcgggcacgcgtccccgtcacggggccgattacaatggaggccgctcccgtcctcccgtggaggggctcggtgccctcggtgaccctgctagacccggcaggacgccccttgggctaattcgcccggggcgggggagacctcggccttctcgaagacctcccgcgctcgaagaccgtttcggagcgtccgcaaccactgagtccccgaagacccgcggggccccctcaggccgtcccgacccagacccctgcccctgcccctctccctcctcgcggctgcggcgcccgcccgccctcaccggacttgggcgggtagcggtacacggaattagacgggatgtccacctcctccacgcccgcgtgctgccggctcgtcagggcccccatggccgctgcggctgcagccccggcccggccccggtgcccgcgccgccctccgcgcttcaccgcggccgcccgccccgcgcccggtgcgggggccgactgcccgccgcggccggctccgctgcggcgctgcggctctggcggcggggagcccccggcgcgccgcgcaccatcctccgccgggcaccgcggcggcgcctctgccaagggggctgcgggtctgggccgggggcgccgccgccgcctcaggccgcgtgatgtcagcggccgctccgcgcggggaccgcggcggccccagccaatggcgaggcggggcgggagcgcccgcgccggagcagccaatgagcgcgggactgcagcaggagccggcggcgcgtgcctcgcgcggggagccgcggctggactcggcgcgcgtggacgcggcccagggcctcgcggcgggggcgtgggcgtgggcggggactcgcgacggggacgggggcgcggccgggtgcccgcggcggggcggggcgggaccggccggagctgggaccccaggagacgagcgctgcacccggccgggacgcgtcgcccctccgcgcctgtttatcccggctcggattaccgcgcagggagccgccccctcccgcggtccgcgaggactggccgggagctcgctcgccattgtcctgggcgtcccaaagcgggcggtccccgctccgctgctcccgcgcctggaggaagccttcccaaccccgcccctcagcgtcggccggcggaggtcttcggaaatctcatgcaggggggtagggagaggggtcccacggtgcattcgcatgtctcctgccccgtgttaatgctggtgaccggctaggaagatgccgcctccctctcacgtgcgtctattcaaagcgctcccaactctatacatgctgtttaaggctccttgtagccctaaagttaggagaacatcgactgaggataagatcaagacatccagcctctgtctgtatcgtggaaacgggaccccggaaactttggaaaggcctgagtgccaagagagtcaacgcaggcgaaagcgaaccgggccaggcagaaccgggagctcctgttgataaaaacacacacaacagtgggaagcttgggccggcggaagacgtcattccattgcttaattacagacatttgtgttttaaaccttctattttctttgtgggtctggtgttttttttcctgagagagtggactgatcagcaaacatttcaactgctagaacatgactttcacaacttttcaacagtgttcgaagtacagtttggggtgtctggttcccttgattaggtttgtaaagctattttacggagtctaggtctttcctggttatattttgtttttgtttttctgtgttttgagacggagtctccctctgtcgcccaggctggagtgcagtggcgtgatctcagctcactgcaacctccgcctcctgggttcaagggattctcctgcctcagcctcccgagtagctgagactacgggcatgtgccaccacacccggctaatttttctacttttagtagagatggggtttcaccatgctggccagactggtctccaattcctgacctccgccccccaaagcgctgggattacaggcgtgagccaccgcgcccggcacatttcgtatttttcattgccgtcttttcagcagcagccaacagacctgatgctaagtgccttggtttcctccagggtcctcaggatggtgggaacacatccctgtcatttatattggctgctgctaacgaaggcttgggttacagggcaagtccctgccccggcagcttctcccaagcaccagagctctctggcagagtccctggtcctaactactccagggctttcagtcatccctgtgggagggaactggtgtcctcctccatactcctttcagcacacacaggccctaccttgtaactgctgggtaaaggtaaaatgcaaataagaatctagaaccacctcaaaacacaaggccttcgacacatcacagagtaaaatgttgccttatgctcctcggctctgttcagaagccttggt

SEQ ID NO: 1244619 - DNA, 4001 bp, Homo sapiens
ggatggaagcaaacaacagtgagatttctcctttctagattctgctctctacaggggccaccaaacacaccagcccacatgctgcacatcctctatcctcacttcctcctccttcctggggtctgagtgagcatcccaccatcacaaccttctcttagcctcttgaaaaggcaatgacataaaacatcccttcaccaaactctcccatcatccctctcgctgtcccagatgggctaatctgtaccctatactgcaagctaatgcaattatttttgccttctaatattccaattgtaattcaattctcaaaccacccatgtcactttctctcaagttctgtttcacagtcccctctccagcacatactcatacagacacactcccctcccttcagttttctttttgtttttcttttttttgagatggagtctcgttttgtcacccaggctggagtgcagtggcgcgatctcggctcactgcaacctccaccttccggtttcaagtgattctcctgcctcagcctcccaagtagttgggactacatgcgtgcaccatcacgcccagctaatttttgccattttagtagagatagggtttctccatgttggccaggctggtcttgaactgggattacagatgtgagccaccgcgcccggcctcttcaattttctaattacccatctcacaaacaactcgactgctactaaggcccaactgagttcttgctatgtggcagtctttgggatgaaatactaccaaaattgcgtatctactttgatcttcacaataaccctaggaaaacttctaatatcccattttacagtaaaacaaactaaggctcagagagattaacttgcccaaagtcatataagcaataactagcacctgagaccttcctgataaggaccgttgatcctgccttctgtcttcgtccactttcagtctccctgataacctcggagttccaggggtggacactctgtcttctccctctagattctgggttctacactagacgtgctcagttcctaacttcattttcctacctccagtttcacccaggacaaacctccccaaccccagcctaggatggaggatcttgcgaaatactaaaaaaagaaaaaagacagaaaaggaaggaagggagggaaggaggaaaagaaaagaaagaaaatcacctggaggccctcctggctcaaggtagccccaaacagagctggaaggtctgcaaagtccatgctggcattgtggtccgaggtctgcggacaaaaaaggcgatgttccccttcagcctgcaacccttcctttcagcgccctttccccatccgtccctcagactcaccgctcgaatgagcccccgggtcggggccgctccccacagcacagcggccacaaccacaggaagcgggaaggctgcagggtgcatggcagcgggaggaaagaggctgaggaggccgcgcgtcctggtagcaaggagcagaagcggagttctgcgccctccctgcccctcctttaggatcccaggggtccaaccacccccaggtcccacttcccagctacatgggggcgccggggaaggaacaccaactcaaagaatgagatatccaacccgtttagtggagctgggtgggaggcactaaatgtatccttttctggtacggggataaaacgcggaaaggggacggagcctaacacaggtgacagaaaaacttcgggaagggtggcggagctcaaggaggtgggacttcctgctaggtgggccgtgttcccagcctctggaaaagggcttccggtagagaaaatcaggccgctttcagcattggatgcttgagatgaaggacttccggtcctaaaaggccggttaaaaaaaggttagcgatggagggactgcctgtggagatggaaggggcactggtggcccagaagacgacctaataaaagtgcccggaaacccggagcctcctagtttacaaacctctcctccctctggcctccgccgctccttcaaatctcgcgagagtgctcaccacctctcccgtcccctcgcagctgaatagttgctgtgtctatcgcgagagcgctccaacttggcgagccgtactcactcgatctcgcgagaccttcaaacaaactcttctctattttcccgcgattctaattcggtgaaaacagcgcctttcctctggtttccaaatcagttacgccccttctcgcacgcttccatcaagctcctccttcagctccgccttactcccggccgcctttgcgctgcgcgcctgcgcccgcgccggcttccagcgggtgtcggacctgagagctggaggggcgtgcgcgcgccctcgctctgttgcgcgcgcggtgtcaccttgggcgcgagcggggccgcgcgcgcacgggacccggagccgagggccattgagtggcgatggcggcgacggcgagtgccggggccggcgggatagacgggaagccccgtacctcccctaagtccgtcaagttcctgtttgggggcctggccgggtaagctcaggccccagggatgggaaaagaggaggaagggaagggcaaaaggaaccgggcccggttcatctctgggtctgttgcagtgaactgtgccggcacggggtcagcgcgatctccagcgtattgcgagttccccgatgggctgctagggccccattgcaggacccttatggactgcatgcagggtcgttgcacaacccccgccgggccagctgagtttcccagcgcattgctaagctcggccgggcggcagggggttccaggccattaaatggctcctgcaggactacctggagtcctaaatcttggatgccccttcctcccctccctgtgtcggactgcgtgcagccccaggtcactgcttgactgtcatgaagctgcttggagcactttcattgcatggcccctactggacaactagacttttcagacccgttgcacttggtgtacatatagactcttatacacatgctcaccagcatcctgattcttgaatcgcatggcaggccctgacctttgtaacctcttgctgccaggctccagtgggcactggtagatctggaatgcctggcccttcactccacctctgtcttcccccaggatgggagctacagtttttgtccagcccctggacctggtgaagaaccggatgcagttgagcggggaaggggccaagactcgagagtacaaaaccagcttccatgccctcaccagtatcctgaaggcagaaggcctgaggggcatttacactgggtattggggcctcaggatggagggtagactgtgggttggcagctctagaccttggcctgatatgctgacccctctgctcctcaggctgtcggctggcctgctgcgtcaggccacctacaccactacccgccttggcatctataccgtgctgtttgagcgcctgactggggctgatggtactccccctggctttctgctgaaggctgtgattggcatgaccgcaggtgccactggtgcctttgtgggaacaccagccgaagtggctcttatccgcatgactgccgatggccggtgagttccaagtctgaacctaaccccagccccattccctcgaatctagaatgaaaggaccagttttttatcccggatctggagcagagtgtttacctgttctggccttcctttctttgcacctgtgggcaatcctgatcttgacctctttctgccttcccaccaggcttccagctgaccagcgccgtggctacaaaaatgtgtttaacgccctgattcgaatcacccgggaagagggtgtcctcacactgtggcgggtgagtggaggggctggagacttgggggctgtgaggtctggttttaggggtttctgactcttccccgctcccctccctccagggctgcatccctaccatggctcgggccgtcgtcgtcaatgctgcccagctcgcctcctactcccaatccaagcagttcttactggactcaggtga

SEQ ID NO: 1244620 - DNA, 4001 bp, Homo sapiens
agccaggaggacactcaggccccctccctgccctggccctgccctctcctcccactggggtgggctcactcaggctgggcctgaacgagggacggaggcactgggtggggttccctggcttgacctgtgtgggagactaatctatgccaccccaaaacagattctgtggtcaattttgagatggctattcagagcaaccacatactcaggagttctgggaagctatccttttgtaaaaggctataaaggaaatccacaccatgaaacagcagaatggagcagaagctctctctgaggccccattatctgcctagagggatctaggaacggtcccagggacacacaagaggagtgcctgcggcctcgccagttcctctgagagcagctctgagatcacctgagtgattatctgcacaacaagacaaccctgcacacctcccctctccagccccaagcccctgtcccaatgccataaaaacatcaatcatctgtcttctgcagtcttctctttgatgaggttcccaataggtgtatgggacaatttgcatcccttttctccaggtctgctgcccttttattccagagactaaaattatctctccttcagagtagaaggagagtttaaaactcccctacccctgccacagccaagccctggctcccaccgtacctcctcccctccacactctacctgaaacaaccaccagtggacactccctccctcaaacaccttcaatgactccccaccgcccaggcctctttctttccacccgaagtgtttccttctccaatgctacactggggaaccacagaccagaaaactcgaaaaatcctccaaaaagcattttttgtttgtttgacagtttcacccaggctggagtacagtgggcaatctcagctcactgcaacctccgcctcccgggctctagcgattctcccgcctcagtctcccaagtaggtggagttacaggcatgcgccaccacacccggctaattttttgtgtttttagtagaaacggggtttcatgttggccaggctggtctcgaactcccgacctcaggtgacccacccgccttggcctcccaaagttttgggattacaggcattagccactgcgcccggccccctaaagcatcttattgttccatctgctctaggggccggaagacacaagagagagccccaggcacccaacactgttgcattcaatccgcttcctgtcttttctctgacattttttcccaagcacagacactgccacccaaatcaaagcccatcccccaaccacaaccaaagtcaacaaggtgggggcagggaagggccaccaccatgtttgcacagctccttcccctcccgccctggactcccccagggcccggcccgccggcttgcaggcagccatccgggaggggtgcccaccctggccttgagccccgcgctcgggcgacttcgccaagtcggaaggacgctgcgcggtgcggttcagacggggcgatgcctccctcgtaaaagttaggagtctgtttttgcaacttcacttttccgttgttgccattcgtacaggcgcaggattcccgggcggacctgcaggcccgggtccggctgtccccttccactacaccccccgtgccccggccacttcccgggggcagcactgccggggcgcaaagcctcctccgcgctctgcgctccggggatgtcgccggggtcccaggcgtgcccgctgcccccaccccgacccctcccgcagccggggaacagggtcagtgggcgccgcgggcggggctggaccgggcaccccggcggcgaaaccgaaacttggagccggcaggaagaggcggccgggaggggcatccggacgcaggcgccgctccccgggacccggcccgccggcccgcggggcccactgtatcctagcccgctccccgccccgggagactctccaggcccgctcgcacctgcggcccccgagctcgccgcctgccgcgcgctgtcgcccctcgggtcacggggccctgggccccgccctgcccgccgccgccgccgccggccccgccctgcccgccgccgccgccgccggccccgccctgcccgccgccgccgccgccggccccgccctgcccgccgccgccgccgccggccccgccctgcccgccgccgccgccgccggccccgccctgcccgccgccgccgccgccggccccgccctgcccgccgccgccgccgccggccccgccctgcccgccgccgccgccgccggccccgccctgcccgccgccgccgccgccggccccgccctgcccgccgccgccgccgccggccccgccctgcccgccgccgccgccggccccgcgcaggcgtgtgcggaattccccgccggtggcgcctcccagtgactccgggcccccagcccccgggaggcgcctcgggccgctgcgcgccgggtacagacgcgggaggggcctcggttcccgccaggcgtggggcgcatgcgggtctcccggaagcccagaccccgggcaggcccgagcagccgagtggggcgggacaggcgcgccccccgccccggcgcccagcacctcggacagtgtctgcggccgcgcagagccggcggccagcctgggagcggcccagagggcgcccggcgggtgcagtggacgtcgtcagcgcgccgcgtgggggcctttgcagattaagggacctccgcggccccgcgcggagcgctctgtcactgatgatggaggggccacggcggtccgcaccatcccccgtgcctcagttttcccatctgtgaggctcatggtgtgaccagggacctccgttttaaaatcacccactttctttttcttccttctcctctcaccccttcatcccgtccctctctggacactgcgcccctctgcgcattccagaggggaccctcatcctgaaacaattcccggcgcggaaccccagctgaatgctcctgcttggggcggggggtcgccaacaattagtccaacatcctcgacagccacccctcctaaccgacaactgcccacgacagccatgggaacaagacacagaccctgcccttaccccactccccacggtgcccacggcaagtttccctagaagaactcgatggcagcctgggcaacatagagagaccccatctctacaaaaaaaatcatttaaaaaaattagctgggcgtggtggtgcacctgaagaggctgaggcaagaggatcgtttgagcccagggagctccaggctgcagtgagtcgtgatcataccactgcactccagcctggatgacaaagtgagatcttgcctcaaaaactaacaaacacacaaaacctgaggataaatttttaattttagggtggcactttatttattgtttgtttgttttttggagacagtctcactctataccccaggctggagtgcagtggcgtgatcttggctcactgcaaactccacctcccagttcaagtgattctcatgcctcagcctcccgagtagctgggattacaagcgcccgccaccaagcctggctaatttttgtatttttagtagagacggggtttctccatgttggccagggtggtctcaaactcctgacctcaggtgatccacctgccttggcctcccaaagtgctggaattacaggcatgagccactgcgcccagccaaggtgacactttagaacgctagttgggcatcttctcgctttgctgggtctccaattaaaacctgctttttcctcccaccaatcttgactgcaccactgcactccagccctggcgacagagtgagactttgtctctaaacagttaatttcaactgtttcttttgactttttcagtatgactagtcgaaatgtttaaatgacttgcatggctcacgttggtggcttgcatgatttttctgcgggacagtgctgtctctgtgatcacagtctgcccctaccagctgctgcagcaggtacactaagcccttggagctttgcctcttgc

SEQ ID NO: 1244621 - DNA, 4001 bp, Homo sapiens
ttcttaagccaatcaactattaatatgtttccctgcatttcataactccccagagtgtatgatggcaagagttccatccttctatccatccatccatctgtctaattattcgacacatatttattgagcacctgctatgtgctaggtactgacttacatattggggataagtagtggccaaggaagttcttataaaactttagagcctagtggacatttataagttttcttgaaaaagatatttttttgaaaggagtattgatgatcaatggtttaagttgtttggataactgagaagtagagaccaaggctgacaagaagagcaaataaggaatactagagggaaaaaggactttagagatcacttagttgaagctcctagtttcagagatgagcagatccatgtctagagagagggaagtgagtcacctgaggtgaccggtgaaggtgacggagagggagttaaccgagacagagaagattccgtagatggtagaacattgttagaatcagctgatagattgggtgagtaggtattagccaagttagaaagcaccgtcctccttgagacgagcagggaaggagaaggagagcctctacttttcatccgagttagaggaaaagtaaaaaggacccagggagtgcagaagacatccgaggccccaatgatggcctctctgggcaatccttctcccttccaacaatggcctctctgggcaatccttccctcttacaacgatggcctctccggacaatccttcccccttccaatgatggcctctctggacagtccttcccgcttccaacgatggcctctctgggcaatccttcccccgtcccgtgcttccggagagccacgccgtcaacacctggacgatgctacctccttccccaccttcttgcctccctttctcagtctttccctgacccctccctctgcctctctcgctttctgaatcccattccattccccatccttgagttcctcttatggtatgattctgtttggatgctggggtgagggagagggcaacagaagaaatgcaaggaacatactctagtttgagcacaaacgagttgaagaagaatgcagtaagtgccaaagcatccctgttggtgccttaggaaactgaggggagaggagggctggaaagtattcctaggtgaagtgggaccagtattgagctaataataaataattattattatttacaacagcgaccatttattgaatcctaattatatgcttggcattttgcatcccttcctcttctgatcctgacaacaaggctggggcgtagggattatcttcattttacagataagggacctgaggctcagagcttaagactttgtcttcagactttggtcaaaggaatagaagaaatagcactgttagaaaagtgactacccaaagttccttcctctttaggtttagagtgaccctaaacaaggatgcccctctggccacctgggaggcagggggaaggcaatggctggcccaagggagctgaccttgggaagccccagtactgagcctcccccacagcagtagcccatctccggaacagagtgtgggggcaggtgtccccaccccagagaaaacaccccccatccccacctcagcacaggagccagtgggacagaatgatacttccaggcacctgggattccctcctggagccccagtgcaaggtcctatagctttagctgtgactagttgctcacccacaggtatctctttctctctctctctcaatttctctctctctcattctcctgcatccttccaatgttggcaaccttccaacattgccaagctccttccccacgcccatccaggcccctagactcactttagctgggaccggagagagcagcatccaccttccctcctggggcctccagcagatctgagccaccccgaggtgctgagcagcagcacgatctcctcctgttgctgttagtgtgaccgccaccgccgaggcaattcctaatgacagagcaggtcgggaggacagcgcgaggaagtgaatgtcgcccaacccgtttgaggccaggaggctttggcgttgcccagggggttggcagctgctggagtcaggtgatcttgctgaggatgccaggagaggaacccccagcttgaggaggagcccaggggtgggtgctcaggagagtcagagggtctcacagtggaggcagtgacccaggacccctttgactgaggctccccaggcatgggtctccctatcaataggaaagtcacccacactgtccttcccaccctcctggacccatttctgtgatccccatcttccccccacacccctatcctcacaccatgcacagggtgaaggggtcagtagtagatcagcctcgggaagtctatgacactcagagtcatatatttgtgggatctgcctgtgtgcatttgtcattcatggaacacccaaaggcgcttagaactccaaagacccagcaccactggcataaagaacgaggcgagtaagaccagtgaagcaggaatgcacacagatatggaaagaagtccccggcatcatgataaatggaagcaactttcagaacagcctgtgtaatacaattctatttatgaagataataatacatgatcatattcatagaggaaaagctggaagaaaacacatcagactgttaatagcagttatctctggagagactttctaagttttatatttctgtgatgtttgcattttcaccctgaatgtatgtttcttttgtgattagagaaaaagtcatccactgggtatggtggctcatgcctgtaatctcagcactttgggaggttgaggcgggcagactgcttgaggccaggagttcgagaccagccttgccaacatggtgaaaccctgttgctactaaaaatacaaaaattagctgggcaaggtggtgcaagcctgtagtctcagctactcgggaggctgaggcacaagaattgcttgaatccagaaggtggaggttgcagtgagtgagccaagattgcaccactgcactccagcctggatgacagagtgagactgtctcaaagaaaaagaaaaagtcatcaagaataatggaggaatgaagttcggggaactggaaatcattttggaggattccctcccagtcctctcaggaggtccccaagaaaccagttttcttctgaaaaagtaagttactgggtccaaggcacagcccagcatgtgtgtgaccccataggatgacacaggatgacccctcttctgtccgatcagtcatggccctggcttaatggacaccttgaagctggtggggaggacagtcaggccagtgcactcggccacttcaccatggacagagatccgtgagtgcaagccgtcgtcacagtctctcttgttctttccctgggagttccaggtggtcctagattagcaaatgaaaatgcagtatgcccaggtaaattagaatttcagacaaacaacgaatgctttttggtataaatatgtccagtacaatacagtacaatatctgggatttttttttttctgagacagagtctcgatctgtcacccaggctggagtgcagtggccacaagctcggctcactgcaacctccacttcctgggttcaagcgattctcctgcctcagcctctcaagtagctggggttataggtgtgcaccaccacaccccagtaatttttttgtatttttagtagagatggggtttcgccatgttggcaaggctggttttgaactcctgactttaggtgatctgcccaccttggcctcccaaagtgctgggattacaggcgtgagccactgtggcggccctctgggacatatttatactaaagagtattccttttctatctgagactcaaatttaagtgggcattctgtattttcatccagcaagtctaatcccagagggctctccaaatttctctccttccactggcatctccaaggggcgcattgcaaagttctaagccccttcaacaat

SEQ ID NO: 1244622 - DNA, 4001 bp, Homo sapiens
cactcatgctaccagctgcagcaatgcacttcaaccatacatactgcttccactagctaataccaaatgcaggttctcagatccagacaaatggaggaaaagaacatttatgcttccgtttcagaaagccaagtcgtagttttggcccttcctttctctaaagtttattcccaaaaacaggtagcattcctgattgggcagagaagaggatattttcagcccacatctgctgcaggtatgtcattttctcccatcttcactgtgactagtaaagatctcaccacttctctttggaatttccaactttgcttgtgattgaatgtcacttcgtgaatttgtattatgtcagatcacttggcattgctcttccatatgcatcaagttgccaggcactaaacccaatgttcatgaacaaaacaaggcaaagtaaacagctaaggccatgcatcaaaggtgagcgtgaagaactccagctcagaaaaggaagggatggccctttttaagccataatatgtgttaatggtaaatgactaaataccacaaggagattttttttttaatggaggagaagagggaacaataataaaaatttcaggccacacgttgatgtccaaagatgctacaatatgtatttagaaaagtttccacattaaactgtatttcagtgtggccaggtttctaggcccactgcatttacatacttttcatgaacttagacataccataattttttgtgttttaccaaaatttgcctataaattaggtgctaatttatgtatcttcacacattacaggataatcctgagcatcacaaccttttccaactttcataattagagtatttgaaaaggttagctttccaattatttttcccagttaaaattcatatttccatctccattttcttttctctcttaaggattcttgattttattctccagctcggaaatgccgagcactttgatttcccatgagatgcttttggaaactactttaatatccagattttatgatctgtaattttctaggttcataagaaaaacaaaggactattcctcacatgtatccaaattccctgagggggtagggaataaaaggtagggggagcagggaggcgattaaccacaggctctaggtagaataccctgaaaaaatacaaataatcttgagtagaatagatctgtgctatttctaggcactatgaaaatttgcgtctttgtacaaacacagaataagatttttaaaatgtgcacccttaagtaaatataaatacacctcacccacaaagccctctgtgttccaaggtcaagtttaaaaatattataaagtcttcagaataagtgctgaaaagccaagcaattgaacatgaacctgttatatggattcttttcttttgctgaggcagagggaggggggaaaaaggaatttcaaaagaaatctgcaaacctgttgcgctgtcgggcccactggaatccacgggggtgaaacaaattcaattatgcttttacagatcctgctcaaaaaaggtttcaactgcttaaccaagtacagctcattcttccaccttcttactctgcaaccaaaccaagtgccccatactacaggtaggtgccgagaaattccgcagcctgaaaaaataatccatgcaggtcaaaggcagaaatttactccgggatgagagatgctgtcccctagaactaaattaaacacttacagaaaatccaaaatcatttctgaaacctccttgctaacaaaagttctttttttctccaaacagcatataaaatgatcaagtcttgaaagagaaaagaagcaaagtagcaaatacatcaacaattcactatcagaaacacataaaatcccagagagagagaaggcagtatctctgaatcatggatggacttggaaagttcggaaggattccgagtgcttcctttcagaaagacaattctggatcaactccctagagcaggaagcctgtggtttgtaattggtgttctagctctgactccctcccctgggactgcaatcacgctctctacctgctgacaaagtgagggtggagctgctagaggcaaccactccccaccctgcccccctcctcctggtgctcacacacaacacttacttaaccagacccgttctttcgctctcccccctccctcagctcctctactccctctactgagccacagctaaactgcatccaattcgatcccgagtacctttctctgggtaagcaagctaccacatgcaaatcagggccactcaaagatatctaagcagactctgcacccaacagagcatagatgatggtatgaggaaataaacagaaaaaaataaaggtaatccggaagataaaagaatggacacaaggttttgcaaatataagttcaaaaggatttctgctcattccaagtttgagtgtctataaatggcagaaagccagaataaagtgatcctgtgttttagtacttactgatttattgctgcttatgtctgctaccctgggaagggctctgtccattttatgcttagcttttcttcagctcttactaatttaaattcagtagctctgtctaaactgtgcctatatggaactttcaaatcaggttgatgtcagatgtctggaatccaactgttattttcttttcaatctttgggaggtgaaataatactatggatcagacctatgccttcaatgtaagactccaaataagtccatgtcataaatacaagccaaagggtaaaatatgattaatgagaagaacataggcaaaaagaaaatgaatttctggctaattaccacattcatgaactataatccttattactaccctgccattagaaataatacaacagtttctaatacatttataacatttgaagtttcaaattaccagattatatttgactgtggtgagacattttatttctgaaccgctgccataaactttcaaaattatacaaatgaacaacaatgtggatatagttaaatctagtgaactgtacacttaaaaatggttatgatagtaaattttatgtgtttcttacctcatgtaaaaacgaatctctgatcatctgtaaaatgctgatgataataattacgataggtctgttgtaaagattaaatgacataatgcctctgaaagcaaaaaggatgagtagcctattgaccttcaacattgtttcccctgtagataaggtttatgacagtagtttcagaatttcagatctaataactaacctagatcaaagacaaattcgaaaataaattttttgtttatttttgttgtttgagacagggtcttgtgttacccacgctggagcacagttgtgccatcatggctcactgcagccttgaccttcatggcctcccacctcagcctccagagtagctgggatcacaggtgcgtcccaccacaccctgcaaatttttttttttttttttttgagacggagtcccgctctgttgcccaggctggagtgcagtggcgctatctcggctcactgcaagctccgcctcccggttcatgccattctcctgcctcagcctcccgagtagctgggattacaggcgcccgccaccacgcccagctaattttttgtatttttagtagagacggggtttcaccgtgttagccaggatggtctccatctcctgaccttgtgatccacccgcctcggtctcccaaagtgctgggattacaggcgtgagccactgcgcctggccaacaccctgcaaatttaaaaaaaatttttgttgggccaggcgtggtgactcacgcctataatcccagcactttggttgaccaaggtgggtggatcacgaggtcgggaatttgagaccagcctgaccaacatagtttaatttaacatagttaaactaaaaaataacctacaaatgggctttgcctcatctattcctgcttaaaacgtgcaaaggaatgaaaagacctagccctagtaattaatacacacacttaattgacagaaagaag

SEQ ID NO: 1244623 - DNA, 4001 bp, Homo sapiens
attaccaataatgaaagaaaattaactgaatttaggaatgaaaacaagtcaatgttttattatgtcctacctgttatatgctgcataacaagtttgacgctcagaatcaaaatatatggaagacttttttgcagccacttgaagagatagcggaattctgagaaggagctactaccatgatctccagattctgcggcagtatcatcagtcagccttgcttcactgtgggagtgaccccgtaagcgactgtgtacacatccatgggcacagctatggacacctgaccttatatttctggagcttgcattttctgcacattctttaggtatggagtttatctggatatgaacatctccagaatgagggcaagaaccctctcctgtcaatcttgtgtggacacactgaggggttgaggcatcctcactgcttccagttcctggaggactgtgcagttggctacgattggcttgcatggcccttaaatactttttctctgacccagatgtctttgcttcaggcctctgtctcctaaaaaatcaaataaaagatattctaagtaaacaggcagttaaataccagcagtatattcctcactgggtatcctttattcactaaaggagtagcaaataatcacaacagatgaattttcaggttatttatcactggactcctcccttctcccttaatgccaaggctctgctgccctacacaaatgatcttttagggaacatttgcaccaaaaaaaaaaaagttgagctgcaaatgcttccagttctctaatggcagaaggcatccgcaaaacagtcatgaagtatgggtacccagcagatgttaatgagcaccagtcctcactgggtactctggtacatttacttttcccaaatggtgcagtttcatctctgatgtagattctacatcaaagaagtttcataaggaagagtgagccagtattttttaatggttggaaatgttaggaaaaaaaacaacattaaatcttaatgccttattatcatcataggtaactaataataaacactgcacttaggtgacctacaaattagattttctgctcaagcagctttcccaaagctcataaagtttccaataattaatggtgccaccaataatattacctccccgcgcaaaagaatgttacctaaatacatttaaagcatagatactttggagagtcaccacgtaattgctaggtaactctttagtctgaataagcagttacacagtccgcccaataaaatgccaccgtcggtggtgtgtgtattacggagggaggggtgtgaggaaagaggactctagcagagaaagatctctctaataaatgatccagtgtggacctcctagaaacagaagaacagagtcggaatcccagctgacaaaacgcagaggctatcccacactgccgtgcttttcccgtttgtctaggaggaggctagagttaacgtcagggaatgttctgtgtcattctatttcactcccaggactgaacagtggtgcagtcaccgtgtctggcggtttgggtttcagtgcttttcactaaaggctttcaccgaggccccgacgccacgggtgttatttcgtcaaaactgaagagcgacgttggacagcaggctttcagtgtcttttctataaataacatagaaccctcccactttccttcatgcacagacaagaaagaggagaaaaaagggaagaaaattcaacacaactcttccggaatctccgagggcagagttctccacccacgtccgagcctcgagtgcctattctccccagagccccctgcgccgcggcccctcgccgcctcctcctctgcccgcttcccccaggcctaacctctcatgaccagaagcggacggaggtgtcgggagcgacagcaagaacagcggcatacaccgcctccagcccttcagtcggggccatcaaccgcaaaccccgcaagctcttctctcagcccggcggcaacggcggcggcgcgcgcgctccccggacgttctcacgcgcgcgcgcgcgccctgccccggctccacctcctagccccgcccccgcaccgcgccgagtggagagctcacggctgccggggtgttttggcagcgagaacaagcgagctgcgcctgagaacggccttcaggcctggcgctaaataataagtcgttgttatgtgttatgtatttatgtggcatccaccacacgcctccgagatcctgggcgttttgaggttaaaaatgttcaggcttggagaacctacccctggaggagtgttagggtttccgggctcggatgtccgcgagcttgacgcctgacctagttgtgtctgtctgggcggtgacgtttggtctgagctgacctttcctcacaatcgtgaatttgggctgtgaggatcaggccttgtcagaacccgagatgagaggagagaggtgcggagagtctgcgtggggtggaagtagaagttagagttgaaaaacctgtcttgcgtggggtatagaggaccctactgccctcaaaataattatgttaatctaaaactgttctaaaattaaaaggttattaagaaaacgaagtttaggtcgggcgcagtggctcacacctgtaatcccagtattttgggaggccgaggcgggcgggtcacttgagctcaggaggtagagaccagcctggccaacatggtgaaacccgtctctattaaaactacaaaaattagccgggggcgttggctcacacttgtaatccccgctacagatactcgggaagctgaggcatacgagaatcacttgaacccgggaggtggagtttgtagtgagccaagatcgtgccactgcactccagcctgggcaacagagtgagtgagactcggtctcaaaaaataaataaataaaataaattctgttaatctaaaactgttctaaaattaaaaggtcattaagaaaacgaagctgaggaggggagtggtagctcacacctgtaatcccagcactttgggaggccaaggcgggtggatcacaaggtcaagagatcgtggccacatcctggccaatatggtgaaaccccgtctctactaaaaatacaaaaattagccgggtgtggtggtgcgtgcctgtaatctcagctactcgggaagctgaggcaggagaatcgcttgaacccgggaggcggaggttgcagtgagccgggattagccactgcactccagcctggcaacagagcgacactccgtctaaaaaaaaaaaggtttaggcctggcgtggtggctcacccctgtaatcccagcgctttggaaggccgaggcgggaggatcacttgaggtcaggagtttgagaccagcctggccaacatggcgaaaccctgtctctactaaaaatacaaaaatcacccgggcttggtggcgggcgcctgtaatcccagctactcgggaggctgaggcaggagaatcccttgaacccaggtggcggaggttgcagtgagctgaaatcgtgccactgcactccagcctgggcggcagaaggagacccccacctcaaaaaaaaacacattggctttctttttttgttgggggtgggggtaggggtggtcggcggtggtagaaggcatacttaagtctctctgtgcttactaatttaaatctttctgacagatttctggttcagtaagggtgagagccaggctccagactatagtgaattttccgaggagatatgtgtaagtattctaacatttcaactatgtcgtggatatttttaaacttcaaaatgtgtgaacatttaggaaacaggaaaaaaaacagaatataacataattcagccacagccacaatgcagcaccaatatgtattagtacactgataattttagtacatttggtacatttgtaaatttagaataccaaatgtagtgtttaaattctcatcttggccagatactacggttcattcctataatcctagcactttgggaggctgaggtgaaaaggtcgcttgagcccaagagatc

SEQ ID NO: 1244624 - DNA, 4001 bp, Homo sapiens
ggttacagagacaagagatggttccccagaatctcctctctcagcagttcaaggattcagttttcatatcttaaaactcccatgtcaaaaacgtatgaaaaacttatcttctcatatttagaccaaagactttgtaactgctaatcaacatcggagttacataaggttaagtcagattcagccaaatgaaggaacagactagaagacaaggttctctgtttattgggctaaacggggcagtaaattgtggcttgtacctcgcttcttagatctgcttctggaataagcagtttattgacagttatcaccacattggcagaggttttgcaaaaatgaagggctcaatctttcagtaaacgctttcttaatttttaatctgacatagaaagttgaagaagtaatctaaaaaatagaaggtttgaggaatagtggttcttcctagagaccataaagagccacaacacaaatgatagtgaaaaacgggtttcaatttccattgaaaatactctaagatacacaggtttgagaattatatttttctaattgtaacattttgaatttcatttcaatgctgctgtcctaagacaagtatgagaaattaatcctaggtctccacaccttaagatacactgtgtaaggccaggcatggtggctcacgcctgtaatcccagcactttgggaggccgaggcaggaggatcacctgaggtcacaagttcgacgtcagcctggccaacatggtgaaaccccacctctactaaaaatacaaaaatcacccgggcatggtggcagacgcctgtaatcccagctactgcggaggctgaggcaagagaatcccttgaacccgagaggcggaggttgcagtgggccgagatcgcgccattgcactccagcctgggtgacagaacaagacaaaaaaaaaaaaagatacactgggtaatcactaacccattattccttgtggcgttacgaggtcggaccaatccttgatatcctcaaatttcaccttaatgaggctgacacctttcagcttatcgactggcaactcctttaggtattctagacggctaaagaagaacatttttggcacagctccagccttgagagcgtctgaaatgagcctgcgaccttccagcaggatcttcccttgtttttcccgaaatggcctggactttactattgtcattacactgctgtagatggaaataaaaaaaaaaaacaggtaactatcaacatccttgttactgagacacgcttagttgtaacagaaataaagagctacggagagggccgggcgcggtggctcacgcctgtaatcccagcacattgggaggccgaggcgggcggatcacctgaggtcaggagttccagatcagcctggctaacatggtgaaacaaaaacaacaacaaagagctaaggagaaacagaagctaattccaaagacgcttattcggccctctgtgcataatacaaaaaccagcgggctgtactggaagaagtcctccatcggaaggaggttaaggttccgctgtgcgacgggaagggaaacgagaacattcgacaggctcaagaaccacatcacctcagcctcctgtccccgggataagctttatcgtagcgaagcccagactcttcccaggtgctgggagcgcgggatgcggactcctcgagcggttgtttctctcgttgctcctgggcactggcctcagatggtgccttgcggggctgcttcccaggagcgcgcttctgttccaccacctctccggaaggaaacaccactttcactgggctccgccgcagcgcccggacccagcgcctcgcgtcaaggtcccaagcctggaccacctgcagcaacggtcgcacgacaaacctcgcgggtctcaccagcgccgccatgttccctgagacccgggctgcgtcacgaaagcgcgccgtcggcggctagtgacgtcacggcccgtggcgcccttcgtggactgggctgtacggtgcgcgtgacggctgcgtgcggcgggaatcatggctgctcgcagagctctgcacttcgtattcaaagtgggaaaccgcttccagacggcgcgtttctatcgggacgtcctggggatgaaggtgcaggccggggccgacaggggctggcgcgcgaggctggaaccggcgcccgagccggccctggcggagggaggggaaaatgggtgtgtcgtgaacctaagccggagggtgtccgaccttaggccctgcgcggtgttcagcttcaggagcgtggcgagttgccgttggggatcataggccttggagaagggcctaacacgattagtccccgcggtgtgcccacgcacgtcctttcatttaagccactcgtaaacgtttattgagccccgcccttgtggagcttaccgtctaccggaaaagacggtaaataaaatgttatataatgctttctagttaatatttgtgttttccggtttggagcctttgatgtagataaaatcagcgtattcagagttctgcttctagcaaggctggtctgaatagtccgtttcggatactcagtctctgaatatatgctccaactctcaacccatctgcttttcaacagcacccagaagcggtctgtctcgggtcctgaggagctgttatttgcaggattcagttggttggggaactgggttttggggacctcctttgataagccagggaggtagggaacacaccactaaggaagacttgaaaggtgcaagagcgcggtttagtgtatagacggtgcaatagacggggatctgaattcgtcaggtcatttttaaaatatctgctattttcagggtactacgttgagttttggcaacaaaggtgcaaatgaccctgatatatatcctccattagagctcatggcctgggttggggtgggagttggaactggatttgtacgtagatgatggtaatggaagtcagaatttgatagtgaaaaaccaccaaactttcgatagcagaaaccacagagctgtcccttgttagtatttcctcgtcgatcaaaaggttgttgcaaagattaaacacgtgccggcgcggtggcccacgcctgtaatctcagcactttgggaggccaaggcgggtggatcactggaggtcaggagttggacaccagcctggccaacatggtgaaaccctgtctctactaaaaatacaaaaattagccgggcatggtggcacacgcctgtaatcccagctactcgggaggctgaggcaagagaatcgcctgtatctgggaggcggaggttgcagtgagccgagatcgcaccattgtgttccagcctggatgacgaaagcaaaactccgtctcaaaaaaaaaaaaaaaaaaaagattcaacaccttattatatgtatagtatttaacatatcggtaatagtagattatataagtgttagccactattataaaaatacaaaagaaggagcggttttccaacctgggtgatgaggaaataattcatgtagaccttgtattcgagttgacttttttttttttttttttttttgaggtggagtcttgctctgtcgccaggctggagtgcagtggcgcgatctcggctcactgtaagctcagcctcccgggttcacaccattctcctgcctcagcctcccgagtagctgggaccacaggcgcgtaccacaacacccggctaatttttaaaaatatttttagtagagacggggtttcaccgtgttagccaggattcgagttgacgtctaaagataggatatccacaggtagatgagaggaggagctacatagtaaaactgaagagccagtgcggagatggcacatgtttgcgaagccgctggttttatgtgcctttagttgaggttgcttagttgaagttaaggagatgggatatcaggatggacaggtcggcattgcttctaatagtatcttgaatgctatgctaaagaatttggattttatgctgcagtaagatgggagctcacttatgttcttaaacaggg

SEQ ID NO: 1244625 - DNA, 4001 bp, Homo sapiens
tccagcctggggcggtagtgggggggtatggggagaaagagtgagactctgcctcaaaaaaaaaaaaaaaaaaaaaaaaaaggccgggcacagtggctcacgcctgtaaccccaacactttgggaggccgaggcgggcgaatcacaaggtcaggagatcgagaccatcctggctaacacggtgaaaccccgtctctactaaaaaatacaaaaaattagccgggcgtggtggcgggtacctgtagtcccagctattcgggaggctgagacaggagaatggcgtgaacccaggaggcagagcttgcagtgagccgagatcgcgccactgccctccagcctgggcaacagagcaagattccagctcaaaaaaaaaaaaaaaagttcaaaggccccatggaagaaggtaggagtatggaatataccagaaatctaaatttaaaaaaaaatgtgggggtgactggagaggtaggctgagagtatgctgtggatgggaatggtggcaggaacgtatgctgagtggaagtcagcagctcaggcaaaaaaaaagacggtgccagtatggatggagagaagccagtgggcttgatagatctacgcagaggcaaaatacacttcacttcgtgagggactggatgcccaggtaatggacaatataggaggaatgatttctcaatttctggttagcactgaactgaatagataatggtgccatccgtggagatagggatcaagaggcccagacttagaaagataaagaatttgctttgggatacgtatactgaacttaaaaccctctgaagcatggaataagcagacagatgacggaagtttgtcttttagagtaaaggtggctctgtacaaagaaatttgtgagcaactgacatatattaatagatggcaatggaattgccttggggccaggcgcggtggttcatgcctgtaattccagcattttgggaggccgaggcgggcggataacttgaggtctggtgttcgagatcagcctggccaacatgatgaaacccagtctctaataaaaacacaaaaagtagccgagtgtggtggcgcacacatgtagtcccagctactcgggaggctgagacaggagactcacttgcacccgggagacggaggttgcagtgagccgagatcgcgcctctgcactccagcctgggcgacagtgagtgtcgcccaggctggagaaaaaaaaagaaattgcctcgggagtcaagagggcctagagggagccttgattcaacaaaaatttacaaagagggacttacaaataagacggggatagacctgccaagctgagccactaaaaaccaaggaagagggtgtgacctgaagcaagcagggcttaaacgcaaacgctgctgagaactcaggtaagctgaaaacggaaaagggctggatttagcaacttggaggccactggtaccttcagccagggttttctacagcgatcaaagggatgactggagtgggttaaagagttgatgaaaggcgaggaaaggaagtggctgaaaccagacaagaagtttggctgtgggtggggaaaggagaagagacagaaagtgtccgcaggtggaagatgcagagaaaggcaagcgtttatttagtttgttcttacgtaggaaaaatgtgagcatgttttaaagacgatcgaaagaatgctttgaggagggggcgatgacactagagggacgcccggcgggtccccaccgccccccgccatctcctcccctcgcgttcatcccccgtcgccccgggctcccctccccctctctactccgcgaggctcggggccgcagccaccccggaccgccggcccagcccccggcacctcctcaccgcaatggccccctcgctcagttggccgaccatggctccaccgccaagacttccccgcggaccccgcaacagctccagcttccccacccgggtcccgcgcgctgcgcagttattggcccgagaagttgcgcgcaccgctcccgcccccgacgtgcgcgcggctcaggggcgggcccgggcgctacgcagccgccgcattggccgaggcgcggcccacgtgacccacccatggtcccaagcgaggcctggcgcgggacgccggacgcggtgcggggcggagcggggcgccaaggggcgcgccaggagctgcgcgggcgctgggagggagaccagggcgcagttccgggcgcgtctgagcggttctcgaggcgttctcgcctcggtctctggcgagtgcacgggttggtatcccagaggaggttaaagctgttccttgagacctccgctgctaaatagagtcgcagtagtgacccgattcgtccagcaacgcggggctgacttcccgcctccaagccctgagcttggcaccgtggcggtggggggtgggggtggggggtctccgaaagggaatcagacccggcccccgtccttagagaagaggacagtgtgtgggggcactttatgccgtcagtaaccccacctccaggtagacgtggtacaggccccaagggtgttggaatcacagctgggaaatcagggacgccgtcccggaggaggtgccatttgagccgagtcgaagaacgtgtgggaattttccaggtggactccataagccagggtagggttggtccggaaagcatgagtagcctatgccaaaacattggagagttgaaatagcctggcaagccggggatagcaatgagttgttcagtatgcaagggtgcatgcagaggagtaagtgacacctgagaattagaaagtcagacaagggtcaagtaaggatggttttgtcctgggcttcctggtatgcttggagtagcgttgatgaatttaagggcagagcactgacttctgtctcagtgttggaggctggattgaaagtggggagtggtgccaatggcatggacattaattataacactctaggaagaatgccagacgagatggtgaggacttaatcagaacgctgaactatgtaagagagggaaataccttgttaaatgaatagttgctggggtgggtgagaaagaaaaatctgggatgtgtctcagagaaactagagagggatcaggccgggcgcggtggctcacgcctgtaatcccagcgctttgggaggccaaggctggcggatcatctgaggtcaggagttcgagaccagcctggccaacatggtgaaaccccgtctctactaaaaatacaaaaattagccgggcgtagttgcgcgcatctgtaatcccagctactcggaggctgaggcaggagaattgcttgaacctgggaggcggagggtgcagtgagccgagatggtgccactgcactccagcctgggtgacagagcaagactctgcctcacaaaaaaaaaaaaaagaggatctaagagcacagatggtagctatctagtctgcttcgtctttgtataaccatcacctgcatggtgcctgtgacaaagtagtctttcagtaaatatttctgaatggaaggatgttgagtgaattgctgtgagaaaatatagatccttccttagcatataaactagaggaaaagaccacaagaattgattttattgtttcaggcttccttgaatgaaatcttgattttccttttttttttttttccgagacagagtcttgctctgtcacccaggctggagtgcaatggcgtgatctcagctcactgcaacctccgcctccccagttcacgcagttctcttgcctcagcctcccgagtagctgggactacaagtgtgcgccaccacacctggctaatttttttgtagttttagtagagacggggtttcactgtgttagccaggatggtctccatctcctgacctcgtgatccacctacctcggcttcccaaagtgctgggattacaggtgtgagccaccgtacctggctgaactcttgattttctaaaattgtgcatttgtaagattcctattttcttactcattttatagatcaaaagcagcatggatctgcctgtgg

SEQ ID NO: 1244626 - DNA, 4001 bp, Homo sapiens
tcatctagacaagtctaacattaagtgtagaaaagcctgggttaaaggctgttgaattctaaatggggttaggggaatggtgggtttagaggactcaagtaaacaaataaaagaggacacgagccgttcttggtggtgcagtccccctccctgaaaacacatagcccagcctgacctgagccaagtcttctggacaattctccactgactgcaaagcattccactcttcttccatcacctcttgaactagaaagctgttctgagaattccctggcccactgcttccagcctggcggtacctgtttaggagcctgtcccggctgtttctcattctctccaggcatctctgggaaaaaagagcaagattgggggggaaaaaaaaagcatttctatttttaaaaaacactcttacattagttgagaaaacattaaagaaagtttatagacacaaaatttcaatgataatactaactagtgttacttttgcatattcctctgtagagatacataaaattacaatgctttgtacacgtatttacaaagaaccatattttttattctagcttgccagtttccttaatggttgtgtgcataatatctcagcatccaatgtcctattacagaacatttatattccttccaaattcttgctactctagatatggctgggtaacggccttcctgcacagcagcgtttctgaactcagggaggttttgtcccccaaggaacatttggcaatgcttggagacatttctggttgtcacaattctagttataggactattagcatctagtgggtggaggcccgagacgtggcttaaacaaccctccacaacatataaatatctccctcaaaatgtccattgtcaaggctgagaaactctgctgtatctgctatctttcttgcgtcgggttactttcttggacattacttactaataaccacactgtgttcagaagaggccagaactgaggtggagccctcttctaagcctcattttactactctctagaatagaaatcatctctatctcacaagacgaacgtagacaaagtgcctctctcggtggccacctccgcagcaacagtaggtagtgttattgcagaggtgcaaacggtgatgtcctgaccacaatttaaattcaaaacaaaatcgaatccaaaaacaaggctttctaggacttgaccgacccgggctaatcccacactctacagtcagcaggcctgggtttgaccagaccaggcgcgctgcggcacctgctccacggagcagggctaaggcgaaggcagggaagacggcggtcaccgggacgatctagggtagaccactgcacaaaccccatacccacctgccggaaagcctctttccaaggcggcgagcccaccagtttgtacagggagcggcgcggagacctcaacgactccgccatctcctcttcgcgggagacaaagccacaagacccgttccctggaggcgcgcacagacccctgggaggtgtactttccgggtgcagaccgcgaatggatcgcagcgtattctgggaagtgttgttttatcgaccggccccacgtggagacagatttaggcatccaagcgaaatgcgtgaggccagcccgacctgcactgagggaggtaagtcttgagggaaagttctggatgcctgggtttacccagatggaggtgtccaataggcaattagatacacaagtctcaggctctccccaggtgctagatttccagcagcaccaccattatgttgacttctcgtcccgcccccttgggcttcagaaataatggtgattggctttcccttggtgacgcccctgcttggtgggctggcctcgccttcgccccccgacctggcacgagcctctcgagcttccgggccgtctgctcggtgattggccgaaacagtgagtggacggccgcggattggctgtgctcagcggcgggctgagcaactggagtgaggggagcagttgggccaagatggcggccgccgagggaccggtgggcgacggcgagctgtggcagacctggcttcctaaccacgtcgtgttcttgcggctccgggagggactgaaaaaccagagtccaaccgaagctgagaaaccagcttcttcgtcgttgccttcgtcgccgccgccgcagttgctgacgagaaacgtggtctttggcctcggcggagagcttttcctgtgggacggagaagacagctccttcttagtcgttcgccttcggggccccagcggcggcggcgaagagcccgccctgtcccagtaccaggtaatgccaggccgatcttggaagtgaccctcaccgggatcggaaccagtcttttttgttccttgctcctcttggctgtttttcatcttgtggcaggcgttccagcggattgactccgacgctgccatacgcggtcgcggggactcaggctctctcgatgcttacggcctggaggcctgggaggaaggaaagggtcattgaatattcaataaaaatactagtgacggatgagtgctctggagaaaaacaaagcgggctaaaggggttgagaacgagtgggcggagttgctatttttagtttcgtcgagagaaacctgtttcctgatgtgacgcttataataggttagatcgtaactttctcttgcgttgtgcacagcaagtcaggttgcaggtttcaaagcaccacgcttcatgcttgacatggaggaggaagtctctgttaattcttacccccgtaacgcccgctttagaaaataaagccatacccaaaatggggatttttgtttttgattagccgacagcatgtgaaaatgggtgtgatccagaaagtattacacacttgccgtggtcaaatattggtttatggaaatgtttatttgtaatacacagattctcttaaagatgaaaaagagcttggtactcattctaaggtatgacatctgttgtgtgcccggtccaattcttgttaccgagaagtgatttaattttaataagacgctagcaatgcttctgcagttttgaaaatagggcaggagtctacagtctacttatttacccaatttcagttaaaaagaattatgaaggccgggcgcggtggctcacgcctgcagtcccaacactgggaggcagaggcaggtggatcacctgaagtcaggaattcgagaccagcctggccaacatggtgaaaccccgtctctactaaaaatacaaaaattagccaggtgtagtggcgcgcccttgtaatcccagctactcaggtgcctgaggcaggagaatcgcttgaacctgggaggaggaggttgcagtgagctgagatcacgcccctgcactacagcctgggcaacagagcaagactgtgtctcaaaaaataataataattaccaaatgtgcagcacgcagtattctaataacattctatactgctgtgtagcatttgacataatcataacttaattatttataattattttgtgtcttttttttttttttgagatggagtttcgctcttgttgcccaggctggagtgcaatggcgccatctcggctcaccgcaacctccaccttccagtttcaagcgattcttctgcctcagccccccccgcgagtagctgggattacaggtatctgccaccacgcccgactaatttttgtgtttttagtagagacggggtttcgccatgttggccaggctggtcttgaactcctgacctcgtgatctgctggctttggcctcccaaagtgttgggattacaggcgtgagccactgcgcccggctgtttttgttttgttttgttttgaggcaggatctcgctctgttgcccaggctggagtgcagtggtgcaatctcagctaactgcaacctccacctcatggattcaagcgattctcctgcctcagcctcttgagtagttgggattacaggcccactccaccgtacccggctactttttgtatttttagtggagacggggtttcaccatgttaaccaggctga

SEQ ID NO: 1244627 - DNA, 4001 bp, Homo sapiens
gggcaggaaacagcaggcttcctcctcctgtctgaactctggcccagagaggagcttccttcagctggccgcacccacttccccgacaacattccagaacattccatgataggccaggagactccaggaagaggtcactgagtagctcttagcatctcctcccagcccagccaggagaagatgctccccccttctaggactccatgtacaacttctgaactgtacccctgcccatcacccacggcctccccacagagggccaaggctcagcttgtccacctccgacctacctctctccaacgtctctaggctgccccccaagccagtaagagatgtcctgggtggctgggttgcttgtccttggctatggccctagtttggcttcttaaaccctctttacctgggcccttaactggtcatctgcctccagtcctggtatccactacacataaacgagactcttcaaggactgtcaagaaacactcccctcctcaagcaccctcaatagctcccactgcctcctgaaaagttcagaggccacaccctgagactgacggtcctccacaatatagtcccacacctaccctctgttccctacaggactcacctgctgcaaccaaaatagattacaccaagaatcgtacccacatgtctggacctgtaagtacagacccacctcccatctccacctagctgagtctcactcctcctgcaccccgcctgtctcttccatgagcctctctttttcttgtctctgaattcctccagcatgcaatttccaaagcacaggcctccacacgccaccagccatccccacgtggctcccgtacgattctttacttaatatttccctttaaatcaacccactcttttacttgaacaaatttattttcaaaggaaactgtatatctccaccataaatagaaaaaccatgccatatgccacaaatagaaggcagatgaaaaaaaacaagttatgctctaatacacatgaaaataaatcatcaggaaaacatttttaaatgcttgtccatgtgcctgacgaggtaaacctatatacaggttgtaaatggaacagcacctcgagggacaagggtcccgaaacgggcccctgcatgtgcgtacaggccgtgcttacatcctgacaacttcaactgctcctgaccaagtcaactggccacgcggccttccaaaatcttcaaaaatcccctcctgctctaagacgcgtggccttggcactttatgttctgctttctttgtggcccctgggtttttcggccccatctcacagttatctggggacttgtcaccaaatgtgagtatcccagggtagggagcacagagcctgctgcagcccctgagccagtcttgcacgcagcataacacgcaatacaaacagctctccaacagcacgctctggtctgctccgatgcgtggcccccattctctgcctgaccccaggcccatctgctgctagcgcacaacccctctgccccactcccccaaatccatctctgtccactggggtgtttcaaaggaccacacagaaagagcaacggaggcaccagcggggcatgaggctgttctccagccccggctgcctcttctttagaagcagcaggacctgcggcacgaggctgttctccagccccggctgcctcttctttagaagcagcaggacctggggcagcctggaaaagcaagtttccagtcaacgattaaccagacgctctcccagcaaagacacaaaccttttccccggaagttagcaaagttctgtgaaaacccctgcatgaactgggcccctgactccaggaaaacagaggcatcttccaatgtccttggagccatgagaccccgaaacacctaccgggaacagaggggcttcacccagacaggccccaccagggaggaggaggccgctctccctcccaccaccgttgtcgggggtgacccgaggtgttccagatgaggagctgaatcactgggacttaagtcaataagtggcagccaccaggcaggcccagctggagccaaaccaaggcctggattctcctcgtggatgtctggtaaggccccaccacgtaccccagtcacgtagtctctaaaactgaacagatttgggacgcttcctcttagagggcagccctctttgggactgttagtctggccacttttacacatttcaagcattttttgggttagaaagggcacattttctgtatccaaaacagcccttacaggcagcagtggtggtgcacggggcctgcgtcagcatctcatcgcttcctgaagccccgctgcctggagtggggccccttttgggtgtggctcttcaggagcaaggcaaattgacgcacagagaacttgacagatgtgtaaatggaacagcttcccggaggtacctcgaggagggcaagggtaatgaaatgaatgaaatgaacccctgcacagcgagggagcacttacaccctgacaccctcctgcagggagaaggaagatgacaaggatctctctgttgaccttttcatagtgcaaacaagctactgatagaaaaaagaaaatgttttcatgcttaaaaaaaaaataaacaccatcagcaacctttccccatggggagcagcagcaggtgctaccacaagagagacagacagatggatataattgccaagaggctctcaaactgggttccaaggagccaggggtgtggagaccctcttcaggactgtacaggcgaagcagggggctgggaacaaggccggttattataacccaacaaactgggttccaaggagccaggggtgtggagcccctcttcaggaccgtgcaagcagaagcagggggctgggaacaagggggttattacagcccaacccagagcaactcagctttttcctcgtcatctgtcaggcttccaggtaagacttcatttgaagaaaaggtcctgcagtaaagatgttgagaagtgctgatatgcgctgctggttatatgaaagggtggaaggaggactggcacggtggctcactcctgtaaccccagctactccagaggccgaggcgggtggatcacctaaggtcaggagttcgagaccagcctggccaacatagtaaaaacccatctctactgaaaatacaaaaattagccaggtgtggtggcaaatgtctgtagccccagccattcaggaggctgaggtgggagggtggctggagtctaggagtttgaggctgctgtgagccatgatctagccaccgtactccagcctaggtgacagagtgagacctcgccttaaaatttaaaaaataaaataaaattcatgggtaggccaggcatagtggctcacgcctgtaaccctagcacttgggaaggctgaggcttggccagacatggtcgtgggcaactgtcgtcccaactactcgggaggctgaggcaggagaatcgcttgaacccggaaggcggagcttgcagtgagccgagatcgcgccactgcactccagcctgggcaacagagcgagactccgactcaaaaaaaaaagaaagaaagaaagaaagtgtggaatgtgctggaagccatctctgagtgtgcgggaccacacaccacacacataccaaggcctgtgggagacccgcacaccacagccccaggcctgcaggaatcagctggtctttgtcctgctcatgcactccgtgtagaagaaatgcagaagagaagcctcctttgccagggtccagccaggccacgctgctcttcccctggcaggaccacaggtcgggaggaccaagctcagaaacgcaaatgacaccaaatcaagtggagcctcgagccaagtgaagcttctggaaaagagacttgaacccagcagggacaggggctcgatgcagacgtcagagccagaggtgtggatccagagaccagaggccaaagagatgtgataaactatgtcagtgactggagccgaccctggtcagtccctggggcaggcatggcagcaagaggctggttt

SEQ ID NO: 1244628 - DNA, 4001 bp, Homo sapiens
ggggcccaagcacatcacagagtccaaataggccaggccagagacactgctcacattcttggccccacggtctcaaaaaggatggaaacactggaacttatttcttgccttcaaaaacccaaaaaacctctatcttttctttttccttcacaaacagaggttgtgagaaataccctttgtctttgagacagtctccctatgttgcccaggccggtcttgaatttctgggctcatgatcctcctgcctcagcttaccaagtagctgggattaaagatgcctgccaccatgcctggccatttctacattttaaatatatgaaagcacactcaaaagaacaagcctgatacaatgactcctccattttatagacactctgaatgaactttcctaggtttgtaacaagtcaacccaggctaggtgtggtggctcacgtcgataatcccagcactctgggaggctgaggtggatggatgacctgaggtcaggagtttgagaccagcctgaccaacatgatgaaaccccatctctactaaagatacaaaaattagctgggtgtggtggcacgtgccttagtcccagctacttgggaggctgaggaaggagaatcgcttgaacctgggaggcagaggttgcggtgagctgagatcctaccactgcactccagtctgggtgacaaagtgagactctgtcccaaaaaaaataaaataaaatataaagagtaaattagctgggtgtggtggtgcacacctctaatcccagctactcaggaggctgaggtgggagaatcacttgagcctgggagcaggggttgcaatgatcagatggcaccactacactccagcctggacaacagagcaagactgtctaaaaaaaaaaaaaaaagtcaacacaattgtgttatcattaatctgacgcaggagaaaagaaggaagtagggtgaagagacagatcccaggtactcacgggagttggcattggcgatttcattggtctcattggggtctaaccagaccttcttcttgccacagcggaggacactagaggcgagcctcttctgaagcctgagcatactagacacacagaaaacatgattagactctgaaagccaatcctgggcaagaatgaacgtccccatcaagacctgccctttgtgacccacaccacagccgcgaaataagactcttccctaaatcatctttaaggctctgggctatgcagctggcccccttgggtttaagacttcaaaacccacgctatgccttcacctctcggagcctcatgttcgcatttctcctctggaaagtcaagccaaggacttattggattgaataggggggttatgccatttctggtactcagcgtttaaagaatattcgaggtgagtagacctgatttctagtctaggaatgcaggcaagttactctgttttctgggcttatttccctgttttatcacagtaacaagcctcgttcggctattcgcagagatttcctttatgagaggccaaaggagtgaatggagtcaagagttagagatcacctctctcggcagtcggaggcctggggcctacactaggcttgccctacatcacgtgaaagcagagatcggctccgctccgggtgtgccaagcaagaaagggcccacggcttggtcttgttcgctccgtttgctctgctcgcgtgggtcgaccggacacgtgtgcggtgcggcaccagccggggcagacttttcctggtctcagttgctgcgacgctccccgccccccctcactccggaggcccgggacgaaagtgctccggcctaccccaaaccccgggaccggccgctttagggcggcctccatttcatctcccccaaccccagctgcggtcccaagaccgacagtcccttgtcgacacgcgtcagcgcctgatggagaccagctcgccctcacctcatggctgcggccgcagcagcgaaaggaaagagctcgctcgggcccggctcctcccattatctgcgaaggggagagcccaaaccctgctccaatttcgtccgtattcctgtccggttctttcatcttctgccacactaaactcactcatagcctccatataggcctgaaatgataaaagtcaaatatcagaaatcggttttaaacttaaaaacataaaaaagtaccccttccgtagggaaagtggtatagtccgacttcctactagacatgcgcagcaagggttcccaatcacgtggttatctgtaaccggaagtcagctggattgcgcaggcggagtgagagaggttttgctagagtggcctggtgtttgcgggcgttcggggggttgtgggtggatgttttattagctgagaaaaaatcagttaaagaagcgagagagaatgacaacagatatcagacaaaggcgaactcttattcactcttgtagtagattgaaaacccctggagtgcagaatcgatcactaaaagatgttagtgtttttacgccactgcgggtcttgcaagctcttggagggcgggaactagtctcagtctcatttggctcacaactgtactgcggcaggcatggatccgcgatcgaacacacctcagaaataccgcactggctgaatggatgaatgattgcagaaagtaaaattaaaaaaaaaaaaaattgggttgggctcgatggctcatgcctgtaatcccagcactttgggaggccaaggcaggcggatcacttgaggtcaggagttcgagaccagcctggccaacatggtgaaaccctgtctccactaaaaatacaaaaattagccgggcgtagcggcgcgtgcttgtaattccagctactggggaggctgaggcaggagaatcgcttgaacccaggaggcggaggttgcagtgagccgagattgcgccactgcactccagcctgggcaacagagtgagactccgtctcaaaaaaaaaaaaaaagcagtccttttcttctgatctggaacacccaatgtaaaaatccaagaagaacattctggggtttaagaagtctacatctgaattgaggctccaactcatgattggttcctgctgatcaccctatccgtttcatctcaactttcctggctgagaaagtagaagagagagaaagggaagcaacatttatgctacttcctcacaacaacacgattagcgttgccctcattttacagctaaggtaacagattcagaacacagatatttctgattgcaaagcccatacttttgcggttatgccagcctttcttgtctccaaggggcaggtggaaaccctgctcagggttggaactctcctggaacgtttctaatgggcttcatcttcactcactgctccgccttccccaaggtgttgtgatcagaggaatgacagactgaccattcacttgctattagagttgggtgaggaggaggagtcccatagtctcctgtcctgcggaacacagcaaggtggtggccttattgtaaggtcacttgacctggagagggtcttctccatctctcctttctgtggagcaggagaaggggtggagtaggaagggaatgggtcctcctgtcatgagtgaccccttcattgaaacttacagcttctccaaacaccccagcaattcatttaattctccctcatcctcccaataataccaggtgacacagactccacagtaccagcaaccccattttataggagaggaggaaactgatgctcagagaggtgatttgtccggggctatacaaccagaaacagcctgagccaaattggcgccagagtctattgcccagaatctcctattcctcttctctccaccagtcatggtgggtggcatccagatcttggatgtttctccctaaatcaggggtaaaggtggcgcaattctaggtcaaaggtcatgagatctgattttaccagcttctcctctctcagctccatatttcttcctcttttctcatccaagagcagggacctcacccagccccattcctggccttttggaaga

SEQ ID NO: 1244629 - DNA, 4001 bp, Homo sapiens
gtaactgtaatacagggctgacaaatcaacatcacatttgtaaatcaagggatggccaggaactctttagaagagcaagacatcccagggtagagacagattaggcaggcacaggaaaaaagtgcaagcgctgaagttaaaatgcaccaaacaccagaagttctaaagccagacaggacacaagctgcaagtattttgaggcctccccctttaaatcatacacctgacaggaaaaattttgagtggggagcctgagattaagtaatgagcaattagccgggtgtggtggtgcacacctatgatcccagctactcgggaggctgaggcaggacaatctcttgagcccgggaggtggaggttgcagtgaacagatatgtgccactgcactccagcctgggcaacaagtgagactccatctcaaaaacaaataataaaataagcaacgggcagcttgttttcgttttgtaatatatttttttttgagagcccaggaggcggaggttgcagtgagccaagatcgtgccattgcactccagtatgggctgggcgacagagagagactccatctcaaaaaacaaaacaaaacaaaacaaaaacaacaacaaaaaaacaactaaggtatggaagtgacaagatgatggtcccccctccaacacaatatgagcaaaaacttaagatacttatctcacactgcctctcaatggaaaacaaacttgaggccttgaaaactgatccattttccaataaaggaaagcgtccccccactactcatcagtattaaggtgggctcagtgtttactcacccttttttctgagctctggtttgcctttcttgactgtggccatcaccatgtcacccacaccagcagcgggaagtctgttcagccgtcccttgatccccttcacggagatgatatacaggtttttggctcctacaaaagaatgtaaataaaaataaaaaatgttgagggccatcaggccgttccatcagtataacatttcccaaacacttccaaagcccctccctccactcactgcccaagcagttagtccgcaagaacgccttgtcacaccaccgattgaagcaaacaacacatgttgccacttcacccaaaagcgatgttttcactctcccctttcttgacggctcaataggtcattagccacaggcccattgagtgcttttaaaagggggagtatagcaacgtgcaaagacctcacctgtgttgtcagcacaattgattacagctcctaccggaagacccaaggaaatccggaatttcgcaccagaggacccaccacgtcctgtggatataaagggaagggaaacaggataaagagatcacaatctagacatggttcggagttccccctcatactcaagctgtaattcaccgcacatgctttgatagactgtacgctatagattagctcgctcggattttacttatgccgtccccatgtgccacccgattctcacggaaagtagcctatttcttactattaacactctgacatcgaaattaagaaacctagacgactcaacccttgctctaactttcgcaaaacgcaattactcctgcaaggcataaaaccgcagaggtcgcgcaaaccagggcctaatccagtctaacttcaaccccattacgatagccctattcgcggagcgatctcgcggtatccagactacattcacgtcgggatcctgccatctcaactctccagcaccccactgccactttcgagggccctggcagtgctctcgcggtggcctggctctctctctccggcctgaaggagagcaaagcgccccagctgcctagggccaccgctcctgacgaatccgccagccactgcacgacagatggtggaggatcctccagaaacaaaacctcacctcgcttcgacatcttgaacgccggaaaaaagaaaaaaggaagtcgattcaaaggacactgggatatgaactttaacgccccgcccaccctcctcacgtggccggagcaaaaaccggcctcttccgcctctgggcgctgccttattacgtaataagtttacgacgtcgcttttagccctctctgcgaagtgggagttgaggtagaagcgcaagagataggaagtatcttctctacgagcttaagagtagttagggacatggaaacagtgatttgttaacttgctcacgacctcttttgaccacttaatagtgccaggcacttatctgcacactagagaataggaattaaaacacggtttgtgccgtgtgggggttccccaaggaacaaagaaagtgggggagggagggagaacaagctctaaacggtttcgttgaatgtaatacagttgagaagtgctgcagatcattccatctatgtgttcttggtatcataccattctgtattttacatatacagtattgctctatttattgacccgtcccccccaacacacactctttttttctttttttgagaccgagtctcactctgtcgcccaggctggagtatagtggcgagatctcagctcactgcaacctccgtcttccgggttcaagcaattctctgtctcagcctcagagtacctgagaccacaggcgcccgccacaacgctgggctaatttttgtatttttagtagagacggggtttcgccatgttattggccaggctggtctcgaacttctgatctcaagtgatctgcccgccttggtccctcaaagtgctgggattacaggcgtgagcccccgcgccaggcctaattgctcctttcacagcttcagccgccccttattctctgggttctttccttcccacgatacattaattcacatacttattgagctcctactttacagcaggttctgtccagggcgtacagcggattacatcagagaacaaaatagatcaacattcttttccttatggagcttacattctgctggggtgcaggtggaggaggatattagacactaaacaaaagatataataagtaattgcagtatgtagtatgttagatggggatatgtattataaaaatataaatagtatcgcttctcggccttttggccaagatcaagtgtaaaatataaatagtggccgggccttgtggctcacgcttgtaatcccagcactttgggaggccgaggcgggtggatcacgaggtcaggagatcgagactagcctggccaacacagggaaactccgtctctactaaaaatacaaaaattagctgggcgtggtggcgggcgcctgtaatcccagctactccggaggctgaggcaggagaatcgcttgaacccagaaggcagaggcggcagtgagccgagatcgcgctactgcactccagcctgggcgacagagctagactccgtctcaaaaatgtatatagataaatagctctttgaggaagacgcggtcgtaggtgttgcggatcgctgatccgcacgctcctgctactgactcaccgctgttcgccctcgccgaggaaccagtcgctcaggaagccgcgcagcagccatggcttttaaggataccggaaaaacacccagggaggcggaggtggcaattcacgaattcgagtcactctaacgagccgcatcgtaaaatccctggagaaggtgtgtgctgacttgatcagaggagcaaaggaaaataatctcaaagtgaaaggaccagttcgaatgcctgccaagactttgagaatcacttcaagaaaaactttgtggtgaaggttctaagacatgggatcatttccagatgagaatccacaagtgactcattgacttgcacagtccttctgagattgttaagcagattacttccatcagtattgagccaggagttgaggtggaagtcaccattgcagatgcttaagtcaactattttaataaattgattaccagtttttttttctttttcttttctttcttttctttctttctttcttttttttttttgagacggagtttcgctcttgttgcccaggctggagtgcagtggcgcga

SEQ ID NO: 1244630 - DNA, 4001 bp, Homo sapiens
cgagccaccgcgcccggccagccacgagcaaattcttatgcataggtgaggttaagccacagcagtggcttaagcacaactgtaacacagctttccccatttaaagtcacacttgattctaggtccagcttggtggcgggaggggcaggaagacagtctgtgaactgctttcctatatgaacacaatccactttttctgttaagaaagagtagaagcagcaaaaacccattggtactaactactaccatggctctactcaaatctgtgctccctaaaaagtcagttattaccgatagctcaaatactcaagtgcccaaccttctgcccattcccccccaactgttccttgagcagtatgaaaattcgggaaaatgaatggaaagaagcttctatacaccgcagcaggccataactgccaaatacagataatggaatccccactatcaatcaagaatcaatccacgttctcaccctcaaggattgttcccgatagcagtaggagctatgagcaaggaatctctgtattctactttatactccccccaaaataagttttcaaaccgtgaccacatgtgaagcaataattaacctaacaaattttgagagactcagggtttttttttttttgagacagagtttcactcttattgcccaggctggaatgcaatggtacgatctccgctcaccgcaacctccacctcccgggttcaagcgattctcctgcctcagcctcccgcgagtagctgggattacagacatgcgccaccatgcccggcgaattttctatttttaatagacgcggggtttctccatgtcactcaggctggtctcgaacccctgacctcaagtgatccgccccccctcggcctcccaaagtgctgggattacagacgtgagccaccgcgcccggcctctgggctgatcctgccagttttgtaaatgcagcagaaacaatctcctcatacttccaattagagaagcacactggacacaatttgcgtttgagaaaccatcacgcagagtgagtgaatttccaaattaccaatggagaatacccaaatcttttcatgggtacagggggcagtactgacttgtttctcctgggagcgctcttccgaggatatttgggctgtctccggagtcgcagtgtcttcggccgccggaaggtgggtgacgtgcggatcttcttctttttgtggctgtggacacctttcaacactgccttcttggcctttaaagccttcgctttggcttcagctttaggaggggcaggagctgggagaaaaggaaagaaaacgtgggtgcgggatttagaaatcggtcacttccggccccaagaactgcagtgggccaccctggccacaggtgcatcagtggttcctttgaagacatcacaagtgtcaggagattaaaacttttccatcatatgcacgataccagaggcgaaagcgaccaactctaagtaactccagggatacgactatgaaacaaagtagcactgaatgaacgcttgatactttccagaaaatgtcctacgaattttacacataccccatcgcaaaaccacgctgcggagagaggggcgggtaatgtagcccggttgaacatgaaccagaaggaaaatggttaaagctgagggcactaattccttacaggcccggggacatggagctccaaccagtggatgcatgtagcttcccagaaccgaatgtctggccctccctggcggatgatgcctgccgcgttgcccccccccaactccctctaccggaactcagcccacgaggctgggcccacgcggcccacgtatactgcagcgtgtccgaaacgcagggagcagccccggagcagagccctcagggcttagcccagcagccgtgttcccaattcgttcgctctgcggcgcggcaatccccggtaaaccagctgcggccccatcaccaacacacaccttccttcttcgctttcggcgccatcttgtgaaaagggtctccaatgctcgttcccacgggcttatagcgccaaagagcactaaagactcgcgatgctttgtacttagagctgattgggtaatttgcagagcggcgccctctgggaacggtagttaggtttaatttctttttcgtgcgtgaacaaacatgcgccactcctcccctcaaaggcactaaagcttcatgggggttgtagttttttgttttttgttttttgttttttttttgagcgctctgtcgcccaggctggagtgcagtggcgcgatctcggctcactgtaagctccgcctcccgggtttacgccattctcctgcctcagccaccagagtagctgggactacaggcgcgtgccaccatggggattgtagttttttgaagacacgcgtttatttgctcaggccagcggacggcgtagccggctggcgctcgggtctggtcccgggagcttcctatcttgagcaactgccagtctcagggaagaggattgccatgccaggaggcaggaacgctgccaagaggaaagaacacatttggattgactcgggagttagatacagctaagttctagagtgctggagcaggatttgctcggtcgaactgaggtccagagaggaatgtggtttatcaataacacagtgatttggtggcagaaaaaaatcaagtcagggccgggcgcggtgactcacgcctgtaatcccagcactttgtgaggccgaggtggacgaattgcttcgagcccaggagttcgagaccaccctgggcaacacggcgaaaccctgtctctacaaaagaatacaaaaattagccgggcgtggtggtgcgtgcctgtagtcccagttccttgggaggctgaggtgggaggatcgcttcagccctggaggtcgaggctgcaatgagccattccagcctgggtggcagagtgagaccctgtctcaaaataaataaataaataaataaataaataatcgagtcacgagggggaagtgtcagaggaagtacaaggcggccacacctgcccctctttacctgcgacactgatactgtcaagttttactgcgtttcctgataatgcatttgaagttctatgaaaattccacacatttctccaagattcgctagtttttccggttagtaacttcactcacaatcccctgccctaaactagtcttcccttccgtgtcctggtcatctttacatcctcaaattcagctccagacacagagaaaggtttcttaacactcaggttcgcttctcctaaggtgtgtgcctaacccatccccacttgatcctttcttcttccctctcccttcataaaaccagacatgtcccctttgacggtgaaattgattgtgcactgccccctcttctatcctgcaggactttgcacaaaggagttgtccctgggggatagattccaatggggccagaacaatgaacacccataccagaggggagtccccgcctcccagagcggagaccaccccgaagagcagagtttccgggtccacttagcccttctttaacctccctcgagggaacttgatcttcagccctcccacctcacaatctacacagcagccttgaaggaaaagacgccagacttcagacgtctctctcctcggtgggcacctcattctaaccctggcacccccttcgcacgcttcccctccaccatcctcacccccgacctcccagggcagaagggcgagagggggcagactctatgagtcacctcccaggcctggagttgaggagggaagcgccgcctctccttgggccccttctctccccctttcccctccctgctggttcctggcatcgccagatgctgcgcagcagtctccgattccccatcaccaattcggctgggtaagggtccccatgaaggcgcagccgggtatagaggtgcaggggagagcagcctggggagtccctatctggataggctccagcctgggtcggggcggtcctggtgcccggtgaagcgtcaaaagagggagcctgagcgg

SEQ ID NO: 1244631 - DNA, 4001 bp, Homo sapiens
ttttccgggagaatgatttgagtagttaactctggtctctcgttctggctctgcatgaattaaactctttctctattgcaattcctgtctagataaatcggctctatctggacagcaggcaaaatgagcctgttgggtagtcacaatatattgataaaaggattaatcccaaagcaatgttctgattatgtcacctaattatggtcacatcatctgacgtttgaggaaactgattttcgggcaggatccccaggagttggagaccaatctgggcagtaaagtgagacccctctctacagaaacaaaaaaaaggtcctacatgggagcatcacttgagcccacaagagccatgaccacgcaactgcactccagtctgggtaagagtgagaccccatctcagccgggcgcggtggctcacgcctgtaatcccagcactttgggaggctgaggcgggctgatcacctgacgccatgagttcgagaccaccctgcccaacatggtgaaaccccgcctctactaaaaacacaaaaattagccgagccgtggtggcgggcgcttgtaatcccagctactcgggaggctgaggcaggagaatcgcctgaacccgggaggcgaaggttgcagtgagctgagatggcaccactgcactccagcctgggggggacaagagcgagacttcatctcaaaaaaaaaaaaaaaaaagattttcaccaaataatacaattaaaaactgaaaagcagcttacttactgttttttggtccctggctcaactcatcttgccactctttgggagcaagagtctcagaagcatctttctcaggaatgcaatctctcttctaagctaagtgcgtaaaatatccatcaagacaacgagaacaagtagggatacacacctgaacttcatcatcctttcggatgggcatggatcgcacgttgtacttctgtctcagctctttggaaagaggggaagacataatcttccttcgaatgtgggaaggtgcattgaaatgccttttgcgattcttgcttcggtcggaagtcacaaagggattaaacttcattttggctaaataaaaagttaaaaagactcttaaatgaccaaaatctcatccagcttccaaacaaataaccgcaatgattttatcttgatagtctagaatgatcataggcagtgtcatgttgtgcaacttcaacaaaaactgtttgatcggaagggcctatcaaccgaagctcgaaactttttattttttgttttattcgggtgttttctgtatatgtttacggactaaagacttttgcatcaaaaacacttgtcctagttataagaccttttagttacactctcccaactcctcaagtagtgcctgaggaaatcaagactggacttacatctctgctgagcagaccgacaacgcaattctcttaactataacctcacgttttagaaggtacaatcaacgttcatcttctacaggcttaagagtgaatacgtatagccccgccaaaatgaataaggcccaccaacccgaacctggaaaagcctgcacacgtctcgggtcctaaaagcctcccagtgggcaagtgtggtctggaaattccgtgaagactttaccgagaagttacttcgagaccattctctaggaaacgacactacccagactccagtctatttccacaggctcccttccctcagctcgttttcgagttcccaaatccccggtccctccatccatctccggcccggcggcccttgatttaagaaagcaacagataaaaaaccatcccagtctctccttcctggctgctactcggccgacaagagactctcggggtccccgcggtcggaagccaccatgcccaagaacggatggctgctgattacacccgcttgcccgccgaatccttacccgctcccgcttcggtgatggccgcaaaagggaagagaactacacgctgcttccggttctgtaagtttaccaaagatctcgcgagacctatgtctctcggagcgagaggggcgcggagtttgagcgaggggagtaaactgggaaataaatttatggctagtgtcacctagtggctaggaggggaactgcgagggattgcaaaactcccctcctccaggtcctagtgtctcccttccgagacccgggtgctgccgctgaatcctctgggaagggtagtcccggggctattggctaaggctgctcagggtccaactgcccctgggggtgatgaaggaacgagcggccccaggagaccgcccaggagacccgctggtaccttcactcccaggtgccggggcgggggccggcaccccttagccggggaagcgcaggccctgcttctggccgccaggaggcgcggggacgccggccggccggtcgcctgggtccctgcactcaccgtcccctcccgcccgtggcgtgggcgcggccagcgtgccggtactttaacgagctccaccgcgacgccggccaccgcccctgcacctgggcgtctgctgaccgcacagcagggcccgccagagattcagttctgggtggtgaggggccttgcgaggaccagggccaccgatcgccgcctgcccccgcggaaataggtccaaggccgcgtttccaaggcgcccccagtgctgtgggaggtgctggtccagaccacgcttcgaaggagccaggcgagaggaagcctctcggtgcggggagctgcgcgggtttctaaatgctcggcctgtttgcgtccagttcaggaccagacggaagccgtgcgctccctgcaaatggtttcttttcttcttcttcgtgtgtgtgtgtgtgtgtgtgtgtgtgtgtgtgtgtgtgtgtgtgtgtgtgtgtgtgtgtgtgtgtctttttcttctttttgagacagtttcgctcttgttgctcaggctggagcgcactggcacgatctccactcactgcaacctccgcctcccgggttctcctgcctcagcctcctgagtagctgggattacaggcgcccgccaccacgcccggctaatttttgtagttttagtagagacgagggttcaccatgttggccaggctggtctcgaactcccgacctcaggcaatccgcccgcctcagcctcccaaagtgctgggattacaggcgtgagccaccgcgcccggcccctgcaaatggtttctgaggcagcggcagtgcagcaggcaccggcgctgaacggcttctgctgaatgaatgacacgggtgtcacagtgacagaggacaggcgtttcacaagaataccgaagacgtagtgagccttctgagtgtggggacgctcttctctacactttacatcatgaattcttttaatccacaaaatggctctgttgttgctggtattattgtccccattttacagattgggcaactcagccacagagaaatgagaggaacttggtgcaaggttatacaggacccataagtcacagcagaacccgtgcaggctggctccccggcctcttctgggaactgtatatggccccaatttgtgggaacctcatagtcaggactgcccagaggatggtcagcaacgaacatgcgttttcatgatttaaaaatagttgtgttcttaaatatgctgtgaaggaagtagccctagattttattcatcactgaaaaattcagcaagaattcctctgctgcgactcttttcaacaaatatttatgaggcttctttcctgggccagccctgaaactagacactggcgatgcaaaataggtcaaagtttgtgccttcaggaagtttactgtctacaagaaaagatagacaagggaatcaacagccacgagaccacaggaaaagtgctcgctgagccagctgcccttgctgtctctgtgattcaggagcagaagggagctctggggtcagggaagacttctgaggtgaggtcagcattgactggaattggaagaatgttagcattcgctccacaaggcagtaggaattgcttgaaggaaggcttggaggtg

SEQ ID NO: 1244632 - DNA, 4001 bp, Homo sapiens
acaggtgagtaaaattaattggggaagacttgctttcacgcactcacagactttttgaaacctattgtatttatccttgagggtggaacagtggaagagggcagatcagaccccatgcctgtgtttactgtggatggaaaacaatctttacccaacacttaaaagatggatcaaaggcaaaactggaaaccatagccactttatgagttgaagatgaacattttggaaatgatatcccttcctggtgttggaatggctgcaaggtctgtctcattattcaacagagcagggagaagaaatttaaattctagttcttgaaatgctcaccttgtgggcattaggtgattgtagttatacactttcacaaaagattttatctttgatctcttggcgatcttcttcttgcccatggcagctgtcactttgcgggggtagcggtcaattccagccaccagagcatggctgtaggggcgatctgaggtgccatcatcaatgttctaaatgagtaagaattacatttgttattcactgagggcctatttaggccctgtgttagaggtagtgcagtgtccaaaaaatatttccaccctcaggtctccaagatccaccattataaagagaaaaatcacagaaagctatgagaaatgaccaaagagaaacagaacagtgtttatctccatcaggaagcatctggaacggcttactagaggtaagagatttaaaagtagcaacagttaacatttaagaagtacttgctatatgccaagcactgctcacaggacttggtatctattcacttgctccactgctagtgaagtgtacagccaaggttaagacaccacagcctaactccagagatcagtctcaggagatgggagaggggaatccaggggtactccagtgtccccacaacaacaaaacgcagtggtgtatgtggccagagcctagggaactctctcaagaagctacaaaatcatggataagaggaaaacagtgaggggctatgtgacctttctaaaagcaatttcctcctcttcttacagattcccagctgcagcacttcaggtaaataacagaacacctccaaaccttagcaacaggaaggaaccccctatagctggggatggtggcacgcacctgtagtcccagccactcgagaggctgagatgggagactcgcttgagcccgggaggtcgaggctgcagtgatcacgccactgcacttagcctggacagagatcccgtctcaaaaaaaaaaaaaagaaaagaaaagaaaaggaatcccctatgattacttcaaggactgcacatgacaatacctgaaaggcagtgggagcacatagcaagcgtgcaatgtcagccactattactatatatttaaagcctctggtggagaaggctttatgcgttgggagcccaattcagctcacatttgcttttactgtgcttcttcctctctcaaaaactctcccacgttcaccctgaccgtgctcactggctactgccccagaaacaggccttgaattccaagcctgcccgccccgccgcagccagcctggtcccggcatgcaaggacgcagagtcccgcgaggctgataccttcacgatgacagctttgcgtccggagtagcgtccagccaggacaagcaccaccttcccaggtttcatgaacttgcccatttctgcagagagcaaggagaaagggccacttaaaaatccgtaaagccaaagatgcccagagctgactcctgccagcaagcccaggtcttgggccggaacttcagactgtgttcactgtcgccttggtcaaggccgcccgagggccctgctcgcaggacaggatcggatacgtagccgccagagacctagggaaggaatgcacccggcgccgcccggaccttcgacccccaagccgcggatggcagcggattgaaagattcaacccaagcttctacttaccggcagcaaccacccggccctaccagcaaaaaggaaagaaggacacttccgctaacctttcaccccggtgaggagtgacctcacttcctgtcccgcccttcaggctttgccacgctgattgtgtggtgctgagtctcgtgttgcgggcggaagaagctcatgagggaaacgcagggcgcggcagctcaagtattcgaatgaaactttattagcagctccagcagtagacaagagcaaaggagactcctcccggccgacggaagagctgggagggcgactgtgctgtgcgctctggactcagcagctaggctttgttgtagttcctttctctggcgctaggagggggaacacaatctgaaatttactttttctcttgggagacacagggaaaaaaatagggcatttattggtgcctgtcgggggcactgttagctaaagagggagggacaaagatcagtaagggtggctggtccgatagtagtgggttatcagaacttatcaacgttagggtcactaaagttggtatacaaccccccactgctaaatttggttttaaaaaaacaaacaaaaaggatatttacccccaacagttaaagtctagtggtgtcactgacattaccaactagaataagcatgagggaggtagaggagaagaatggcagctgcttaccctgtgccaggtcaggttaatctatttatgcacatcatctgatttggtcatcataacactaagaaatagatactattatctccattctagagtcgaggaaactggcttagagagatttgcccgaagtctatagtggttaaatagtggagctggggctcagcctcaagcagttcaactcctgaacccatactgtttaccatgtcaccatcctgagcagcgattctctcccaggcaagatgtgagcactttatacaagccggcagcctgtttaatcctcacaactctgcatcttgggcattctcctcccatttagacatgaggaaattgcaattcagagaggataaattgcttgtctgaggttaatcctaatcagtggcatagatgggattcaaatctaggtctgaatctaggtctagttggctctcaaactgaattatttcccatcactcaccagaagagtgttttcacatggtaccttatgtgctttccgagtttaagggaaagataaactatctcacagtttttgcttatctgaacctataggatttgtcttgggcaagatgtggaacaaccaggatttcatcagttctctcctgaagctctccagtgatacaattttccctgtatccctcaggatcccattgcaatggcttttgttttgttttttgagacagggtctcgctctgtcacccaggctgaatggtgtgtagcacaatcatggctcactgtagcctcaacctcctgggctcgtgatccccccacctcagcctcctgagtagctaggacttcaggtatgtgccaccatgcccgtgtaatttgaagaaaaaaacaaaaacaaaatcaaagaacttttttttggtagagatggggactcactatattgcccaggctggtctcaaaaacttctgggattaagtgatcctcctacctgagcctcccaaagtgttgggattacaggcgacgcagcaccgtgcccggccccattacaatttttttttttttcagacggagtctcattttgtcacccaggctggagtgcagtggcgcgatctcagctcactgcaacctccacctcccgggttcaagcgattctcctgcctcagcctcctaagtagctgggactataggctcctgccaccacacccggctaatttttatattttttgtagagatggagtttcgccatgttggccaggctggtctcgaactcccagcctcaagtgatccgcttgcctcgaactcccaaagtgctgggattacaggcatgagccaccacgcctggcctccaatggtttttaaaatgtctttttcttatatatttcattttttaaagagatgaggtcttgctatgttgccgggcttgaatgcagtgg

SEQ ID NO: 1244633 - DNA, 4001 bp, Homo sapiens
gcttcaaactaggcagtgaccccatatggtctgaaataaaactgacctgataacctcatctctttacacaaaacactagccaacagtcatcattcccaccagatgctatttgtccccacaggtggtcactacctcaaaggtgacagcctgttttgggtaatggggacacaaatatgacccccatctctgcctacccccaactcattgaaagactctccctgtacaccaaccaccgtctggcaccacggctggcagagcattagagacggctggtgtcttagcccaccttaacaggcctgtcccatgcaacctcacttccacatgtgacctgattctcagtcagctgaaaaaagatgactgggttaaagtaacaacataactcaagacctagcttgtatcaaacacaagcccccccaatctccttcaagtatcacaaaggagtaacacaactacctctcacacttggtgtaaaaatttaagtaagtgggcagcagagattggcacctatccatcgaaaacctgctgtttaaggtttttcattaatcaccttctttcccctgtatgtacaagctgggaaacagacctatgacagtccaacttaaactctgtgactttacaatggtggtaatgcgatatacattcagtagaagccctgcttcaaattttgatcttggcggggcacagtggctcacacctgtaatcccagcactctgggaggcggaggcaggtggatcatctgaggttaggagttcgagaccagcctggccaacatggtgaaactctgtctctaccaaaaacacaaaaatcagctaggcatggtggcgcgcccagctactttgaggcagggggatcgcttgaacctgggaggcggtaattgcagtgagccaagatcgcaccactgcaatccagcctgggcgacagagccagactgtctcaaagaaaaaaaaaaatttttttaaatatttttctggattagataggtatgataccttctgacactggccagcgaccacaggatcacgaggtaaacgaccatactacacagtgtgccgtgctcgatacattacatgcaaatatccagcactttattacaaaatggattttgtgttaagattttgcacaactgcagagaacctaaacagtgtttatgggacgtgtgttttgaggctttcgcggagtggagattccgttccgacaatttactatattatacgaaagaaaactgaactcagggcggcctctgagatgatcgcgattagctaaagatggtcctagaaattccagggcctcaacgtgccccccacaggtctttctcatgggaaacaggatgaaaccactgctcccagagggccaggcacacacccagacggcctaaccgtctcctgcctgacattccggggaagacgctcccggagcggtgccaggctaggcaccgctcttcttgaaccttcggagcaaccacttacatttggcatcctttcgtcgggctgtgagcaggaagtccttgatttcctcaattttccgaggctgcaacacaaaggaagcgggtgaacagagaggaaagagacacgtctcccggcgatggcccagtccaccagcttctcccggcctcaggagatccttgggaggctctctcgccctcgccccggggccccacgagcccaccccgggaaggcgccaggcagggactgtactcaccatggcgacgaggcgcgctgggctctggcgcggaccaggacctgcgggaaacagtcctcggcgttaacacggcgcgggggctggcagcgaaccccgttttcccgctctcccccgaaatatcggccccatcgcactccccttctcctccccgacaccctccacgcggacctggggtccccagatttcacctggcagtggattgccccagattacctttctcacccacgtatcaccctagagacactcacagcaagcagcaaccggggaaaaggacgaaaaagaacgagacttccgtttccgggcagttaaaccctcccaacggaggaaactgggtacggtgcctgccgaggatcaagactcatgtaggcgttcgcacttccaatttcagcagccctgcccccttgtggtcgaagtcaacagtgcagctccaagaatggaatggaccatcctggctgccgccctccctccgcctccctcctctcgctcctccccatcccttcctcctaggacccccgcctcttccccgtccaccccttcctgtcttcccccgcaacccctcagaccccagcctggctttgctaggttttagctcagattcagtttgaagagctaacgcttattctccacggctttcattggacctgcgcaggggcatccacacagaaaattcttcattcaatggcagggaccctcgtgtgcaccttgtagaacctgttgttctggcgcctcacgttttcttcccgtctcctttttggcacctgaacctgtcatgaccagggccctgggctcttctttccataagagggagcgttcctgcttgctgcttccaattcccttaggaattggtgtacaatgaaagcaagttaaggccgggcgcggtggctcacgcttataaccccagcactgggggaggccgaggcaggcggatcgcttgaggccaggagttcgagagcagcctgggcaacctagtaagacctccccccccccatctctagcaataatgataataataataatacttccaaaagctgtcgcagcgctgcccctggctaagtgtctcacccctagggctgatggtgagtgggagtgctcctgctcttgcggggtctcaccgcggccccagaggggagaggtggactcaggagttgaacccctgctgggcagattccccagcccaggctccggccacttcctggggaggcttgggaagcctggggagggcagcgttcctttctccccctaacatcctttaggttagactctgagcaacctgcggttatcgattttatttttatcctccatttttattttatctccaacctccctacaaatgtctacattttattatatttgtttccccaaaatttaataaccacacggcagaatgtaattgcttcgtgcttattattacagagcggccctcctgaagggaaagaacactttgccatgagctttacttagaacttatttaacttaaccttcctttcttcctccctcctgcccttccattaacaagctcaggctgagcaccttcctgggggtgctggagatacaggaaccaatagaccttgctgcagagagatcacaaaaatattgtaataacactgaagagtcttttaaagaagctgaacgatgtctctgcaactgtaaatgtgtcggggttctagcagtgggaaaagttaattggcagaagcctaattttagatgtctgaaggtcggatccgatctgagaagcacgagtgcttcagctctgacctgagaaggattttcccatacctcagagcccggctttgccagcccttcccatctcaggcgatgcctttctggtcttttctaccccactgctcctccacaagcaaccaccctttcagccaagccgaggggcacttttgggcactttctgccctccaggtatttgctctgctgtccactctgatgccaagtgccactggtccttccgagctcagctcccgcctcccctttttcaggcaggacccttcacccttgacttatgttgcttgccgctcatacagtggttccttgcaatcacttctccgtaggctgcgtggaggtgtttaacttttcatacatgcgcaccactctttttatttttaattttttaaaacttttttagagacatggtctccctaggttgcccaagctggtttcgaactcctgggctcaagggatcctcctgcctcggccccccaaagtgctaggataacaggtgtgagccactacgccccaccttaccacttttccttgaaggcaaggacagggctcagcattctgtcgataactct

SEQ ID NO: 1244634 - DNA, 4001 bp, Homo sapiens
accttcctcgttattcttcactcccacccacagcaaaagagagaagaaagggagaaatccagtctctccccgaccaagtcttccaagaaccgcttgagcggggttggcactaggactaagtgtagtgggggatacataggccagaaagcccagccttctctcctccagtgtccccaggtccccctgtccccaacttccagaaagcagagctgtcctctcgctgtccgctagggagtagccagttcttgctgctccacactgctgcaagggaagttagcacctgcaggaggcgtgggtttctgggcagctggggcatcctgtaatgggaggctccaagtcccctgcaggcaactgcgtttggaggccattttctccattgtataataaacatcctgggacttcctcaccacaaagccgccaacccccacccctatgggatgcaacaagggggtttcttccgtctactcatctgtccgctataagggtagggacaaagcaagcccttagaaggggctttggccttataattaaacttttaactagatctagttttcccctctgccaaattgaattttccttgttcacattttcttcgttttggacacagctgactgattttgtttcatctcatattagactcatatatccagtgatttaattaatctcaccagctgtctggctgtcccacaggacctgccttctccgctgttggcgttagaaaacgattccctttgcctttcctcgctctggcctccgcgtggagccccaggatccttgacctgacctgtgggctccccagccaggcgtccacgcaggggctagatgtctcccacggggctcaaagtgtccgccaggagggtacatgccctccgccccgcaacacacacacacacctcacaggcgcgggtgggaagctgcctgaagccctacggctgcagttttattacaagatttctttccaaacgcaagatcaggccaacaagctcagcgactctgacgcttcacatcttcacccactcgcaccgtgttccgaacccacccgcaccaacgtacacacaaaactcccacgcgagcgaccgcagtcccaaattgcatctccatacccactcccaccctgccccgaacgtcttaaaaaacaaacaaacaaaaaaaactggtaagaaccctcaccccacattctcccaccccgcaacgctgcagcgcacacaggacagagccgggcgtccaagtcccttcccgcgcccccgccgacagtctcgccgcgtccccgcccgggcgccccaggcacgtagctgcccgcccggaggcggcggcagagcgcagagagcggggcgagggtccgggtctccggggtccttcttgcagcagcgctggcgagggcggacccagatggcgctcagtacagccccaggatggctgcgcccacgtccttggagggccggcgctcctgcaccagaaagttgatcatgctctcggacttgatgagcaggttgcagcccaggaagaagacgccgaagaccacggtaagcgacagcacgcagagcacggcgatctgcgccacccgcgacacccacaggctgcgctcgtcgggcgccagccccgcggggaccccgtcgctggcggccagcggtgcgccccctggacagcagcccagccacgtgcccagcccgtgggtgcggtttcccagggcggccccggcgccgccgcccacgccgtccacctcctccaagccgctgtggttcaggaaggtcgcgttcatcgccgcgcggcgccgggggtctcggcgcgcagtcccgggtgcactgggctgctcgccggggtccgcgctctcagggacgctccggacccctcggaccggctcctgcggtacggggaggggacgaaggcgggaggctggctgcctgcgcgctctcgggccgcctacccctgggcaccgggcgggaagcgaccgcccggaggagcgagcaacaggcggcgcaggagctggagccggagaacctagtgtgcttagcggtcgcccgctgggttcctcgcgcgcctggccgcccctcccctagcaacggcccggccccgccccgccggtccccgcggcatctccgaggggcgggaatcccgccgcgggcgcagcctccccggagtcccggtgctggagggggtcgggagatccggcagcctctgtccgcgggccggcgaaactccaccccctcctggcacccgctgtccgttcttggctagaaaacctctccaaggtgcccattccaggatttgatacccttagcagtgaagttattccggaatctgccctgactctcttcgcttattatttaagccctcgtaagccttgctagacatcagatgagtcgccgggacccctggcgctgcccactccactggccccgggtctcctgggcggtcctgcctcacagctttcccggggtgaaagctgtcgcggcgaggcgggctctctgcctccttccctacaccctcctctcaacttggtcccatttaactttttttttaaattaaaaaataaattactgtttttttctttcttttttacacaaacatagtcattgtagactagtttagaaaacatgaattaccgaaattactctaaaactttataatctgcctcctagagagtgtcgatgttatcacctgggtataaactcctcccagactttttctatttgtgcctttctctagataacagatatggggatgcaccgttcctgcttactgcctcccaacctttcctcacttaacagcgtaactttccctagcgatggtcctctacagctatggctctgaattgccttggagggtttattaaaacccagattgcttccacctcccgcccccaacctccccaccccaaccaaccccaagagtttctgaatcagatgtgggatggggccccagaatgtgcatttctaacagttcccacgtgatgcacaaactactgagctacaacatcatttttagtgaaggaatggcattttaaggtatggactactacagtttatttaaccaagcttcctgctggatgtctgagtttttctttccttcttcttccttctccctttccttctctccttccttccttcttctttctttctcttcttctttctcttctttctttctcttctttcttctttctttctttctgtcttcttttttctttcatcagaaacaatattaccataaggagccttgtaacaaagtatttgtgccaaaactgatttttctttagattgtattttgaaaaatggacctgtagaatcaaaaagtaggccgggcgcggtggctcacgcctgtaatcccagcactttgagaggccgaggcgggtggatcacgaggtcaggagatcgagaccatcctggctaacaccgtgaaaccctgtctctactaaaaatacaaaaaaaaaaaaaaaaattagccgggcgtggtggcgggcgcctgtagtcccagctactcaggaggctgaggcaggagaatggcgtgaacccgggaggtgaagcttgcagtgagccgagatcacgccactgcactccagcctgggtgacagagcgagactccgtctcaaaaaaaataaaataaaataaaataaaaaaagaaaaaaagaatcaaaaagtacttcctactaaattgctttccagaaatataccagtgtacaatcatgccctgtggggaaagggggctccccacccccaacattgttatcattattttaaaagtctttgcctgagtagcgaaggggggtgggggcaggggtggtttctcacccgtatgttaatttgcatgctttgattgttgcaggagagtaaagaaagcactttgttattgcaataatgcaggcaaaagatgctgcctggagacttgaattccagtggtgacagtgaagtgggagacaaggggatggaaagggcatggcaaattggagtgaagggattcgggatgccccaacacacaggcatcacagagcctctgctccctgttat

SEQ ID NO: 1244635 - DNA, 4001 bp, Homo sapiens
tgtctcaaaaacaaaacaaaacaaaaaaaccagaaagaaagaaaagaaaagaaaagaaaagaaaaagcacacaactcaatacccactttctaaaccgtgtgattttgatttagtcttatttgattatgaaaagaacagtattggtcaggtatggtggtttatgcctataatcccagcattttgggaggccgaggctggtggatcatttgaggtcaggagtccgagaacagcctggccaatatggtgaaaccctgtctctactaaaaatacaaaaattagccagatgtggtggcgcatgcctgtaatcctagctacttgggaggctgagccatgacaatcgcttaaacccaggaggctgagattgcagtgagctgagatcgcaccattgcactccagtctgggtgatagagtgagacccaactcaaaacaaaacaaaagaaacaaacaagaagaacagtattattttaggccacttagtttcttaaagtgttcaaaattctttatatacatcatctcaatcttttgtcaacagtagggcaggtgccagaggagaaaaactgagggtgaggcaagggaaaggaagcccctgtgtaattagagcaaacatctgacgtcattaacccatgtattcaactagacattggaatttagatgctaaactaccaagaggttatcaactgatgatcatttggtccaggatcagtgatttagtatgacaacatttttgaacttcaggtgcaatttgtcattttttgataaatttatctagggaaaaaaaaagttattccataaagattaacaaaccactaagccagcagggtgaaaccaagctatgcattaggaaatacaattctaaatttagcaccctaaattacagcaaggaaagccctcataccaccattcacaagtctctgttcaggcaacttatttctggcaagctaaatcaaggctgtcaactggtttttggtttttttttccacctcaaaattacattaattattctgaaaaaaatacagacatcttcaacttggggaaaggttacaagtgccgtgtgtccttataaatgcttattttaaaaagtcacacggaagggggtaaaaaaaaaaaagcaaacaaacaaaccctggaagattggaagatgcagcagagcccccttgctcccgaaataaaactcctggtggctgtaacagcagcggcagtgctactcccgacagaagttttcagctgtcacttctaacagctgagcgcttcctaggagagaagcgacaggccgagaagagaggtggttgtgggaggtctgaagattcaatacttgaaattctagactcgaagggaaaccctccacacttcgcctgcacttacgggacacccagcaagagcagcccccgtctccccaacacacgctcacgccacccgctccccgccacactcaagtccaacagctcgaggaatcgaccacgcgcccgttctctttccctcttcagatcgctcggggctgcgctgacctggggctaagggtgcgacctgcacctgcgagccccgcagaggcctcacacctagggccatgaccgccccgcccgctcccctgtctcaggccgcgcgaccctcagctcctcaggagcccccctgggtctccacgctctaggacacaccgcgcttcctgagcccgcgccgccgccccggccctgtcacctcgggcccccggggaccccgggcctcaccccctcctccagctcatcctcagagcccgcgtcctctggctggtccaggtctatgtcaaacactcctgccatgtcctcagcttccctgtctcggaagtccggggctgggtaaaagccgtcccgcctccttcgtcgcctcatgggcccggacccgccgcagccaccacagccgctgccgccatcaccggctgcttaggctcagtgcgtctgcgcctaggccttagactggctcctaaagttcagcgtaggagcatgcgtacagggttccgtgaagccaaacagtgggcagtggacatgcgcagaactatcggcaggatccaggcgctggcagaaacatgcgcaaaacaccagccgaagtcgcgcttggaggactagagcatgcgcattgtcagctggagcgttcggtggacagtgagcatgcgtaccatatctgaagttcgtaaattgaaattgaacatgcgtaattaatctttctgaataggaaaaaatatatacacaacaaaactctccgtttatggaacatgcgcatttgttctcagtaagtttttcgttttgaaagtgagcatgcgcatggtgagtaggttggtccgaagtttgaaccggacagaagcgctggtcggcgtctggcggtgagtcgggttacgtgtggagaactcctggggcccgtggggaacgggggaccttttggctttgctctttactagttctgtggccttggaaaagtcaataacctttcagagcctcagtttccttatctgtaaaatgaggataataataaacctactttgccggtttgacattttaagcacagagtctgtctcacaacccacggctcatttccagtgctgcatagacctgatgtgaagtctttatcaaaacttgtcttttcctaggtaaaaataatgaggaactgctctaatgtttcttttgctttctttctttttcaaatggagacagggtctcgctgtgttgcccaggctggtctggaatccctgggctcaggtgatcctcccgcctcggcctcccaaagtactgggattacaggcatgagccattgcgcccggttaatatttcatctggttttctttctccaagctgcatctttcttgctgtcctacctgagctaaacacaaaatctttcttacaggtcttactaaagttaccaggctagactagtggagaaagcgtaagctattatttagaagagagaaaattaatgttaattgaatgtacaatgttgagcacacttctgtgttctacatgttcatgtggtgtgaagggtggtactactaatttcttcaatcagcatttgttttgtcttgtttttatttttttaattttaattttttttttttctggagacaggaggatgtcactttgtcacccaggctggagtgcggtggcaagatcttggctcactgcagcctggacctcccaggctcaggggatcctcccacctcagcctcccgagtagctgggactgcaggcgcacaccaccacgccaagctaatggttgtattttttgtacaaacagggttttgccatgttgaccaggtctggaacagccaggctcacgtgattctcccaactcagcctcccaaaatgctgggattacaggtgtgagccacgcacccagcctctttttttcttttatcactcctcaactgaggagaatgttttgttttaaacatatgtttaggaaaaaagtgattacaaatcagattttggaaactattgagctgtgtatgaatggattcaggtacagtaaatcacaaatcccaaaaccatgtagagagtatgagaacttccttgaatgactagctccttagacaacacagctgttctatctccaatattatatacgtatgtggcattttaaaatgactttttgggccgggcgtggtggctcaagcctgtaatcccagcactttgggaggctgaggtaggtggaggtggatcacgaggtcaagagttcaagaccaacctggccaacatggtgaaaccccatctctactaagaatacaaaaattagccaggcgtggtggcacgtgcctgtaatcccagctactcgggaggctgaggcaggagaatcgcttgaacctgggaggcggaggttgcattaagccgagaacatgccactgcactctagcctgggtgacagaacaagactccgtctcaggggggaaaaaagactttttattgatgtataattaacatacatggcattttatttgttcttattagtaatgtagtggttctcaaagcgtatttttttcgatt

SEQ ID NO: 1244636 - DNA, 4001 bp, Homo sapiens
tgccttggcctcccaaagtgctgagattacaggcgtgagccaccgcgcccagcccagaagtgtaatcttatatatgttcaacatcatatactaaaaaacaataatattccataaacatatacataagcctagagaaaatcaaacattgtaacaccaacttcctcttttataccactgaaatgtgcaaataaaagcagcctggagggagaaaataacttacaaaaagacaaattataagtgtgcatagaggagaagcagtactacccttttgcttttgaggccaggaaatagatgggtgttttatgaaggacaaatccaacaaaattcggctgttttctttcctaccagctgcttgtgagtcactctccacactccaaacaccatgcggacaccctaaaacctgcacccaagtctcgacgcctcataccctaactcacgattaaagaaatcctgtttccaagttacagcaacaggacactacataaaaggaggaaaatctagcttcaagagaaattgtttagaagactagaatgaagttcagtgtaactttataataactttgcactaatttgttactagttgaacattttccagtaatctcatttcctagcatagtatatcagacttctgcacttcacccagcttggatattttaaaaagtagactaatcatgtgggtataaagattatatcgcacgttgtccttcctctaagtgtttacagaactaagtagtatgccaaagagcatgtaaatactcgcaatgctctattttcaaatttgcttaacttttattatctgaattagaacttagttggaattgaattaacactacccagtgaataatgactaaccaaaacagcattttccattttcaaccaaaaactgcagtctgaaatggcttttgctttctagttgacttacaacgtgtggctagggggaaatgtcggcgctttcccaaggacacttttcgggctgtaaactttctttgttggggaaactaccaagttcaaggggtgccttcagaatccacttacccgatccttcatcctccagctctgagctaaggatttggagccttcaattttctcacagtgcctctttttcataaaagccaaaggtaggttccagtctgtaagatcagcctcatcttcctcccccaggcccagaagaggcgattgcagcatttcggactccatcagtgggggagggggtgggggagtccttggcagcaagcgctcgagaacctccagccttaaaaactagcgtgtaccagaattggtgaaataagaaacaaaaacgggaaatcgaaaaccaaatggataaagagtgcggagacccttactcaggcaaaagtctgagatccttatctctaactctgagcgggaagtggggaggtgggggccgctaggaaatggggcagcccaagaagctccgcagacacacaccaccccaggtcccaagccactggctgctcctgaggctgtacgtttccagaggggctgcgaggggagctgccaaaagcgtaagagacttcaggcctcacgatgaccctgctctcggcctccaccgcctcagcagttccgaagacaggcaggccgctcttggtgccggttcgcccactgggccgactgggctgaggtctccggccaagggatcgggttcaaagggccctgggtctcctccagccactctcagccctgcgggtcccgcactcgtctgagctgctgcaaccagagccacgaccggcccatcgtgctcgcctgcacccggttcctcaacctcaggtccgcgcggcctggctggtcctggccttcagccccgaggctctctcctgcctgagaacgagtcctgagaaacgggcgacacggaaccacggaggaaagggacaatgtgggcttattgggtcatgggagctttgccctctggtttggagctacagtgaaactcatctcatcagcccatcaaggaggacgccatattgccaggacccagaatgcaccgcggcctacggcgtggccgacagaccaaacctcctcagagcggtctctccccgccacccagcatgcagcgaaggagaaagagtccccgaccccgttacctcggttaccataattccgttttccccagttaatcgccatttgttcagtagaggcgtgttattaaagtcaatcctacaaatgaaactgtcggtttaatttattttttcaaaaacattgtcattataaatgaagttacatgctcctgaaattaaaggaatcaaccgccttgtttcttccagattttgaaaaagcggcaaaagcttcactgataatattagaaaatattaaaaagcactgataatattagaaaatatagtacttttttttttggagtgtagtgtcctccacagtgtcaatcagattttctctttaattttttcatagagaaccaagtgaaaggccgggcgccgtggctcacgcctgtaatcccagcactttgggaggccgaagcgggcagatcacgaggtcaagagatcgagaccagcctggccaacatggtgaaaccccgtccctactaaaaatacacaaattagctgggcgtggtggtgcgcgcctgtaatcccagctactcaggaggctgaggcaggagaattgcttgaacccgggaggcggaggttgcagtgggccaagatcgtgccactgcactccagcctgggagacagagcaagactcttcagatgaagaagggtctgaagcaacagaagaagagtctggagcaagattcgatgaaaaaaaatttcatctaatacaattttttgtttaatctgtttcgttttctgagcagtttatcctttttaaatttttttcccacttcttggtagcagtagtttattcttattttgatatagcttcacgtgcagacatctaaaactacatgtctgtgcgtggaggcaagcctcttgtgtgactctctttttcaattcaggaaatttggctcatttacaatgtatagagaactgtgtaaggtggactataaaaccaaatgtaggcagggcaccgtggctcacgcctataatcctagccctttgggaagccgaggagggtggatcacgagttcaggagttcgagaccagcctggccaacatggtgaaacgccgtctctaataaaaatacaaaaattagctgggcgtggtggcgtgcgtctgtagtctcagctgctcgggaggctgaggcaggagaagagctggaacctgggaggcagaggttgcagtgagccgagattacaccactgcattccagcctgggtgacagagtgagattccatctcaaaaataaataaataaataaataaataaataagaataaaacgaggccaggcgtggtggtgcacgcctgtaatcccagcactttgggaggctgaggtgggtggatcatgaggtcaggagttcaagaccatcctggccaagatggtcttgatctctcaggatggttttccggggcttagacacatgtggccatccatatcaaaatcttgatggcatttgtgttcctttcaaaatgagaatgaagaatacaatcccagacctttctcacccagcacaaagcaagcctttaataaaggctacaggattaaatcattgtcattccgcacattcgtttggttattacaccccatggagccaattctcctattgaaactcagggcaccctctctgttggcagagactatcctcacagttaccagcagaggcttcagggatgcagggtcttaggaagaccccgttctcatctgaaggcaacaaaatcactcctgtcctctgccttgtcaccttgctccccacctccggtggctgtagacagctgcattccagcagctcttgcaggaagtcacagttacagaaaagcagcaacgctaaacccattcatccctaactagctctgtgacctgggaaagcccactgaatctgtgtgagactcagtttcctcacctataacgtgtgtgaccttgggaaatccattttt

SEQ ID NO: 1244637 - DNA, 4001 bp, Homo sapiens
cttagaagtgatgtgtttctgtcagcatattccatcagaacaaagcccacaacccggaagtcctacggaaatatcggaggtcaacctgagacgactaggtttctccctacttaaaaaccttcaatggctccctatcattactaggacaaaacccacactccttagtaggcaccaaaggttttggactctaccttgcaaccttgtttccagcctctccaatcacaaggaatgactcacaactcccccaaaacatgccaggctcttccatggcctgtgtcgtttcccccacaccccctcacctggtgaactcttcctcttcattcaaacatctcctccagagaagtttcagtgatttcatcagagtgacctcccttcaggctgtactctagaagccttttatagagaccccctttacaggtgacatttaccatgctgcaataatctggctacatgtctgcgtctcccgtgtcatgtagcaaatcttttttgaccacctactatgtgccaggcactatggtaagtgtttgaaatagaaaagccacacctgatccctttctcataaagtctgtggtctatgacagcagcagacaattaaggagttataaaagtgtcgcactaggccctactgtgtccctggcacccagaaggtgctcaatcaatgtttgcccaatgaatgaatgtgaccaaagaggagatggcactgaagggcggggtgcactgggatggggtgagtgccatgggttacctggaggcctatagacaacctgttaacccctgctgccccgaactctgccagtctggagcccggagctgaagtaggattagcctccaatgtgacttccaagtctgcaggcaggtgggctgcctgtgccacagcctccaggacagcagccaccgtgtggggactggctagactgggggtccccccaccaaagaacacagactccaccctggggaaagagaatggagaaatgagacctgggggagccctctgggatgcctgcacctatcccccaccactcctccaaatatttcccaaaacgctgcctacagcccccactacccaccgttgcaccccgctgagccgcagcagcgtctgagcttcggtcaccagacacttctgcatggcagcctcctccaggcggcgagggatgtacttgttgaagttgcagtaactgcagcgcttctcgcagtaaggccactgggggcagtgagtgcacgtgcgcggtgagagctgccctggccacttccagggttcagtcgcacacacccccaaccccacccccacccctatcccgaggtctttccacagtagctaggacatctaagccacacaactccccaaggcaggtcgcactggggttattacatccacttcaatgtgagaaaactgaggctcactcctttgttacgctgcctcttccaaccagcagacgtcaggaaggaattcaacccaagctctttctgggatcatataattttcatacaattttcctatgagccattttcccagctaccgagtcagaacactgctcttaagaaaattttgtcttgctaagaggaaaattgttatgaaatttgaaccatttggtcagagtcaccgagccggtgagtagcagagacttcaggtttctggaccaagtcatttccctgccaaagcacagggtcccatcccagacctcgtacgggggcacggaaacacggcaggcgggttcatagagtgacaaaccgccacctgggttttggacggccacggtcacggccagggctgcggccacacaccgtgggctccgcccccgcccctactcacgtgtacgtaaagcgccgcgcgccggcccgcaggctcaggactcggggaccctcctgcgttctccacgcggcggcgcctctgggccgctctggctgctgccgcccagccgcgagcccgggctccggggagcgccatggcgcccagcgcagcgcggcgcactgacccgagcaggagacgcgcgcagggatcactgtgagtgcgcagccggcggaaggaagaggggctgcgtgaccgcgcgacaagagggcccgggcccggggctgcggcgccacctgccgggcgcccgggcgctcactgcggcctcctgtcggttctttccccaggccgcgaggcgggctgcttgccttttggcaccttgtgcccgggcgagttcccggacccatccaggagctcttagtttgttcagtcaattccttgacatttgatgtgcctggctcagaactgggcgctggggacatctaggtgcataaagccaggttgcattctggcaggagagaggcaagccaaccggccaggacaggcaaggcgtattaattccgtgcctgctggacaccagagccgtccgcctcagtgctgtgaggtcatctgttttaagagtgtgggagtcagtagggcagaagagacacttgggctggatctttcttttaatttcatttacaaatatttgggagaggggaggtcttgaactcctcggcctcaagcgatcctcctgcctcagcatctagagtaactaaggattaagggcatgagccaccaccagggctatgcacgggatcttggaggagcagaaaatcccaggggcaattggcttggccgggagagtagactgttttgggtcaggccaacccaagcatctggaggtgtacgtgctggaaggacagtcagatggtgtgtgtaggagagagggggaaggcgcaggggaaggcctggggaagcaggcacctgaacaactgtcccacaaagcagaaacatcatgggcttcagaggcaggcggtgcaggacagttctcccagtggccttgaactgacctggttctcccctcctttcttgcttgtagttctcaagaataactgtagacgcctgtaatcccagcactttgggaggccgaggcgggcagatcacttgagatcagaagttcaagaccagcctagccaacatgctgaaaccccgtctttaccaaaaatacaaaaattatccaagcgtggtggtgggcacctgtaatcccagctacacgggaggctgagcagggagaatccctcgaacctgggaggcggaggttgcagtgagctgagacagtgccactgcactccagcctgggtgatggagcaagactgtctcaataaataaataaataaaactgtagagtgtgcagagaatgcaacatcctgagggaaggaaggactggccagcacagccatgctctgttccagtccccctagaaaaagcatgtccttcaacacttcagcccaacatgtcacatggccccagggtataaagcccagggcagaagccgggcgcggtggcttactcctgtaatcccagcactttgggaggccgatgcgggcggatcataaggtcaggagattgagaccatcctggctaacacggtgaaaccccgtttttactaaaaatacaaaaaactagccaggtgtggtggtgcgtgccagtagtcccagctacccgggaggctgaggcaggagaattgcttgaacctgggaggcggaagttgcagtgagcccagatggcgacactgcactccagcctgggagacagagtgagactctgtatcaaacaaacaaacaaacaaacgaaaaacagggcgggctggtttctggggtccctcagcttcagtacaagtctggctggctgggcgtggtggcccatgcctgttatcacaacactttgggaggccgaggcgggtggatcacctgaggtcagaagttcaagaccagcctggccaacatggcgaaactgtttctactaaaaaaaaaaaaaatagctggacgtggtagtgcacgcctgtaatcccagctaccagggaggctgaggcaggaaaattgcttgaatcccagggttcacaccactgcactccagcccgggtgaaagagcgagactccatctcacaacaaaccaacaacaaaaaaaaaagtcaggcatgcacagacaacggtccatcccccagctgcctcag

SEQ ID NO: 1244638 - DNA, 4001 bp, Homo sapiens
cgcctcttgtgcagggtaaggagcctccccccggggagcggcccccacagtgcactgtgctcatccacagctgggcctctggctagccagggtgggagagaaaggctcttggaggctgctggagcctccttgggcacctaaaccatataaataaagtgtgtgggctgcttggtggctcatttttaactataaactgccaaaagacaaaagaccaaaagggaaatgagatgtcagttcctctccattatccctatcacagacctgcagcccagacatggcggcctctcagagctgtctgggaagccttctcgaccggggcaagtttgcacgctccaggcccaagtttctcagacccgggcttctgctcagctctgtaaaaagcaccttctctgtgcaaagacactttggccagcactgctcggttgctgaaaggactttttgtccctttctgcagggaaaaggagaacctggggtgtgtctgcgaagcggtttctccaactagccccagaaactcttccataccacagcgaaggcagccggcgtttccccctgaactgcaccgacccacgtggagggcacaagtcacacacaagtttgttactattccaggacgacggggcaactcagcttcctcggtcggcccaagctaggaccaccacacggccttcactgccccaccaaaggcgtggttcctccacccacctgcctgacctgcttatatctgggtcttcgccatcacctccacatctgcttctctccgcccatcttagggcttcgcttccccccacctccccaacctcccccccctccaccccctccccgtgcgcgttttctccttccccatcctgctgtgaggtcagaatcctgtgcttacgacacctcggtctgttgccatggaaacaggggcggattaaggctggagcgtggagcgcagggatcaggcccctcggctacctgagctcccgcctcagccgctcccgcagggccggggcagccagccgcaggcgccgcggcttctcagcctcctggccgggccaggcgcgggggggatcccggcggggcgccacagcctgctcgggcctgggaggggagaggcagacgcagaggctggaacagctggtggcggggcccgtgggctcccggcgtgatcacctgccctcccagggcccgggggacggcgccccgcgtggcaaccacgtgggggcgcggcgggacttccccggtgcccgcaccaactttgccgcgctccgtaccgggccgggctgctggggcgtctagctacggtggtcgcgaagccagctgtcctcaagttgagctgtgcaccggtcgcgcacactggcggcacggctttcgcgtccctccgctcccagcataatgaaagtttgaggaactggacatcaggcgctggccgctccccaccctcagccgctgggtgcccagagcccatccctagcgatcagagcagaactgcagagaagacgtccgcgtccgggccccgtctggggagctagggcgcgcggggagcgcccgggccgcgcggtcactgaccgctggctgcacgggggcgccgtgcggactcggcctccacaaagcggcagaagcaagggcgtgtgcccgcgcagggaatggaggctgcaagtgcaaaactttatcccagcaaagcaaaggtcccaggaggccggctccccttccaccaccggccgctcactctggtctccgactgacccctccgggccggatctctaggcctggccactcgatccatggagaaaaccccgtgtctcacaactggccgctgacgggagctgagccccagcagcagcccctcggcgggtgcgcccggcaaaacccaccagcccgccgggggctacttcccagaccgggagccccggcgccgggcggcgcccgggctcgcggctctttccggagcgcattcaacttcaacttgcccctgcggctccaactcacctttgcgaagcatgttggccacggggccgccgctccgaggtcggcctaggcgcactccctcccggggtccagattcaaatccctgggcgccagctgcagctaatccgagcgcgtcgaggcgggggcaagccggggatccgctcgtgcccggtggcccggccccgcaggggcatggtgagctccagccccgcgccgagggcaccggcgcccgcaagcaaccgtggtgctgcccggcagccccgcgcgcttgctcagccccggggcgagcggcttgctccgcggagccggcggcctgcttctgccacccggagcacttcgcaggcggttttgaggggggacgccgccccctggccggccggccgcagccccctcctctccgccccctcggaccaccgccgccgcggctgcagcaaaagggcgctcgcacgcaccgccgagctccggggaaagcgcccggcgcgcgtttgcaggaccgagcgatcggcggagcggggcgcctcccttcctccccccggcttccccctcctctcctcctccctccctcccttgctctctagctccctccctctcgctccgctccccgcccccgctcacggagcgcctcccatacaaaatttatgaaagtgctctcagctcgcagtgccgagcgccgtcctattcccaaggcagcagcgctcagccgcgcggcgccgcctcccaaggtgttttcactgcgcccgcccccggggaagatgctcggcccgcgtccgtccaggcacctgcccccagtccccaagccggtcctcggaccactccacgcccctccccggccccgcaggcctcctggagcccgaacccgcagcccagcccccgcccgctcgcccttcgcggctggaggtcatcgggagacgcggctgggacgcgaggaccgccgcccagagtacggatcgcgagtccgctccctgccccgtctcctccctggccagcgccccttctcccagtctcgacggctcttccccgcactgaacagctccagcgaacccggctgccccgcaccccgagtcccaggacactgttctttcgtggggagaggaggggagcaagcattcggaaagggccagctgcaaattccagggagaaggaaggacccgtgcgggttcgggtgggccgtctccgcctgggtggggtggcggcggggggtctctgatctcccttggtccacacagaccccgccggggggttcgcggaaaatggaggaggcgccgcttggaaagcgggtcccgcaggggcctgttgagctgagggaagagaaggttcgggccaggcgagatcctgggtggaggcggcaccccctgctggcctgggatcagagggattcggagagaagaaaaagcggatggaccaaggctgtcattcaacacacattcaccgaaggctcagcatgtgtggggcactactgttcctgaaaattcagcagacgaaaaagacttgtctttgccctgtcctcaaggagtttccattttaataggggccaaatgaggaaagtccagagaagatgggaagattgtgcttcgaagaaaaacaagcagagtattgttctggagctgacacgggggtagaggtggcagtcaaggaaagctgctctgagcaggtgacatccaagcagaaatccaactgaatccctccttgtaggaaaaggtgacatgataggaaggtcaaaaagaaggtcagggccgggcgcggtggctcacgcctgtaatcctagcactttgggaggcggaggcaggcagatcacgaggtcaggagttcgagaccaccctggcccgcatggtgaaacccggtctctaataaaaatacaaaaattagccgggcatggtggcaggcgcctgtaatcccaggtactcgggaggctgaggcaggagactcgcttgaacccgggaggcggaggttgcagtgagccgagatcgcgccactgcactccagcctgggtgacagagtgagactctgtctcaaaaaaaaaaaaaaaaaaagggccaggctgggcgcggtggctc

SEQ ID NO: 1244639 - DNA, 4001 bp, Homo sapiens
tgaaaatgaacaacagagtttcctatcatgtagaacctttggtgctgtccacccctttctagcccttaaatctgacagtttgaggtggctgctccttgtgtaaggagttgcaggtatgtggagaagggtggaacagtaaacacaggattgcactggaaacagttcagactaaaataaacaaatcattatctgcttgataaatcttcttggctaaaaccaatgtaagtgggaagaaagccacatgtagattgtagtttgaagaataaaatggtgaaaagggatggggcatggtggctcacttctctaatcccagcactttggtaggctgaggagggcagatcgcttgagctcaggagttcgagaccagcctgggcaatgtggtgaaaccccgcctcaacaaaaaataaacaaaattaactgggtgtggtggcacacacctgtagtcccagatactggggaagctgaggcaggaggattgcttgagcccaggaggcagaggttgcagtaagcagaaattgcgccaatgcagtctggcctaggtgacagagtgagactctgtctcaaaaaaaaaaagtgaaaaggcagtgtacctcaacacttccaataaagccagcactttgtgcacttccagagatgcaaagcttgtaaggaaacgtttacctggtgtcttatacatagtttcactacttctggggtaggcacactgaatcgatcttgtcagttatcagaggacctcattcagaatgcctaatgattaagcaggatggaggaagagtttaaaaatttcaacattatagcctgcacggtggcacacgcctgtagtcctgaggctgaggcgggaggatggcttgagaccaggagttcgagaccagcctgggcaacataccaagaccctcccgtctcttaaaaaggaaaaattccaacattaggaaatttatctaatcaagagttgtgtttatttcagttactaagagaccctgctgttaatccaaactcccacccaaagaagtgtaaagactgcctagatttcaggaaagcagggacagggagttaacctaaatttccacggattccaactcactttcctttcctttgccaattttcccaatccccagagtcggggtcctctagcagccaaagtgttcaagactgagatacgtgagggaaaggtgagtgggcgcagcactgctcttggctgctctgctgccctctcaacgactcacttcgctcaccgctcctctaccactcacgtcatcacgcaccgacatctctccacatcctccgtgcacaccgctcaccctcaggttcccaggcctctgtcctcttgcccttcagccggccccgcactccagtcccctggtctccgacacacgtactcaccgaccgagtcggggaggcttctccccgcatgcaccatcatccgggtctggatcgccacccacacgaccccactattcccatattcctcgcggcccggctccagccactcacctggtcctcgccccgcaaccatggccggtcccctggcagcccatcgccctcatcgctggcggggtcgccgggcccttcgtaacctaggacgtgagggcagccgcggaaggcgaagtcttcgagctcccgcagaaggcgctgctgctccgccggcgccccgcgcaccacctggcgcaggcggaactgcacctgcgcgaagtgcgaggacagcgccagcagcgccgagtccagccgccgccgctctgcccgcagccgccgcagcgtccggcccggcgaatccggcggggagcccggggccgcgccaggctcctcggccgtcgcctcttctaaaaacgcggttgccccaggccgggcctccgccaccgcccccactggggcccagcgcaccgcctcgcacggtggcagcggctcctcttcctcctcctcttcgtctttcgcctttggcccaacagccgccaccaccgttaccggctctgcagccgcttcgacagccgccatcttcccggaaacaccaccgcacgtcagccgcgcccccctgctgccatggcaacggcgcggtggcctggaaccccaggggagtggtgggcggggcctgaagtacccaagtccccgagggcgcgccttccccgggaatttaattcaggacaataatgttttattgagcgcctattgtgaatcagacactgagcagtaagcgtcggagaaacaggtgaatgataccggggaaaagtcattccctgtgtgtagcgtctagggcagcctttgccctggttccagcagatgggttgtctcttcatagtctatgcatttctgaagaccccacggtgaagggctgcaaggatgaagctgtcccagagtatctccagagtgcagatcccttggctgccaggtcatgttctctcttcctctcaactgctctcccgaccatataaggagaggcagctgctgggggcgtccccaggatctaaagatagcggcccctgcctggaactctaaatgccaccctggagcgggagccgcaatggcacggtgagtgtttccggctccggtgctccccctggcccttttccctggagattccctgctccaagtcttctgggcgctccaggttctgtgaggccccacgggagccccggacccctggtctctgtaactgtggggtgagggaaggtgtgacctgaatgttctccctgacctcctagtttcctagtcttgcacgttctattcttcccaggttcacattcaccacacccacccactcctgtcattcccttccctttcaccccttctgtctcatttagctccactttgaaaaaactgtggcatcaaaggtccctgggtagtcccttcccaaatgacctcagtcttccctctcccacccctatgaagccacacctcaacttctcttcaggcagcacgcccggaccttgtggtacgacaggcccaggtatgtgttcatggagttttgtgttgaggacagcaccgatgtccacgtgcttattgaggatcaccgcattgtgttcaggtagtggccctgccgtccgagggcctggcttcccaggaatctacccctttcctaatgtccccacacggagtattccgcatctcctcagcttcattgtctcctcagctgcaagaatgccgatggagtggagttgtacaatgagattgagttctatgccaaagtgaactccaaggtaagggtgaaatgggacagtaaggtttggatggaaaccgggctgcccagggaaactggagattaattctaaaccccagaccctaagaatgaggctctctatctggcaggactcccaggataagcgctcttcccgctctattacttgttttgtgagaaaatggaaggaaaaggtggcctggccgcggcttaccaaggaggatatcaaggtgggtgtgtggaaagtggcctgcttcttctctccatgtacccaggttacagctgggattgtccttgcctcctttccagccaatattcaatcactcaacaagtcctgcctaatcttttttttccaactgtattagtctctctttttatttttatttatttatttattttgagacggagtttcactcttgttgcccaggctggagtgcagtggcgtgatctcagctcaccatggcctccgcctcccgggttcaagcaattctcctgcctcagcctcctgggtagctgggattacaggcatgcaccaccacgcccagctaattttgtatttttagtagagatggggtttctccttgttgctcaggctggtctcgaactcccgacttcaggtgatctgcccgcctcggcctcccaaagtgctgggattacaggcgtgagccaccgcgcctggcttattttttaacttaaagttctgggatacatgtgcagaacatgcaggtttgttacataggtatacgtgtgccatggtggtttgctgcatctatcaacccgtcatgcaggttttaagtcctgcatacattagctatttgtcctgagtctcttttta

SEQ ID NO: 1244640 - DNA, 4001 bp, Homo sapiens
tgagcctttgttatgtccctgaccccccaaaactctatccttccctcccagctctaaaccaccttcagcccttcaacttctccttctctggcctatgtcaaggagagttccctcattccccccatgtactcaagaggctcagctaccttggcaggcaagagaaaaagaggaacctagcaggtagacagcagagagggacaggaagagcgtcattaggacagggctctttctgtgtgccagacactgagctaggctcctacatggatggtgccattttcattctttggtgtggctgtgacatctaaaatggggatgatggggcacccaaggcccagagtggttaagagacctccccaaggtggcgcagctaaagctgatggagtaagagcttgaacctaggaccttctggccccaaggacagaaatctttgttttataacacactggcaggggttgggggaaatgagggtaaaggcagtgccctgcactgtgggctgggccattgctacactctctccttccttaaagttccaggcatttctgcagaggtctgatgtgcacagcactgtgctgggcactagtgctgggagacagatgcagtgtggtggagtgcgtgcccaggaaccgggaaggagctatgggagccaggagccagggcatcaggtgggcactagtgggcctcagggcatcaggtgggcttcagcagagctgaggcctatgtggcaggcaggtggggctggcgagggaagagtgagccctgcccccaggagcaccctgcactgagggggcaacacctgataggcatgggggccaggggaggttgcagctgacaggggatcccagcaccagaggagagtgcaggtgtgggctgcagggggagtggctgagcagctggccatgccctggttttgggacagggcagggcagggagggtgagtcactgcaggttgaagtgaacaggatcacttcctgggccccgcaatcacggagaatcttcccaaccctgcaaccgttccaccctcagagaccagtggccctgtcctcccgatcttctccccttgaacctggaacccaggctcttggtccttcccacgtcttgggtggtgcccctcacccttccctggaaggattcatgggctctgaccccatgcccaattgaccctgcccatccctgctccagaatctgagcattggagaaccccaccccagagaggtcagtttgacatgggtgtcaatgagggtatgcttggagggcattcatccccccacggggtcccctctgtccatcctgccccattcccagcaagggagccagccatccccacccccttccccctcacacagtgtcacttcctggttctcacaggaagctacagtaccaattaaacacccctcaccccccaggcccaggcccgggcataggcttggcttggcctagaagggtagggaccagactgcagcctccctctgggttctgggcctgggagggacagtggacgcattattctcgacccttttctcccctcccttttctccgcggcagcgctcagtccgggtttccgcagtccaccccaacccctctccctcaccaccccagcccccgcccactagcggtgcccacctgcacacggtgatcaggttcttacgctccacagccacgttgcgagaggacgctttcttggaggacagccccagagccatggtggtctggacaaagctcgcttccatccagatgtgcggccactgctgccgccgcccgctgcccccccacccctcccggagccccaaacccgtcgctggatcacggctgggccctctgtccgacggggcccctcaacccttccatggccatccccctgcctttgcgcccggtgcccggccccctcgctccctcccccggcggcgatgccagagcaaaacaaggccggggagggagctctccgaggtgctgagccggggccccgtcaccccctcctccagccgcccgcccccctcggccagtgacgtcagggccctcgggccccgccccccagcaggccgaggaccaatccgcagagggtgcagggtctgaggggaggggcagagcccgggccccacggagggcggagggggtacccgggagaagcagagattggaaggaggagcagggggcctgccctccacccccacactctgggcccgagactcctcgctcctcctcgcctcgcctcgcctcgagtctctggctccgacctctctactcccttgtttctgacctgtgctccgtggtgtctctgatctccccctgccgccaggggaaaggaggtcttcacctccgggacccccaccccccacccccgtcccctccctgccccctatccgttcagcctcggctttctcggcgagaaagcgcagatggctcccggctgctaacccaggaggctaaggagcagccctagagactgcgcatctgcatgtctgtgcctgggctggacccgcctgcaccagccaggccgagccaacctctcctggggtggaggatgggaatccagacgaagcctaagggctcagcgcctggaaccacttgggacagagagtggggagcagactggcaacgaagggccttgggctctgcggaggttcccagcagcagagcaggcgcctacaatggtgccaaggcaaccggagggggtggcggcccaccccctcgcaccaccccagagccagctggcctaaggttaaccccttggctgccggcattgccgcgttgtgccatcaaccctctctgaatggggtcattgatctcgggcaaggccaggagtgtcctgtaaaactggttgcagcttctccccgggggtggggggaaatgaaggcatagtctggtttcccaccgcccttggcctcctattcctctcacgtccctgctcccacctgctccgttcctctattcaacctgttccaggattttcggggcggggtggggggagggttccccttcacctgctggaatccgcaactcctacataaagcctttctgtgtttattaaagggcctctacccaatttctccatctgcccttaggaacatccctcccaggactcactcacacctattctccaactctgcctacctgctcaattcacctgatgctctgccagtggattgctgatgtctctacattgattcagatttgcacccacatctgaaaatggtcagcaggcagggaccctctgtcaccacaggtggaggaagaggagatgaaagagccttgtctgacaccctggagactggtgagagatcctgactcctagcatgggatcttacatttacgcagcctcagcctcaattcttggcttctgggacctcaaccttggtctttttattttttacttttttttttcaattattttttgtgtgtcatccttgcacagtggccatgctaatcttctctgtatctttccaattttttagcatattaacacattccgatgttagtataaccttggtcttttcagtccctcctccatcatcttgctcttgcctcacgtgtagaagtccctcttaccattctcctgcctccagtttgccaggggcagtcatgatgggtttttttgctctttctccaaatgagggcacatgatgttcttttggggtttattttgttgttgttgttgttgttgttgttgtttttgagacagagtctcactctgtcgtccaggccagagtgatctcggctcactacaacctccacctgtcgggttcaagtgattctcctgcctcagcctcccaagtagctgggattacaggcatgcaccaccacgcctggttaatttttgtatttttactaaagacagggtttcaccatgtcagtcaggctggtctcaaactcccgacctcaggtgatccacctgccttggcctcccaaagtgctgggattacaggcgtgagccaccacgcccggcctatcttaaccattcttaagtgtacaatggagtagtactaagtacattcatagttttttgc

SEQ ID NO: 1244641 - DNA, 4001 bp, Homo sapiens
ctgtcctaggtagccctccctcctctcatttgtcttcgtaatttctaaatccacccttctccaactactgggaaatggggaattcttcatacttcactgattccttaaataggtctcatctcccccccaccaatcagatgggagcccagagaagaaagggtccacgtattcttccgtcagactagggactgtgaagacaggaactgcctctcccatcagaatggaggctctctgagggcagtagtgttgtctcctttctgcctctgagaatgaagatcctgtgttctttattcaagagcccattccagggtcgagatcctctgctggctggagtcctcctcttccaggcaccctctgggctggattggggtttcctgctcaaagccattctcggtccatcctgattcagcacaaactgctctcttttcttcccttcaacaactaactttctggggtgtgtagggggaccctccctacattgtgtccagggggtcaccagacccctcccacccaaccctctccttccaaaactgagcctagaaaaattagacaccaaacccgcccccactctcactcccacacacaccccgcacactctctcacacacacacacacacacacacacacacacccccattcagccaggtaactgcacaagggtgggattgaaccggttcctctggatacccttccccccaaggcttccaatcctggagaaggagcaccaatgacctttgacccttctctgggagaaagggaggcaggtgagctcacagcctcttgggacccaggagaaggagaaaggaagaaagggcgcacaattcctggggagggagcgggagcgggagcggaaggaagtgaggagtaggaagaagcagagacagacacacaaactggcggagagtccacagggctgctgagaagaaagagatcacaccgagagtggggccacgggaactggcactgggaacaagggcttccgccgctctaagtgacgcccgagggtgggagagaagggagaagcccttcgggcaggcgataggaaagggcccctgaagaggagaaagcgacagagagaagtgcaactgggagaggccgggaagaggtggatgggaaaggagactagcggtcggggaggcagttgtggagccagagaggtggtccccccttcccatatcgccggccgtccactggccccaggcttggggtagtcctcaggagtcgggcaccccctcaaagcactgttggagatggggtgaggttggggacagggcacctactccactctcagagcccttctccccagtcagagcccggtggctagtttctctccaaaccatcagcacaactccccgccgggcaagaaagagttaagccctctccccctccccccacaccagctttttattaatttctccgggcgtcgggcgggagggaggggattagggccataaatcctatctccgccccctcccctgacagcccggcaccccagccccgtgcggtccccctagggataggggaagaaaggcccttgtcgcttagccctgcccaaccccactcagggtcccaccgcgggcccgagtggccctagccccagttcccggtccaccccagggcgcccggcccctcacctccggcatcggtcatcttcagcgtctggcgccccgggaacccctcaggcccatggtgctcgaggcgggggccgggcaggagaggggtggggggaccgtcaccccggccgcggggggctccgggcgggctcgagccgctccatcccgggggtgggggtgaggtcggcgggaagggtcccagagccgggggagatggagggcgggggatgtggggagagggaacaggttcgctggaagcaggaggcgcgggcggggctggaccaggagacctgacgggaggatgctccgtgtgtgtgtgcgtgtgcgtgtgcgtgtgtgtgtgtgtgacagagagagagagagagagaagagcgaagagcgagcgccacctccctccccgcccctgccgcccgccaggcctggccggacgcggggcccccgcctggcagggccgattcgcgcggcgtcgcgtcggcaggggtccgcgggggtctccggggaaggggcgtcggggtggggggcgcgtggcggagaagccgggcgcccaggagacaaagagcgggagggagcgagggggcgggggcgggggagggcggcggggaggaggcggctggggccggggagcggagttgcagctacttctctgcccgcgggagacgcggcgcaccggagtctgcgcgggtgggagcggctccggggcggtcccgccacgggacccacggggcttccgcctcctctgccgggtccatcagggctcccgattagttcattcattcaacaaacgtccgccgagcagccggggcgccgaggctggaggggacagcggtgaacagaacccccgccccctaactgcgctcaaggccagtgggccagtcgggggctcagacgagtggggaggccctcacgagcctgggcgccatgggcccagctaacagagggcacttcttgccggaagggagagcgcacccctggcccggcctgggtccaggcggccgcggcgggagctgggctgggggattcccagaggatgtgatgtgttggctacaactgcgggccagggtagggaagtgccagggggtgttgggggtgggagggcaagaggggaagataaattgaagctggggaggtgcagggggcttgcactttattctaccagccgcccaccccgccgcccacacacacacacacacacacacacacacgcgcgcgcgcgcacacacacaaaattaagaggagggaggggctcaggtgtgcatttaggaagcacccttggctcccctggagacagggttacagagggcactctgaaggcagggagacccgctggaggctattgagggccggtggcagtgggcataaagattacagattaagctgagagcccttcaggatgcaggcctgaagaagctgacaccgaagaagctgacaggatttggggacctgctggactaggaggtgagggaggaggggtctaggatggctgtggaccttggcttgaggcaggaagccctggagcaggtgggggtggggacggatgagatcagacttggacccagtgcgctgatggtagtggcaggccagccagggaggcaatgtagggatccacaaccagctaccgcacgtcacagcttggcaggtgccaggcgctctcagatcatctattgtcaccctcacaataaacccacaaggtgggtgtttccattacccactgcctcagagaaaacagagacttagaagaaggaaagtgctttgctcaagagcaagtggtgaaaggccaggcgcagtggctcacgactgtaatcccagcactttgggaggccaaggtgggtggattacatgaggtcaggagttcgagaccagcctggccaacatggtgaaacccttgtctctactaaaaatacaaaaattagtcaggcatggtggcgctactctggaggctgaggcatgagaattgcttgaacctgggaggtggaggttggagtgagctgagattgtgccactgcctttcagcctggccaacagagtgaaactcaaatctcaaaaaaaaaaaaaaaaaaaaaaaaaaaaaaaaaaaaaaaaggcaagtggtgaagctggatcaggggtctagagtcagaggagaggtgtggagtctataggacagagttccctgatggcccacaggactctgcagtccgaggcctccgggaagtggcctgttgaaccaggacaatcttgtgactatgagtgaggacagaattaacagcctttagggtctgagggtatcctaggggatttataggagtttgggggtctctgggtgtcttcagaatcttctggcagccatgaggctagattgtggaaatctggggaaggggtggggtttctgttgacagctgtgggggctgc

SEQ ID NO: 1244642 - DNA, 4001 bp, Homo sapiens
ggacagcagagtgagaccctatctcaaaaaaaaaaaagaaaagaaaaagcaggtgaaaacgaattttcctttcttatcttgttaataaactgagaagacttaaatgagccccaaccaagattaaaaataatgcagagttgactgtagatataaatgatacaccagttaggatgaatgcctgctataaatggagtaaatcatttaaacagggaaaaatcaacataaaacacccattgatatctgggttaaataaaataatccactatcttttcccccaaatttcaattcaaagattaataaaaaatgatccatgtgaaaatacattttcaaacagatctgatatccaatccagtttcttccactaatactaaaacaaaacgggagagcaagggatggagctaaccatgaaatggaacactgttggcacagttccaaaatctgacaaatgaaattgtgctttcagtagctctggatctgggagatttacctaccgactgtctactgttctcatcttcttcttcttcataaccatcttcatcaccccctagacgagaaaagtcatcctccccataggcatcagataccaatccgcctttctcctctgaaaggttaaaaaacaaacaaacaaacaaaaagcaagaaaaaaaaaacaagagttacaatgtaagaaaaaatgtccagagatttgagtggccaagactatctctgaagatacaaagggaacctaaatctcatgttaagttacaataggcccagattcggctctctgagaaggccagcatttactgaataaaatcattaaaaggtcagggaacaaaaccgagtactaaattctgtttctaatgctataaacactagataaacactaaagtgtttataggaaaccatcagagaactttctgactggaagagaccacacaaaatcacaaaacatggaagtacctaacctaatccaatccccttcactttccagatgaggaagctaaggtcctgatatgttgttaggtaacttgttctttattctcccaaaggaatctgtttccattatctaacattgtgcttctcaacctgaggaggagaacatcaccgttaggctttaaaaactcacaaaataagaaaaatcacctgggatccttaaaaagttcacaaatgcccacatcctaccccagttctaccgaattaggttctctcactttgggcatcagatacgtttgtttttaaaagctccaagatgtgtttagggcacattcctaactaaaagttataaagttaacgaacacaatctttaccatcttccacgtatgttttacttatcgctctccctcatcaaacaacgagcccaggggaaacaggcagtggctgagcagccgctccctcttcgtccatccctctgtctatcactatagccggcacggagtctttcagtaagtttaggcaaattaatcgaaataacgggaaggagattcttcattcttagtccacagtctctaatgctctatctcaccccggaccctggaccattcttcggggtccggtgcttggagcacaatgaccatcttgttccctcccgcccagcgagggtacagcattccgggcagacacccgattcccccttccagcttcgcacttgggccttaccagccgcgctgcccaccgcctcgattccagcctcgccatcagactcgggctctgaatcttccgcgtaaactgcgagagacgacagaacattcttcttccccgccatcttattcccacagcccgggcgtggctcactcctatgactcaagacgccgacttccgggcggaaaggcaggttctttcggatcccaggagacccccgcgccacactggaaaccaatcaaaacggcagtttcctgcgcctggctccgccctcatgccagcgctcgcgctacgtcatcactgcgcgacggatataagattgcgtgggttctgcctaaagctgaattcccagcgctttggcttctctgagttggggttgtgtataggggtcttcgaacagttccggaaccagccagcagcctttaattcttgggcggaccacggccggttctgatatcttagggtgaagagagggaggtgtcggccagccaagagagaaaattgcggatcttgggctcaggaagacgggagaaggggttcggggtcccggggtggaagaacggtcgtcgtggttgcgcttatagaagtaggagcaggtggtggatcttaggaaaacggttccccgttctccaagctgttctgaagacatttatgtttcttctcttgatctgatttctagctctgtgctataccgtggcctggaatagttcaatgttttcattttcattgagcgtaaaagtggagatgttaattactgaggaatgtattgcttgaggcagttcaccttcagctttattacttaaaaataatacattatttaagtgtaatatagcaaattgttacagaaaaataatctgtatttttaatgcaaaacagagggttctcgtggcaaccttttactacctttgccttaacctttggccactgttcttggctaagatgagcagccaccataccacctttccttttgaccctgagcggcgagtccggagtacgctgaagaaggtctttgggtttgactcttttaagacgcctttacaggagagtgcgaccatggctgtagtaaaaggtaacattaccaagctaccttcctttaaatttatgctggctataccataacgctgcggcagaacaccctcctcctcacccttcgtactgcctcacctttggtccataactggatttggaaatctttagagttgtcaaagcttgtagtttcgtttatttgttttaattagagatggggtcttggcatgttgctcaggctggtctccaaatcctgggctcaggcaatcctcccacctcggcctcccaaggtgctgggattacaagcatgagccaccacgcccggcccaaagcttgtagttttagtggcagaaccacccagctggtctatatttcatagctagatttacacatggtctttgaaaacacttcagattctcattattgttcgtttgtacacacaaacgaacagcaacagtgagggtggtaggaataacttaactcggtcactggcctcctaggtaattcccttgttgcaggttgagtggccttggtcccagatagagaaggaaagagtaataatgttataaacctgagatacggtgacaaatggaagttgccaagaggcgagcagcaatgtaatattaatgatacatgtctaaacaaaagccctctaagtaatgtcctctcatgtctacacagatgtacccactcatctagcagtactctgctttcatggctgtttagttcaatcatccatatcacagcagactcagacttctttttttttttttttttttttgaaacagagtcttgctctgtcgcccacactggagtgcagtggcgcgatctcggctcactgcaacctccgcctcctgggttcaagcaattctcctgcttcagcctcctgagtagctgggattacaggcacgtgccaccatgcctgggtaatttttgtattcttagtagagacagagtttcaccatgttggccaggctggtctcaaactcttgccctcgtgatctgcctgccttagcctcccaaagtgctgggattacaggcgtgagccactgcgcttgacccagactttttaaatcttgtttttaaccattactagaaatggtttgggcatgtatccaagtttcccaggatccttgcctttttcatagaaaggacaggaggggaattaggattacatcgagaccctcccatgtgccagacactctgctaggtgcttttcctacattctcatttaattttcaacaacttcaatgaaaaggcaggaagcactgagatattgttgtcttgtattttttcaggtaacaaggacgtctttgtgtgcatgcccacaggggcaggaaaatccctatgctatc

SEQ ID NO: 1244643 - DNA, 4001 bp, Homo sapiens
attttatttgctaccccctccaaattcatggcctatccccatcatggcaacggatgtcagatgggaggttaatggcttgccaaataagcagaaccctatcttggtctcccaacctaaattgcttcattcatgcatttttgacagttgtatctttccaccaatcaccaggtaatttttttcttttcgaaaatggcaaggaaaacacccccaacccactcccttcacacttgtgagagctgcatgagctgaaagtgactcttccaaaaactcttctaagcttgagaagctggagacttcagcatgagactggagtgtgacagcttggtctgctctggcatcagaagggagggaaagtgagtccttggaggtcttcatactccaggagagatcccaagagacatgcaagagtggcaaccaggcctctgtttgaccctcttgcggcatcttggtgctaagtggggtgaagggagagaacacacactctgcctggtccccgccgggctctgcaccccggtgtcctcttcccccacccatgcctcccagcagaaaactgtttcccatcagcagctgcagaatgagatcatgtctggcctgttgcaagaaccagaatgaaggatggagcagaagttggattggggcggcaagaagggagtaagcagcctcaggccagcacgccttacagcctggggaggagggaaaggagaggtctccctccctcttttctgagcgttgtgtttcccttcttctctcattgggagagggatgggatgatggcgagagaaggtgtcatagacgggaacccaagccggtgggaaggagagctgtgggcttggggggcgggggagagggagaattggcaataggatgccatctccatccatagagccagggacggactcctgtcctgtaactccattcctcaccccactagccctgggagcaaatcttagttcactgtgatccactgagcaagtcactaaactttcccaaggctcagtttccttatctgtgaaacagacaggctgacccctaacagagatgtagtgcaggcagtcagagaggtgagggaggcaaaggcacggcgcaaggcacacgggaacgcaggcgcttaactgtccacaccacgcggcgctctcccaaccccggcctggcgcgctcaccggttctcagccaccaggatctgctccagcaggcgcgcggcctgcacacgcgtctccaactccggcgcctgcagcagccgcaacagcaggtcgaggccgccatcgaggcggatggcgtcgcacagaccctgggctacctcgcggcccacggccggcagcagccaggcctcctccaccagttggaagacctcggccaggccggcgcccacggcccgcgcgccgcccgcctgcttcagcgcggacaaggcctgctgcagctccggcagcgcgcgctccagggcgtcctgcacctcggtgcctgcccccggcgacacttcgcggggcccgcggccacccgcagcccaccatgggcccgtgccaccgcccccatctggcccaggcaccgccagccgctcggcgcccggccgtgggcccgacatggcgaagaagcgacacagcttgtaggcggagagaagcagcgtcaggaccatgggcgcggggccgcgggggacatccccggcctggaggcggggccacgcggagagacccgggttttgggaaaagagggacccgagaggggtcggggaaagaagatggagggggaggaatggagagaagggtaccaggcaagggtgccggtcagaagtttgggggaggagtgtcggcaggatcgggggagcggttggcaaaggtgatgcaggcccagatgcagggagtgggcgaaaggagagagcgagcaggcgagggatggctccggacgccgtagggtagaggaggcggcggctggaacaaagcgtggcctgggcacgggctcggctgagctgggagatgctcggcagcagccacgccccggaggagcagcggtccccggccgacgccccgcctctgggtcccgcggggctcctccagcctcctgcagccacgccccggaggagcagtggtccccgggccgacgccccgcctctgggtcccgcggggctcctccagcctcctgcgcagccccacccccaagccgtccccagccacgcccacgcccctggccagccttccctagcccctcagtcagtcgcagccacctccccctgcgctggacttggaggaagggggtggagaatgagaggacgctctccgttctccgccccgcctccccgccccacgtgacatcggtacgtgggagcaacaccgctggatgccccctccctactaaatggttaaaacaatcatcataactcttaaggcccttttatggctgtttcttagcgaaacctcacaacatgcctatggggtgggaattgatgttccattccacagctgactccactgaagcccatgaggaagaaattggcccaaatcacagtcccctctgattacagaacagaaaaagtcagctaaaatctcaggatcacttttttcaggtgatgggaggatttcagaagttctgtggacacctgaaattgggcacaaaatcaggtgtttcatgccagtgggcattttccaggtagagggatcatatttctctcgagagtctaaaagtgtgttgaacaagcccactctttacagatggggagactgagcctggggacagggagtggcctgctcagaaaagactcagaaattaaatccagtccagtgggttgatatttacccaaatttccagcctggggagattgatgcacccaagagaagaacccagaaatgaaactttgttcttttatgctaaaaaataaaattccccagagtgcttacaatctctcctcccactccctttttcctgccctaaataaataatggcgaatgagcacccagccagggatgtgtctgatcaaacaatcatggatcaatagctatgtttggagaaggaatttgtggctgctccagctactgggcattttgtctggtccagttcatgtaatctcccaacaccccatgaagcaaggctttgttaatcctattttactgaaaatgaactaagactcagagagataaagctgttgcccaatgagccttctttctgccctccagatccacggtgctaattccccttccgatgacctaatgattctgagcttggcaaaggtcttatctcccagctcgcccaggcccagtgttccaggaatgtgacctttgctgcagcagccgctggagggggcagaggggatgggctggaggttgagcaaacagagcagcagaaaaggcagttcctcttctccagtgccctccttccctgtctctgcctctccctcccttcctcaggcatcagagcggagacttcagggagaccagagcccagcttgccaggcactgagctagaagccctgccatggcacccctgagaccccttctcatactggccctgctggcatgggttgctctggctgaccaaggtacaggggagtgttggtggccatctgggtcaatgtagggagggcgagggtggtctgggcttggtggcaccgactgacactccttcctcatagagtcatgcaagggccgctgcactgagggcttcaacgtggacaagaagtgccagtgtgacgagctctgctcttactaccagagctgctgcacagactatacggctgagtgcaagccccaaggtgtgttcagagcccaggtgggtgggctggggtgccccctgctgctggagactcactaccatccactctctgcagtgactcgcggggatgtgttcactatgccggaggatgagtacacggtctatgacgatggcgaggagaaaaacaatgccactgtccatgaacaggtggggggcccctccctgacctctgacctccaggcccagtccaaagggaatcctgagcagacacctgttctgaaacctgaggaagaggcccctgcgcc

SEQ ID NO: 1244644 - DNA, 4001 bp, Homo sapiens
ggacaacagcaagacttgatctcaaaaaaaaaaaaaaagactttggactgggtgcagtggctcacaccagtaatcccagcacttttcgaggccgaggcggacggatcacgagatcaggagttggagaccagcctggccagtatggtgaaacaccgtctctactaaaaattagccgggcatggtggtgcgcacccgtagtcccagctactcgggaggctgaggcaggataattgcttgaacccgtgaggcagaggttgcagtgagcggagttcgcaccactgcactccagcgtgcgcgacagagactctgtctcaaaaaaaaaaaaaaaaagaaataaaagaaagacccaacaccacatcaggacatgtaattcttatttatttttcaccctcaacaaggaagaaaggtctctccctcaattctgctcttccaatacttgaggataggcacccctaaccctccttcctccagggaggcctcagcatcagtgtctgtggacgtagtctctgaagagtgcttcagctgatggggaaggagaaactcaagacagagatcctcctagggatggcgtcactttcctgccaactttctcgttgcctctccttgaaagcagaagaagtgccagccctcagcttccgtcagatcttgggctcctagggccttgtacaagtccatggccctctggttccagtccaggacggccaggcggaattgggagcagcccttatccaaggccacctgtgggagaagacaacactaacttttctggggtcaaaaaagaaaaaggttttctcactccctctttcaacccgggtcccccctccatatacccttgcttcttcaggtcctcacttgtcgccccacccatctcctcacctcagccacctttttgattattttggaaccaatcccttgacctgttgtggagagaaagaggcaaaaaatagctattgtttgagctgaaggggatcagaaaatgacaccggctgggctctggggacaggggataacagtggggtctgtggggtgctttgctcccaccccagcctcagcttctgcccagtaccccgatattccggcatcacatagatatcctccagataaatggtgcgtcccttccatgtactgtagatgaaatagtatatcccatagcccaccacgcagggccctgagagagagaaaaggggagtaaggcttctggaagcctgtggggagacctctgaggccggctggagaggtggacttctaagggccaggtgctcttacccagtagcttcccgggcgctggaagaatctctgctaccaaacagtgatagaaaggattgtctccaaagccatctgctctcagggctgccgagattggagttgtgacaaagagatagagaaagaggacgtgggtgtatgcccagcctggagctgtcgcctggggaacccatccctcatttcctccccagcctccgccagaacctgggcgctgagcccccaccttcttcactgatcttcacctgatccgagagtttttcgaattcggctagctcctaaggcgtgggtacggaagctagattagagcagaagggccccgctgctccccgagcaggttcccaaggcgagcccctccccctgcccccgcctcctacgaccccgctctggccgcgccactctgacccccgggttaccggcctgcagtcttcacccgaatcagcctcaggatatctccacagtctccctccttggcctctcggatccgcacggaagccatccggatccccgctgtctgggaccaaagtcccagggcctcgcaaacggcaactagaccccttaaagggcctacggacttggatcctgaagagcctgagagagcggggtggcgggagtcgggggggacggcggggtagccgcggcctggtaagtggagctgggattccggcgccgtacgggaggagagagtaggccagcgaggcgatcctctgtccgggcatagccccaccccctcgaattctgtcgcagcagggggcacaactgtcagccaatcagcttggagaacaggcacggccgcgtcccccccaagccccacccccgacagctggatcttgtgactgggctcctgggtagagttcaaggttggagtgaagcggcttccttgcggttgtgtgggtgtcccaacctgggtcgagataccccgcggttcaaaggctcccccgcagtgctttttaaattgacatatgcagtgataacctgctttagcctcaggctcactcacccgcccagaccctgggtaagccttaagaccctcagctctgaaagctgtttcctgcagctcttgagtagcatgaagtgttacctcttgggggcatttgcattttttaaatgttttatttttatatttatttatttatttatttttggagatggtgtattgctttgtcgcccaggctggggtgtagtggcgcgatctctgctcactgcagcctccacctcccgagttcaagcgatcctcctgtctcagcctccggagtagctggaactacagtcgcgcaccggcacgcccggctaatttttttttcttttttcttctctttttttttgttttaacggattctcactctgtcactcaggctggagtgcagtggcgcgatctcggctcactgcaacctctccctcctgggttcaagcgattctcctgcctcaccctcggagtagctgggattacaggcatgggcaaccatacctggctaatttttgtatttttagtagagacggggtttcactatgttggccaggctggtctggaactcctgacctcaagtgatctgcccgcctcagccttctaaagtgctgggattacagatgtgacccaccaagcccggtctgtcatttgcattttaaaatgggtcatggggtgggcacagtggctcacacctgtaatcccagcattttgggaggcagaggcaggcggatcacctgagatcaggaatttgagaccagcctgaccaacatggtgaaaccccgtctctactaaaaatacaaaaattagacaggtgtggtggcgcatgcctttactcccagctactcgggaggctgagacaggagaatcgcttgaacctgggaggtggaggttacagtgagccgagatcgtgccattgcactccagcctgggcaacaaaagcgaaactccatctcaaaataaataaataaaataaaatgcgtcagggagggtcgggccttgtggctaatgcctgtaatccaggtactttgggaggctgaggtgggcggatcatttcaggtcagaggttcgagatcagcctgggcaacgtggtgaaatccccgtctctactaaaaacacaaaaaaatttgctgggcgtggtggtgcgtgcacctgtagtcccaactactaaggaggctgagacaggaggatcgcttgaactcgagaggcagaggcagcagtgagccgagatcacgccactgcactccagcctgggtgatagagcaagactctgtctaaaataaaataaaataaaataaaataaaataaaataaaatgggtcagggagtgggtgatttctactgctagactgtttaggccctgtaataaatggataagggaagataactgagaggcggggggcaggtcccttcttaatattcactgaatcatacacacagacaataccttcttgggagacaggcctcagaggcctgggaaaagactgggggaggagttcagaccagatgccaggcactgtgcctgcattttctcaatgaaccctctttcacagtcaccccgtaaagtattattttcctcattttacagacaaggacactgaagcacagaggtgaagtgacttgcccaaggtcactcagctagaaatttaggattccattatctcatttctagtcctgatacaggatgctacttgggacgcaggggaggactgtttctagacctcaggcctgtgaatgcaggctccccgagtggacagaaatcttggaggacctagatc

SEQ ID NO: 1244645 - DNA, 4001 bp, Homo sapiens
cacacgccggtcgcggggtcgcagcgcccgtgggggccgcaggcgcacgggaactcgcagcgggctccccagcggtcggcctggcactggcacgcgcccgtggctggctcgcactggccgtgcgggtggcaggggcagctctcacggcagtcggggccccagtactggcccgggcagcctgcgggggtggggacgggaggggtcagcgggctcagggccgcgcgcagacccttaccctgcgtccccttcctcaaggaaaaggggcgctgggcccatcctccaagagccggggacagaccctcagaacatccggcagcctgtcctgggcaacactcacttcctgctccgctctgacctacagaaaacccttagccattagtgggaggctcagcctgccacttcacattccagaacacactcagagatcctgagtgggcaggggacttgcccagagcgtggcaccgaggttggtgggccttcctccatgcctgctcctccctgccgagatggatctctgctgggctggaggagagctggctttctcctgatctcaggcctggatactgcccgccagggtgtcgggagaagccacctttcccctagtgattccttgattcctgatgcccaccctctggctctcctgcttcccaacccctttcccttccctctctttctgccagagagggcagagagcccagccaggggcccccttccatccactgcccatgtataaggtatatgtgggaaaggcaagtaatacactcattttacaatgaaggggaatcacaggttttctgagaagtggaagaggaagatgctcaggtgggcagtgctttgtggatgtgggtaaaaacccggtgactcaggtcatctcccgggagtgtgtgtcacttcctgtctctggaccgcaattcctcagtgaagctgggggggattctggccctgctgtcctgaggctgcatggctacctgcctcgcctgctcccacaccactgcccccgtacccagctctgcccagcaacttcatctggcccttgagactcacgggagctgcagtgggccccaaagaatccaggcttgcatcgacagaggcccggcttcacacacacctcgtctttctggcaggcgtccggcccctcacagatggctgaaagacaccccacccaggttggaaagacgggagcaggaccaggggacacccctgccctctcactggctccaggggccatgcctcctcaagaggtgccccttcaggcctgggggtgcgtcacaggagaaaccctgactcctggtatcaggaggggcaggccccatggggtaggaaggaagggttgtcactgggctacggcctcccttctccttggctgagggtctgtcctggctactcacggatggtgcattcttgatccttctgcctccagcctgcgcagcactgcagctcagcagaggggctgtggggcaaaaaggggtcagccggacatggtggggggtgcagcctggccctgaggaaggtggatcactgtctctggctgcagtgggggaggctgccttagccccctggggaggcctaatggatctttacagctagggtccccagcccctcccctctccttccctgacccttccaccatctgccctggctggccactacctgccagaccgccatcagcagtcccttcctttcagcctaagcccccttcctagtctcctccttcccctaacggcctcaacaccggttcagccacccgcatcagactcccacgagacccacctgctggccacacgcatcagactcccacgagacccacctgctggccacacagacgtgctgccctttggggtccagctcggacccctgagtcccccgagtccagagcagcagcagcgggagcagcagccccagccccatggcaggcagctcggtgggagcgctcgggttcgtctggcccccacagctcccaaccccctccctgcttcctctcagggcttttcctgaggaaaccaggccggaggggcgggctgccacgaggcacctccctgagagggagggggtggctggaaagactgacactcaaaaaaagaaagggaaagaaaggcaatggcagggctgactggcctgggcctggaagggccagaagaatgaagttgcaggtccctgggtgccggggccagggaagggggtggactgaggctgggagccacggctttccatcaggccacactcccaaagcaaggcctgagctgcaagaagccaccccacccagtgactgagcaaggagaccagcgaggacccctcagcctgcctctgctcctggcagggttgggaggtggcacagacatggacagacaggcgaggaacagtttctgtgtattacgggcagttctttattacatgagctcaggccgtctgcacaaagccctgggagctaggcagtcagctctcatttcatggatggggaaactgagactcagagaggcactcttatatctggccccagaggctcggtacagagacgtagagagggaggcgggctgagaccccgtcctgccctgatgcaggccaggattggggcagacccctggcgagggctgtgaaggcgggagccctgtcctcatttgaggccacacatccttccacagccagacccctaagtcaggcctctggggcggctgaggcccccagacaaaggtgttcgtggagggcagaacagggcggatcaggagctggagactgtggttgggcctcctcttctccccctagcttgctgggtgcagggctgctggtctcatcctcagaggattcagctttaccccgataccataggccaaagctggagagagacagccagaggcactttgagccaggaagccagagaggtcaaggatatgggtgagggcaggggatggtgagaaaaggggagagggggaagaaagggcagcctgagggagtgtgaaggtgatgggggccagggccagagaagcaggaggggacggtgtgcttagagccaagcacagcagggtgacgggcagagaagcgggaaaggggatcctgagaaggaccagccagggcccttcctccctccccacactcttgcctttcccctttccccaacatacaaactctgtattttggactccgggggtgggggatggtctcccttgtcatcggagagcaggatccatgggccagcctcatcctcactgagacagaggagagaggagaagtgagggccattgatcaaggccctgagggacaacaggaatccagcaggggggatggagggactgcagggcccccggggctggagagaaggcaaccctggggagatgcaggatgtcgagcctttaatttttaatttttttttttttgagacagggtctcactctgtcgcccaggctggagtgcagtggtgcgatctcagctcactgcaacctccgcctcccaagttcaagcgattctcctgccgcagcctcctgagtagctgggattataggcacatgccaccatgcccggctaatttttgtatttttagtagagacggagtttcaccatgttggccacgctggtctcgaactcctgacctcaggtgatctacccaccttagcctctcaaagtgctgggattacaggcgtgagccaccgcgccctgccaagggtttattttatagcttgacacacagcaggccctgacacagccgcggctacagtttcacccccgtaagaataaacagacccagccaagacaggaacttgaagaatgaatgtggagaggcagtgttgtcaggcagaatggatggcaggcaaggcaaggggagtggtgagatccagggagaagggcgcaggctggacagcggccatgggacacagccagagcaggtcagcaggccctagaagcggccaggctagggaggctcaaggggtgaccgggttggggtgacagcctcagtctgagacaatgggctcagagggtgaccaggctgggtcatcaggctcagcagaatg

SEQ ID NO: 1244646 - DNA, 4001 bp, Homo sapiens
ggctgtggccctgagtgtgttcctgatgtccccatttgtgtgcccctctgtggggactttcgcacgtgtgctccttgagtgggatcctctgtgtgtgggtctgtgtgtgtggctgtggccctgtgttcctgatgtccccacttgtgtgcccctctgtggggactttcgcatgtgtgctccttgagtgggatcctctgtgtgtgggtctgtgtgtgtggctgtggccctgtgttcctgatgtccccatttgtgtgtccctctgtgggggactttcgcacgtgtgctccttgagtaggatcctctgtatgtgggtctgtgtgtgtggctgtggccctgtgttcctgatgtccccatttgtgtgtccctctgtggggacttttgcacgtgtgctccttgagtgggatcctctgtatgtgggtctgtgtgtgtggctgtggcctcgagtgtgttcctgatgtccccatttgtgtgcccctctgtgggggcagagacaggagcctgagctgcggaagaggctttattgattaaacggtttgaggatacatttccatgtgggaggtggtagtgggcgttgtgtccacggctgcttgtgtggcaggtcctatggctgagccatgtctgaggtccacttaggcaccgtcctgactgcccagcacttgcacctggaaggcagacacatgtggactaagagggctgtgctcaataagtggagagccacagctccatcaggcaagcaaggccctcagtggggggggggtctggcatattgctgcctatctcctcccagcagctgggaggtgtgtgtgcacatgtgatggtgtgcacacatgtatgtgtgtgcatatcccagtgtgagcatgtgggtgtgaacgtgtttatacatgtgtgcacgcagtgtacatttcatgtctgcacctgtgtttggatctctgtgtatgttcacatgtgtgcatggaggagtatcccacagactggggaggaggtctatggagtctgggggctgctcggtggacaggaggtctggggtgtccacctgagctggctgatgcgggtgcaatgtctgtgggtggtggatgtctgtgggtggggtaggctgtgtgggtgctgtgttgggtggtcttggtaaggctgcagatctttagaaaatggggtgcccgccgccctcataccagcagcttgaccagctccgccttgtgcattggctgcaggccatctctgcaggacttgagttcagtcattgctgccttggcatcttcgttgacattgtacttgcccaaggtcccctcatagagctcctctggggtccccaccagtagtgtttgcaggaagtccatgaaaaactcatcgttgtcctcccccgtggccatccctgcatcacgagcgagatgatgccaggacaggacagggtgactctggtgcaaccacagccctggacctgccccagggctctaacctccatggtctccagaccttccccttcaatgctcacctctcctccccagggcttcctccacaacacctccaactccaccttgcccgaagacccctccacatcccccttaatcttagctgctccaatttccactcagcattccctgggatcaccagggaaggaaagttaagctcctggtgtgggggaaatttcccctgatgagaggctattatgaccagaggcttgaagggtcaggtcaggctggactgggctggggtaggagacactgggctggtgttgggtcagctgggctttgtccttggttggggtggagtagggtgggcgcgggttctgcagggtccttgcccacttctgtgacagaagcaggtggagtgttcactgcagaggcccgatgccaggattttaccttctcaggtaccccccactcccccccgcccctgaatgttctggaaaccccagtggcacagactcacggcagatgcagaacagggtgagggccaccagcaggagggcacggctccccttcatgccggcagtctcaggagctgcctccagccagaatcccgggattttatgcctcaccggacagcacctctcctagagggcggaccggacctgcccattaggacccggcagccagcttagatgaggtttgttcacatccctggcccccagtgggtgccaagcagcaacaggcatggagtggctgtgtgacaggtggttggcaagcggctttagggtgtgtgagagagagaacaggtgtgttaggagggaacactggtgagaggccatgccaactgatcggtgaagaaggcagtgggtcctggccaccaagggcctctagtcatgcctgcccttgaggccgagagtggtgggatctggggttggtcccacgcctttcttttaaggtgggaatccctcctcttatcagtgtgctgtgtgatctgggtctgcatctgggggtctccaatcaggcaggggccccttactactcagatggggtggccgagtaggggaagggggtgcaggctgcacgagtggacacagctgtaggactacctgggggctgtggatctatggggtggggagaagcccagtgacagtgcctagaagagagaaggtggcctgagagggtctgaggaacatagagctggccatgttggggccaggtctcagcaggaagtgaggaatgggacaggcttgaggtacatcttccatcagtagccaggatagcaaggagaggttgaaggccctgggggagatggtcccaggacatattacaatggacacaggaggttgggacacctggagtcaccaaacaaaaccatgccaagagagaccatgagtaggggtgtcccagtccagccctctgactgagctgcattgttcaaatccaaagggcccctgctgccacctagtggctgatggcatccacatgaccctgggccacacgcgtttagggtctctgtgaagaccaagatccttgttacattgaacgactcctaaatgagcagagatttccacctattcgaaacaatcacataaaatcccatcctggaaaaagcctgggggatggcactaaggctagggatagggtgggatgaagattatagttacagtaaggggtttagggttagggatcaatgttggttaggagtcagggatacagtagggtcaccggtaagggttaggggttaggggtaggggttagggttagggttagggttagggttagggttaggggttaggggttagggttagggttagggttagggttagggttaggggttaggggttagggttagggttagggttagggttggttaggggttaggggttagggttagggttaggttttggggtggcgtattttggtcttatatgctgtgttccactggcaatgaaaagagttcttgtttttccttcagcaatttgtcatttttaaaagagtttagcaattctaacagatatagaccagctgtgctatctcattgtggttttcaattgtaaccacattgtggtttcaatgtgtttacttgccatctgtagatcttctttggtgaggtgtctgttcagatgtgtgtgcatttttagttgggctgtttaacttattgtttagttttaataattttttatatattttgaagacaaattctttctcagatgtgtattttgcaaatattttcttcaatatgtggcttgtctttttgttctcttaacaaggtctcttccagagtataaactttaaatattaagaaatccacactgtcacttcttttgtgtatatctaccttttgtgtcatttgttaaaattcattaccaaacccaaaggcagatagcttttcttctattgtttcttctagaaattgtatagttttgcatttttagtgtaaggatgattttgagtgattatttgtgtaagttgtaaagttttcgtctatatccatatcatttcttatggtttccaattaatcgttccctcactatttttgggaaagacacaggatagtgggctttgttagagtagataggtagctagacatgaaca

SEQ ID NO: 1244647 - DNA, 4001 bp, Homo sapiens
caccatacccggctaatttttgtgtatttttagtagagatggggttttgccatgttggcctggctggtctcaaactcctgacctcaagtgatccacctgcctcggcctcccaaagtgctgggattacaggcgtgagccactgagcctcgctccacttgtccttctcactgatgtcagcaccagaaatggccatgtggatagtcactggcaacttaaaacccaagtgtgcatggggaagtgcacggcagggtcattaaaaggagtccagcctctcttcttcccttctctatactttcacttctggaaaagaccggaaaccttgcctcattcctctttctcccatggccccatccccaccccgcttcagcccatcagcctccaaatgtagtccaagtcctcatctctgtacctggaccattgcattttcgctggcccctagcccccactgggctccccactggctgccaaataccagtgtgaccctgtcccttccttgctttaagcctctcagtagtttgtttgtttgtttttgagatggagtcttgctctgtcaccaggctggagtgcagtgacataatcttggctcactgcaacctccacctcccgggctcaaacgattctcctgcctcagcttcccgagtagctggggctataggcgcccaccaccatgcccagctaatttttgtatttgtagtagagacagggtttcaccatgttggccaggctggtcttgatctcttgaccttgtgatctgcccaccttggcctcccaaagtgctgggattagaggcgtgagccaccatgccccgcctgcctctcagtagttatttaccactgaagcagagtgaagcctgtgctccacattgcttcatggccaagacctcagggacaagtggacacaccaggcagtgggagtggatatggcaaagccaaacccagatctcttctcaaaataattttccagagggcaaaagcagatggctacaccgagaactcacgccagcccaacacactttgatctcgaggcctctggaagggaaggtgcctaatgaactactgaaagccagagatgcaatgacaaaggtaccaagactggaggtgatccaggtctttcatccaagagccccaagacgtagcctaaattcatgctacggtaatcccagcactttgggaggccgaggcgggcggatcacctgaggtcaggagttcgagagcagcctggccaacatggtgaaactccgtctctactaaaaatacagaaattagccaggtgtggtggcgggtgcctgtaatcccagctactcaggaggctgaggcaggagaatcgcttgaacccgggaggcggtggttgcagtgagccgagatcacgtcactgcactccagcctgggcgacaagagcgaaactccatctcaaaataaaataaaaataaataaattgacacagtcagtgcctcgctcccacccccacctccagcatagcaccatgacagtcttctcacataacaagtcccaaaacacaccatcggcatccagaaagtgagagtaactcgttacagttgagacctctcactcccggtcattatctcatttcaatccaagaggtagacttcttcatcgcccctgacatacacatgaggaaaaggcccagagaggtgaagtgatgcctcaggtcactcagccagttaccagtagagcagatccttcaatgcaagtttttctccaaccctacacagcagtcgtaccagggccccaggctgcaatcccctggcccagtgctgatcggtggctcccagggacacgccctgatgccagcgctggcagatgtctgctgtgaagagagcaggaaactgtcccttggaaagctgagatgcttacctgaactgtgaaagtatccatatgtgagcagctaaggagacagcagtggctggagtgctgcagctcaggcacagctggtgagaggcattcctcactcacaggccttcacccactgctagagacagtgagccccatcctgaccacttcccctttctagtcagcccacggggcagagaccctggcgtcatctctaggcaaccatcccttttccagggaagctcatgacccacggctgtccagaagccagaatcttctcactgccccgtgtcgctcccgcaaggcctaccagaggaccctcatggtgtggtagggggtcctggcaggggccaggggccagggtggagacttggcagtgggggtgggtttggtgtccccacagacgagtttgccgtgagcattcctggatgtggcaacctcagtctcaagaagagcgacaggacgccagctcccatgcagagacagatccaggtaagaaaccagctcatgtgtgacaaactcaccatctcaccatgaaggtgactcttgaaagctcctgtgcaccttggaactgctgagacatcttctgcttggaggaggcaagggacaggcttcctgtttctaaaggcgtgtgagtggcgaccttgagaaatgtggccagtggagcattttgactgagttgggtcccctcgtgcaatactgtgagacagaactcccagcgaggcccacggcctctgaccatgggggttggagtggggaaaccaattagccattttgttgaattggctggttctgactcaaatgagcagtcacattagtaaaaataggcaaacggatgtgcattgtatttgcccagagcgaatgagttgttatccatttcagtaataatgataaccagatatgtctgataaatatctgataatgtctgatatatgtctggtaaatttaacaaacaccgggctctggctgggtgcggtggctcacacctgtaatcccagcactttgggaggccaaggcgggtggatcacctgaagtcagtagttcgagaccagcctggccaacatggtgaaaccccatctctactaaaaatacaaaaattagctgggcattttggtgtgaaccggtagtcccagctactcaggaggctgaggcgggagaattgcttggacccgcgaggtggaggttgcagtgagccaagatcacaccattgcgctccagcctgggcaacagagcaagactctatctcaaacaaacaaaacaaaacatctggctcagaagattcctgatttgcagtgtttactaatttcttttttctttttctttctttctttcttttttttttttttttttgagatgcagtctcactctgtcgccaggctggagtgcagtggctcaatctcagcacactgcaacctccgactcccaggttcaagcaattctcctgcctcagcctcccaagtagctgggactacaggtgtgtgccaccgcatccggctaatctttgtatttttagtagagacagggtttcaccatgttggccaggctggtctcgaactcctgacctcaagtgatccacctgcctcggcctcccaaagtgctgggattacagagttgagccactgcacctggccaaggcctgaactctttcttcttaggctcatccaaagtttagctgctaaaaaaccttcctaaaagccaatttaaaattttcttctaggccgggcacagtggctcacgcctgaaatcccagcactttgggaggccaaggcaggcggatcatgaggtcaggcgtttgagaccagcctggccaacatggtgaaatcccgtctctactaaaaatacaaaaattagccaggcatggtggcaggtgcctgtagtcccagctacttgggaggctgaggcagaagaatcgcttgaacctgggaggcggaggttgcagtgagccgagatcgagccactgcactccagccggggtgacagagcaacactccgtctcaaaaaaaaaaaaaaaaaaaattctcttctgaggggtgaataaatgcttctgtggatagagctcatcctaggctaacaaagctgtgacttcttggtttgtgtttcattcattcattcaataaattactcaataaattattttgctaacctttaagg

SEQ ID NO: 1244648 - DNA, 4001 bp, Homo sapiens
ccaccatgcccagctgagtctgtgctcttaaccaacttgccatgctgcctctcaaacgcccatccttccatgtaggaccccatctgccctctggtcacgtgggcccctgtatgtccaggctttgctgtgagttctacaaaaacaccagcctgggagtgttgtgacactgagtcaggttccaggcctgcacatggtacgggggtctctcagctcaggcagagggtccctgcacctccccagtacctgggatgaccgtgatggttttgagggcccgcagcacccggaaggtcctcagggctgagatgttgcccaagtccacaaactctgtcaggtacctgggtagggggtggaggggggtggggactgtcagagcctggggtgggtggtaggacagaaatcagggctcctccaggcctgggatgaggattcccaagaaattgggggtaccacagggtctggggggcagggcagacacccccaaagctcctctgggagcccaagggttgggaaggacagtgcaggagctctgggggagtggggatggcaaagatagcccggctcacccagcaggtgaggacccatgggtctgtgggtcagggctgcctcatgtgattatcaggagtccatcaggagagtgctgagccagaccctgagaatggcagcttctagaattgtgcagctccccatctgcacaactgaccgatgtcccctgcagccctcagcccaggcagcttccctctttaaggcctggccccctcccctcacccaccccagcctcaggatgtcctggggcccctgctcacgccatcatgatgacactgaagtccagccagttccaggggtcccggaggaatgtgaagtcgtcgacacagaagcctcgggccagtatcttgatgagggactcaaaggtgtagatccctgtgaaggtgtacctgggggggagagggccggccgggacaggcatgtcacctgggtaggggtcagtgtggcaacgacagacccccagaagggagggacacagaaatgaaatatgccactcaggtggctaaggacactagcgagtgatagcatggccaccccagggactcaaggtgtggatgagggtcacaatgacagtgtgtctccctgaaagacaagagcagcaccacacagaggtgcaaacacctgagatgggctgtgtcccagggctggggagctcagggagcagggagacttactccacattcttggaccagggaggcgggtcactcatggtcatgaatacgcagttggtcaagatggtgatcatgatgaacatgctgaacagcgtggggcagggtcaaggaaagtgaggaagcagctaggatgggaggtgatagagggtctcctgggccacagcaccccatctcgcccatccctaacccctcccgcctctcccatcttgggcaggatatgcatggatgagcaccttgatggccccgcgcctgactacgctgaaggggctcagcaggtagagagcaggtgtggcggagaagcggaagatggccttgcccttgttgagtacgatgaaggtctaaggtgggagagaggctgtgagacccagggacagacagacaggcagacagatggatggatggcagacagacagaggaagccttcccaggcccagaccttcttattgctgtagtagggatccaggtcctccagggggatgccgatgacctccggcggggggtctccgtagatcatgggtaggttcttgccagcctccaagtcacttcgtggcttccgttcgggctcctcaatctccatctgcttattccgctgcagccgggcctcctcctccaccgcccgctgttctatggctgccagtgactcccgggtgaaggggcgcaagcactcagggcccagaggcaccagggtgcacagagatggtctggccatcctcgcatcctgggctcagagaccagaagggtggtgggtggcctggggagctgcagtgcgcagccccggggtgctgggcggccgcccctccctgggcgggccgtccactcctcacctcctgcttgcccagtggccgagccggggaggtgggcgtgcagactctatcaggactgggagatgtgcctgcaaggtgctgctgctgcacaggtgctgggcacagagcatcacccctggcccccccaccacactttccccagaagtggcagcggctgccctcaggaccgacggcaaaccaaccagattctttgtggccttgggacttggggtcaacaccccagtgccttcgactgcctcctgggcccaagctccgggaactgtgtggcttcagcctaatgggacagagagagaaccacagctggctgtgctcaggcgacctctggataggccaggatgaggggcctggttggggggttagatcaaagtgggactggcacagggacttcaccctgagggccgacgtggatcctgatattggccacctggagatgtaggtggagaccatgaaggtggcagccaggctctgtgcaaaaaggttgctgtgattgattagtgatgtctgccaggggcgcaaggaggaagaccgtggtgcctctgcctgtgtttgccatccctggcctggagggaagggaaaagaaagatgggggtgggtgtggattcctctttcctgatctttggggtacttggtgttgggctgggagagggaagaagaaagggccctgggcccggcaggggtctcctagcagttccctcccacagccctgggggctctagcccactgggcaggcagggtgaactgggagaggaacattgcatctggagagctgcaggtgctaacgtggaagagaagacgtacagggaaggtcacagggacaaggagatggacaactccaatggtgggggcagggctagagctcctggggactgcttttggctggtggtcccagcacaagctggattgggggaaggggcatccacaaggagcctttgatgcctgtgagcattgtgtggtctgggccccacctggcccctctccccttctgcccagccctccagagcctattcctgtggaagggaagggggatcacttattgcaaatggccctgggggaatgaccacatcagcaggcagttgcagtgagacccctgcagaccagctgcaggcagccactgccagacccacatggacagacctggagccacccctgcaccacagggacctggacagacccctagagacccccaaagccacacctgagggtggacctctcccagtgggccttgacccttgcagcagcgcccctgccctggtcagcacgggcgcttctcaggcttgctcaacaggtggggagggtggccagggagaggccagagccactgggcagagctggccacgcccttgtgcctggctcccagctgctccttacagcacccagggagtcgtgtttccacggggatgactctgcttattcctgccaaccctgccctcagctgctcactggcccctgtcgtgagcgtgggcgtgcatgtgcacacacttgcacacacaggcacatgcacgcacacccggcctggagccaccccacatgcagaccttcccagttgcatctcacagctctgtcatataccttgccaccttcctccccatcacccactccacgtacacccccacatgctgcttgtcactacacagaaggcgccaaccagccagatggccttgaagagaccccagggctgctgtgcacccacccagtctgcagtccctgctgtgatgatcctcctgtcctgatactgctcactcttttcattacacgagcccaagtagggccacaaaagcccacagacacatagtctggctcccaaccccagcactcgaggaaatgactctcacctgagtcaccagagctccccaggggacagatccagtgttttcttccccgctggccctcctgagcttcccacaccgcacaccgcctttcttcttgggagcaggacatcacctgtgcgtccggccactctccc

SEQ ID NO: 1244649 - DNA, 4001 bp, Homo sapiens
gttaatattaggggaagctgggtgaaaggtatgtagaacctatgctatctttgcaattttttggtaaatctaaagttgtttcaaaacaaaaagctaaaaaacaacaaaaaaggtgctagtccatagccaggaagacctttatacagggctgagcagatgataatctacttactctctgccttttctttcttgacgtgcttcattccagccagtaaagctcctccaatagcaaatgtgattgctaaagacttccaggaaacaggctactggggcagggatttcaaacataaaaattctagtaagatgcaaacatttaaccatacaaacttattaaagtagtttttaatatacatacacacaggccatgatgttaaatgtgcaaaatgtttcagggatgagaaaatgctcaaagtttctgtggatgcagttaggtctgggatctgaactacaaaggcattcatctccaggggaaagttccctaagtcagttctcttcatgtaaataaaaaaaaaaaaaaaaaaaaaaaaaagctcaagtaccacgattgttactatgtgtgaccctagctccagtaatgactttaaaaccaattatggccgggcgcggtgggtcacgcctgtaatcccagcactttgggaggcggaggcgggtggatcacctgaggtcgggagtttgagaccagcatggccaacatggtgaaaccccatctccactgaaaatacaaaaattagccgggcgtggtagcggacccctctaaacccagctacacgggaggctgaggcaggagaatcgcttgaacccgggaggcggacgttgcagtgggccgagatagggccactgcactccagcctgggcaaaagagcaaaactccgtctcaaaacaaaaaccaaaatccaaaaacacacacacaaaaaacaattatctgcttatgctgatactgagataaatagaccaaacgaaatttgggaggttaacttaactctggcttccagaagtaacaatgccaaagtagaagaggaatctaaaagtggagcttcttgcaaattacacccattatttctttgtacccttattcaactccccaaatgaagatgatgttggccaactagactaggcctaactcattaaccttcccgtagctccaaaaacccacttctcttaccacagggtagtggctctcaagttatttctgggtcagaattagaactcgagagaaccccaagaaaaaggcagatccacacataactaagttccactttttgtttcaatttcaacgtatacatggaactctggatggggctcaagtgacaaattataaaagtcctctgacttctcaatcacggtaaactttaggttcatacccttaagaaaacctgaaacttaattttttttttttttttgatggaaacgctaacataaaatccaagtcggggcatccagccacgtggagagggtgtaaagtctcaagttctctgtggagaactgggactacccgcaaggcacgggaaatgtaggatgaaattccatgacccaggtaaggcgcgcaagctaaggacaactttaggggaggcggagtagtgtctgaggttacgaccaagtgggatgtggccgctgggctggccgacagccgcgacgagcaccagaagggttccaggtgtgcactcaccccgggcttcgaggggcgcgtggagtctccggggcccttctgcgaccacgggggtggcggcctcgcagtgctgaggggccgggttcccaggcaatagccagggcgccccgaggcacgccacgcctccgcttgccgcgcgcagaactgcctcagcaagactctcgcagtcccctcggctgggccccaaaactcgagtccgcgaggcaagaagcgccaaagttggccacccagaggccgcataactcgtccgggtactaggaccagcatcgccatgagcctcggagaccgggtctcctttgaccctccccgcgatttccggtagcgttccgcttcctccggaagtcggaaggagtcgctctgtccgtcccgctcgttggtggcgctgttacatagcccgtagtcagaggcctttcagcccaggggccggcgcacggtaggtagttccctgcggctggaggcgggtctggcgcgggctgggcggtgctgcggggccgcgggacagcggagcgccgggaagggggctgccttaggggtccaggtgcgcggctgggccgaggcaaggcggccccaagcgctgggggcccccgctttggtcgtgggcttcggtgaccacagctagctcctcgcgccggggacacccccacctcggaagagagaacacactgcctagagacccacgggactgggcagcccccataaccctaccttgtctggccgactttgtcaacctcgtcctgccggccaagaggaagtgccagaatgttgactcctttacatctttgaaatagaaaccgacccattgcgattgaaatagtctttaacttaaaaaaaattgctaattaggataatttgagtggttagggcggtctggaagaactttaaatgcccagcgcttctagttatttaacattataatgtaacctaattaataaagcatagcagtgtgtaaagaaatatagacagcatgatatcccatccgttaacttagtcttcctgggtcccagtttcttaaaatactctcacggactcccttgctccctacagtttcgttatttgaagtttgttatgggttcctcatctggaactgcttatgttccttgttaatgaggccaagagcattcgtaggtttttcgttctttgtgaaagtctaacttcatttcatctgcctttatttatatcttaatatccgcaatattaaccactccctccccgcccctacctcggtggttgctttacaaaatacagagaaataaaaaaaggaaaatcgtcctctaattatcttccttaactacagatcccgctcctgtgtggcttttttttcccccatgggaccgactctgagtaggagaaactcgtgctctgatgattgttggaccagagcatggttggtttgcttgttttctatgagttagccaaactagccaactgttctgttctctaacccagtaacggaacatagtgttacctgtgtttcttgattcgcggttggactagaattttcagaaatttctgccaaagttcttaaatgtttgttcagcacttcaagtcgttaatcaaactatttttttctatcttatagttgcctgtgggtaggatttttgctcttttatctttgtgtatttgtttgcccagggataattttttcttgtaattgacaaaaagacataaaagtaccttgtgtagtcaggcagatagcatacaaaattattgttcatctctgattgcccaattgtaggttacctgatcagccacccaaattaagattgaagtcagtgtttctacctgatctattaaattttatttgctaaagtgcttcttttagtagcaacttcttcatattaattttataatattaaataaaatgctatcattgaaaacagttcttggggccagatgtggtggctcacgcctgtaatcccatcactttgggaggctgaggtgagtgggtcactggagcctaggagtttgaagctgcagtgagctgtgatcgggccactgccttccagtctgggcaacaaagcaagactctgcctctaaaaaataaataaaataaatataaaatatagttcctggctcaaagtaggtgttttataactgcattttggatgaattgctagtaacacctgagcctgatggcaaggacccatgaaactttagtgccagaaggcgcctacagtgttatcccttatagaccttatcacttttattactgctgtgaaaccaccaaagtcaccaaatgaggtttatgttttgttttccaagttagatatttttcttttctttcttttttttttttttttttttttgagacaaagtctccctctgtcgcccaagc

SEQ ID NO: 1244650 - DNA, 4001 bp, Homo sapiens
aacaaacaaaaaacatgagtgaagaggcatcacaaattagtggggctgagaatattcaatatacagtaatggagcaacaattaccttttttggagaaaaaaagagaaatttaggtcctctcaacactataaacgaaataagttccatgaggatcaagcaattaaattttaaactttaaacattaaaaaaatacaaaaatatagttaaatatatttctaatgtctggatgaggaaagaatctaagcaaaccccagagactgtacaaaagaaacaatgatggaggtgagaacagaaacttgttatatttctatacaacaaaatttctgtaaatcaaaaataaaaaggcaaacagcaaggaaagagctacaacaaatatgaaaaagggcaattttcctaactcatgtagatgatttttttaaactgaacgatatatatctgtgtatgtgtgtttaatatacgtatcctataatcccctaactccaattttccttacttaacttttctagcatccacaaaatatgttttagaaaagagtaggctaaatacattttctttgtcactttttgctaacgtaacaatttccaagttatagcatctttttttttttcctccaaaaccactctgggaaaaaaaaaagtagaggggctgttgttaaaagatgatgggggggatcccctcggtgactggagttttctgccttctatttcctcccttctcaaatttcaagccccattggtcagtaaaagaacactggtcccaacagctaaagagacaggagtagagaggaagacaatgagacaacgtcttgtaaataagaaagagccagggtggtggcctgtgtctgcagtccgggctacttgggatgctgaagtaggaagatcacttgagtcaggcagttccagaccagcctgggcaacatagtgagaccctgactcaaaacaaaacaacaatgaagattaagaaaaccagaaagtgtcctgaggagcaaaacagatgactaaaacattacagacttagctataaggttctatatacaagtaacacacgattatattgtccttgacaataacagataaggctgcgctcccttgagaatgacagataaggcgcaggtaccttttgacctaaccccaggcacttctcccttgcctggcagtgactactggtaaaattggcagagctacttattttacaaaatctcccagacactcgcctaagggccagatgatccccattttagaaaaggaaaacaaaactgttcaacaacttgcctaaggtcacaaggcaagcttgtggccagttccaattctcagtgcttgcttcagactaggagaggttttgctgaaaatcaatttgcaagtcatcctattaaacacaaatctgttttttgccaaaaaagatcgctgtgggggaagatgttatcttgtttgttttgatcaagaaaagaaagggccttatctcaatgaaatgtcccattcgtggtaggatgtaagggtacttttgaccgcagatttcagcttaaaataaaacgaccttatatcctcatttagcagccaatcatggcctttgaatcggggaaacctcattgaccagcagtttccccaaatcatacatttctgcacacagcttctatctaggcgtaggagagaacggaagcactcagaccacccagagccagaaaaggacaaaaaaagcactttgaattttttaaggaaaaaaaaaaaaaagagtgagattcaaaagcaatataattacacaaggtaagaaccggggaaaagagacatgttttcaaaagcacaaacccagtaacaaactctcacgcctggagaaaaaagaggcatggcagctggtgcgcctcttgcttgaacctacctgcgttcaggcccagcagcagcggcagcagcagcaaccaccgcgggacgggagagcgccgcagtgccagctccatgacaagtaccgcacggcagcatcagcaacaggctggacccggcgccccatcacgtgacggaggcggacggggcgggtcgggggcggggcctgcgggtcgggggcggggcctgaatgggcatggggcggggcctgggcggacccggcagcttgctgagacccgcacgccctctgcccggcaagcccaccaggacccctgcaaatgcgcaggggccgttctgtccgcctggccaggttctctgtcattttagggagagtatttcggaaaggagacatttgatgcagatgttggatttaggttgtgtgaccggatcgaaatactaaagggaataaccaccgccctttctacccctcccatctcttccttccctcagcaaaagaaccgacgttttccaacactgctacatctgcgaagtcagattaagccagctggtcgttggcaaacagcggggtttcattttcagatatgtattttttaaattatttttcttttaaagttatgtatgttataaacgttttggaaatatgaacaaaaaagttatacataactattgttggcattttttcccatagtcttttacgtcattttaaaaaacactaataaagatttttattttttttttcttttttgataatttgtcattagtattactctgtgttacgttatcttcacagcagtcattttaaagagagaatcgagggtctggggacgggaaaggaagaaaaagtggatgacagagctgttttcctctgtgtgtgtgtgtgtgtgtgtgtgtgtgtctgtctgtctgtctgaaggtcatttttacgttagagggtactgaataactcacctcacagctaggagacaagctacagcaggggctgtaggagaggctacttctaaatactgcttcaaaagtacatgtaacaaaaagcaaaaaacaaatcaaagtacatgtggccacttctcctctttccctgctcctttctccctcccctcgcccttgacccccataaatggaagtgctttttactctgcagccattgtctggacagagccttgaccccgccctgcctgtgaggtgcccctgcactgaaagctgcggcagagaaaaatatgccgccgggttctgtcatgctttaagcatgggatggtcccgaatgcataaaatccataatgcctgggcaacatattgagaccccctctctacaaaaaataacaaaaattaactgatgtggtgacacgcgcctgctgtccaagctactcagaaggctgaggtgggaggatcacttgagcccaggagctccaggctgcagtgagcaggtgttccatgccatatgggagatacataaaagtacatgcttagttaaaaataaataactatctagcaaacttttcctgtctgaagcttccaagttggtctgtatcactagggcttgaaatacacttacccttccactgcagtcagaattttagggtttcaatttttttgccacaaaaataacactacagcccagggcgcaaggtggctcacacctgtaatcccagcactttgggaggccgaggtgggcagattacttgaggtcgggggtttgagaccagcctggccaacatagtgaaaccccatttctacaaaaatacaaaaattagctgggtgtggtggcacttgcttgtggtcttaactactcgggaggctaaggcatgagaatcgcttgaacccaggaggtggaggttgcagtgagccaagatggtgccactgcactccagcctgggtgacagagtaagaccccatctcacacacgcacaaaaaaattgtgcattttataatacgctaatatgacttcaaaaggaaaaaatataaataaaatgtcacctctagttaatgatattcatattaaagtgtttaggggaaggtgtaccaatgtatacaattttctttgaaatgtatccagatgctggcacagtgacctatgcctgtaatccagctctttgggagaccaaggtgggatgattgattgagcctagaagtttgagaccagcctggacaatatagtgagaccatgtctcttaa

SEQ ID NO: 1244651 - DNA, 4001 bp, Homo sapiens
tcatctcccatctccctggatgtcctgacaggcttgcacctggatcgggcccctccctgcccctaccatctctcccacttcccaaagctgggagaaagggaacacctcaccctggatcctctgtgcagcccagagcctcccagctgtctccagcacccacgcctcagtgcggtcagccagcaggaaggtgctatggtaggagaatggcgcagcatcctccaggcagttgcccccctgcccatagtgctccagtaaccctgtgatcacatgcaaggcctcctgggcagagctgctccgttccaaagccagcctggcaaaagagagggccaagggacagaagggtgacagagggatcaatggctggtggcagaagctccaggggacagaagaggcccggagaggtttggtgataggcccaagtcacacagcaaatctgctggcactgatcgtatcaaatgcaattatgccagtggctttcaatgctctggttccatgtgctatgctttgagggttccatgaaaaggcctgaaacacagtttcagagagagaagtgtcctgagcccctaacctctctccacccagagctgctccatccactattactggttttataaattgggactctatgtaagatttcaactgaaaataaataaataaccactgctctatttctgggccaggagaggcccaaaggtggctgctgctgcagccttcttcacgaaggcacaagggcaaagtctgcagagaggaggaggcccctgtgaaccaggctgggggagggatggatgggcccaggtcaaaactcagcccctagatttctggtgtgtcaggcagatgaggaagggcagggtctgcacctgagtaggtccatgcccagcagggcttccccctccccaactggctccttcgtccacacagcctcgttgccaatgcagacaccatgctcgttggcgcccatctcagccccccatagccaagaaggacggctcagaatcacagcgtgcgtcttcgacacctgttccacttcaatgtaggtgcactggaggtgagggaggagaaaggaagcgtccactcatagaggggcggcccctcgagtgtggcactctgccaattaccttatagatccctttgaggaaggtctcattcccattttacagaagaggaaactgaggtagactgaggctacataatgagctcaggtccaggttggtagacctaaagctcatgctcttccactacttctggcagcctcccaggtgtggggagcagggaagaaggtcttaaaagaatgcagagatctgccacacctcccagcaccccataaagtctaacccacctggagccggctcccaggagtgtgagtgcctgcggggacaaacaccacctcctgcacctcgtcccggggtcggtccgagttcttggcaaagatcacagccgggatggctgaggccgggggcacggagacaaagcagtcgcaggaacatggggagtcagggctcgacgacgccatctggggagaggcgggcctctccataaccctggccacggctcagccccgaggagcagcctacccccacacgtgtaaaagacgcgcaaggaagacaccgccgtggctcctggacgctcggcgcacacaccatggacgggtgtgcgggaacggaggtgcccaccctctccccaggctccaggcttgggagtccgcaggcgggcactccgggggtcccgcccccactgggagtcccggcccttcggagcagtcgtgggaccgtccccctcgctaccccaccaagagtcctgcggccctgcgcatgcccagatacccgaccctcttctgtccaacccttctctcacccccagtactgtattcccctcaccctctcttcctccaagaccccagctcggtcccgggtgccacctcctccgcttctggccagggccgccccattgggcggagactctcaggtgacctggaaggccttcggcctcggggtcggagccggaacggagcctgcagctccgccgttttccaccagggcgcgcgcctgcaccacttcccggagcagagcggccttgcgagtcccacctggctccctgtcctacccaggcgcccatttgaggcctgacaaaggctgctaaccccacggagtcactgcggggagctggagctgggggtggaaaggatcccgcgtgaaaagggagactttgtcagagaaaggggactgctgggacatctggagattaaggaagaacctcagatacttgagtcctggtttgaatcccagaggcgcaatcccaggctggaggcgcctaggggaataagatacagaatacgagagtggtggaggctgggtgcggggggctcgcacctgtaatcccagcactctgggaggcggtggtgggaggatcacttgaacccaggagttcaacaccagcctgggtaacacagcaagacctcgcctctacagaaaatattttaaaattagctgggcgtggtggtgcgtgcctctagtcccagctgctctgaaggctgaggtgggaggatctcttgagccagagagattgaggctgcagtgagccaagatcacaccgcggtactccagccgcggtgacagagcaagaccctgtctcttaaaataaataaataagggaaagtgtgcacaaaacccatctgatcccagaggacctatctgtctgatagtgctcaaacccataggaagatcgctttaaagggaaatttagaactttctagttcaaagatttggtgcctttacctgtagtgaaactgaaaccacaaagaagtcttggccaaaggtgacacacagtcatgtggaggtacactctgatcccaaatgttttgattttcagttcatttttctctacaaaccatctctccatagccatcattaagacaaatgcatcttacacccttttgctctgtggagccctccagaatggagagaggggagatgctgcaggttatctgcttctaggggttgcactgaatctatagatggctttgagtagtatgcacattttagcaatagtaattcttccaatccgtgagcatgaaatatctttccatgtctttgtgtcttcttcagtttctttcatcaatatcttattttcagagtacagatctttcacctctttggttaaatttattcctaaatattttattattttggtagctattgtaaatgggactattttcttgatttcttttttgtatagtttgttattagtgtataggaacactattgacttttgtacattgaccttgtatcctctgactttactgtatttgcttaacaattctaacagtgggccgggtgtggtggctcatgcctgtaatcctagcactttgggaggctgaggtgggcggatcccctgaggttgggagttcaagaccagcctggctcacgtggagaaaccccatctgtactaaaaatacaaaattagccaggcgtggtggcacatgcctgcaatcccagctacttgggaagactgaggcaggagaatcgattgaacctgggaggcggaggttgcggtgagctgagatcgcgccattgcactccagcctgggcaacaagagcaaaactccgtctcaaaaaaaaaaaaaagaaagaaagaaagaaagaaaacaattctaacagtgttttagtggagtttggccttctttcaagcctactgtgctagggtgctggcggtcagtcatgctaggattaatgggaaggtgaaggctgtttctgatacagtgtcggggagggattgtgaggttgccaattaatgtcattccagaagcaaacatcgaagctgcgtgctgagaaatctgggcacctgaagcagcttgcaggaaggcgggttcatctcctgcagtttcccggcttcccactgtggggcggaaacaggcaggaggagaggcagagagaggccacagcgcacccccaggttgcagtttccaggctgtcttcttctctgtcactttctcatttcttatttca

SEQ ID NO: 1244652 - DNA, 4001 bp, Homo sapiens
aggttgcagcgagccgagatcacggcagtacagtccagcctcggcaacagagggagaccgtggaaagagagaagagacaagagagggagacggagagggctacctgtagttcttaaacaattgttgagggtcaggacaaaagcatttgtatttttaacaagtttctccagttattcaaattaatcccagatagagaatcacagttcattctgggcaatttcatctacaaccctgacatcttcaaccacagtctgtacaagatgttatatttaatgttgtatctcaggctcagcacagatcccttttctgagctccggactgaacctggttcccaaatctggctgtccatcagaaccacctgaagagctttttaaacctacagattgctactgccaagcctctgtccacctccactctaattcagtagatccaaagtaggaaaccaaaacaaagtaaaaaataagcctgacaacatggtaggtgttcactgaatgggtgctagaattattaagacatcgcagtgatgataactcatgtccttgcctagtctgactgatcagatgggttttgggaatcatgaaccagactagcccacctgacagaactctttcctccctcagcaaacagcatcatcagtcattcaagacaaaaatctaccagctatcttagatgcctctcacatctcactagctgaccttcattctttttttttaactttatctttttttttcaggcagataagactttctttttttagtctgtttttattatattgtaattttcttgactgattatcaccaccgaatctcctgtatgtagtacaattctagccatgtagtaggaactcattaagacctatgctgaatgaatccacaaataatttattactaaacattttaatttcaaacgctaaaaaaaaaaaaaaaaaaaagcagttttctctgcaattcctgtcactgctccaagtttcttacaagaaggaggttaaggtttgggtagaagggggccaaagatggaaactgaggagcaagtgtaagatgcagaagagctggaagacaaagggttgtagtcaacgagtgagctcttggagtttaaagtttcacagacagtacttactgtaactttaaaatttcagacacagcacttactgtaattttcttgtctctaaagcaggctttgaacctggatagatttggatagaaccccgactttgtcatttgctaactgcaaggctttgaataaacgatttaatttctctgcgtctgtttcctcatctgtgaaatgaggataacaatactgtccaccttacaacaatgttaataatcggaaaaaggacataggtaacgtgcctggcctgtagctcaccaaatattaggtggtgttgcgattaagatgccttagaacaattcagttctccgactctctagacctgaggaaccttcccagggaacccctaactttcccagaccacactgtcagatattctataggccccgcccctccagagcctccgagtcctccctagcccacccgagcccggtccccagcattacctgacccatagcgcacgtcgtgtgagtgcagtcggacgttgtggcgcgtattgagtagcttcaccacggagccgcaagtaacgacacccaggctggacgctcccacagcgctccacaaaccccccaacaacagcagaggtactacagccatcctaactgtatcgcggagccccaaatcttcgaagaaaactcggcccctccccggaaccggaagctaatggcgaaaccacggagagaaggaagtgaagaagcccgagtctgatctttatggtttatttgactagagcggcctgagaaaccggctgagcctggttacttacgatactctcgctctgttccaggggctcagtgacagctgccttcctgagccgcttcggttacctttcgcacccacgagacgaaagcttccgagagcgggagagagaacaagaaatggcccgcccactcccggtgacagggagccggaaatgacgtagcacgttgacgcagcagcggcggcggtggcggcggaggggccgtgcggtgggtccgtactatcttttcccagtctcggttcgacgactccattttcctcggtgggggcttagcgcactggaggagcggcgggcttcagacaggtaaagttccgactggagagcgtgtttctcgcaggagtcaggtggggaaccgggctcctagggcctggtcacgtaagggaagaggcagtggggagccgtatgcgggaagaagggggagcctggccttccctgctctatggggggaagggggaggaaagcgctgtagttgctcagagtccgaaagcttttcccagcccagtgacacccggaacccgtgaatcgggtggcacgttgaatcaacaggcttcctggcatcccgtccttctctccgcaggtttttaaaactgggccacgcaaaaggattggggatggaagggacctggggcttctgagccaggatcaggtgatcgagttgtttgttctggggatatgaatcctgtggagctttcagcagctcggccatcaggctagagggcgatgccaaattccagctctttacatattgctgaataatacaaatagaactttttgtagatggttgcatccttcatccctttctaaagatcgaaggtcttgtagaagtcctaaagcccgtccattctctatagattcatttcctcaaacgtttgccagaggcctatcatgaacatcaaaattagttattaagtcaaaactccatcttctagtttctacctttctcctcaggcactcctttgaaccagctggagaagttaattttcctgggttgttgcaagaactgatacttatttcagagggctaagatctctgaaaatacttccgtggaaattcactgtaatatcaaaagtaacaagggtgtatgaagctacatcattaatgagcattagggagtgtaaacaatattgaatttgattaatttcttcggaaaaatgtctggttccactgtttatctggaagttaccagtttgtaagtcttcagtgttttgattacagaaacataactgctcttccatcagctgtgaatttagagcccttttttacgagtaatgtccctttcaccagtacaagtacatttttattcacttggcttgtgtggctgctagattggattagcatagccttgcaactctaggaggttttaacttcatcaggagattaattacatcagaaagtggtaccgtctggagaggcttagtcaaattttacagttcttcctctgaaagcctacctagtgtggtggaaacatgatctttgtaggcaaatacgtttgccctgattctatattcttgaccttaataaatggcactaccatcagtcctgcctgtaatccttgtcttccttcctgtccactatttcccaataaaatcagtcaccaaatcctgtctctccctgaaactgttcccatcagcatacaaattatgttctggtatccttcacatccctctccaattaccatgccaattttttaaatttccattcatagatttctacctgtaccaactcagctttctcaactttcattcactcttcattttataccaatctggcttctcttctgcccactccatttttttttttttttttgtggagacagggtcttgctctgttgcccaggttggagtgcagtggccccatcatagctcactgccacctggaactcctgagctcaagcagtcctcctgaggcagcttctagtaatcaagtgccaccacatctactttgcccactccattgaagttgctcttatcaaggtcaccagtgacttctatgttgccaaatccaatggatactttgttctcatattcctctgtctctgcaatattcaacatagttactcctgcctccaaactttcatcttggctttattgacatttcactcttggattttctccatttctccggctgttccttc

SEQ ID NO: 1244653 - DNA, 4001 bp, Homo sapiens
cagggaagcccctcccgcaggaggcgcagggacagggggccacctggccttaacttcagcaggaggggtgggatcttggcctcaagtggatggcacaggtgtggacgtggggcaggaagggacacatgaagaccccaaagcaagggccatcaggtgccctggggactctataagggcctggtcctagatgagacaagaattggtgagccacctgcccagggaaatcataccattgttgaaaagtctgtagagcaatgaagttagaagggtccagacagatgctggcatcccgtccctccacgccgtccaggcttttggctagtaacactggttgtcccagagcacaactgtgaggctgctccaggatgaaggacaacccattcctattctgccagcatcagggtcctcctgggacccctcagagagggggcccagaccaaggagaccccatgcagctagtcctggtttgagggagagaggctcagaactcatctggttccagacctgcctctgcccccagatcacagagtggccttgggcaagtcatttaatgccatttggcctcagtttccctatctgttaaatggctactagaataagatgacctctgaggtcctcgcttgttcaaagattttatgatgatcataaaaataataacttttattaccctacatttatagggctcgttacaaaatttcgaagtgcttttatgtaaattacctcgtaaaatcctcccctcagccctgtgagtgagagctgattattttcatctctttgatcttggctctctggattgcctggcgcacgaggcggcgtggggagtgggttgcagcccccacagtccggacccctagggtgggtctggccccctcctgagcctgcgagagtgaaggcctagccctgcgagtcctggagctcggtccaggcttcgtctccctccgcccccagcaggcgccgctcggacaccgctgacaccactgtctggatcggcgaaccccaaagtcgaggaaccgccggtgcagccgcccttcacctcggggacctgcccggggaccagggggacgtctgggcatccaccctcaggaagcgggcagcgcagatcacacctcggatccttcgtagcactcccaaacccaaagccaccagcccttctccaccgcgaggctgctcccggcagccacaggtcacagcagcgagcggctgcacagactatcgagcgaacagcggaggctggaggcaggggcggggatgctgggtgtgggtggatgggtaggaggggaggcctcagaccctccctgtgcaccaccccccggtgggtccgcggctgcacccgcgaccttggctccaggcccgcgcagcgaagcacccccagccccagcggctggccgagcagccaggggcgggctcccgtacgtggccaagccgggcaattgctctccccgggcgagcaacccggcatccagcgctcgcccaccccactccctcgccccggggaggccatcgcctgcccggcaggggccctgcccttccccgcagacaccgagcagggaaccaggagctcggtctgggaagctcagcgtagccgagcgtggagcccggcacggaatgtcgctcccctcccaagccggcgcagggcagccacagcagacggggggaggggagcgcccctcccacttcaccttgggctcttctctgcctccccaggtcgtccccaccttcccccattcggaagccacaagtctcggagagactgccccacccccaaaagagccccaaaacttgggagatggggtgtcttgaaactccctggagagggctctgccacggctaagccgggtgtccaggaggtcaccgtgaggccggccagctcccgccgcccctcccccgcccactctcccagccccctccctgtccccacgtgggggtccctccttaccttgggctctggccgcgcggatctgatgcagagctagcagtgtccagatcaaaagcccccacatggtgaccagcctggagaggggtcctcggggtctcccttccctccgccctgttttataatcctggtggggtccgataccccgtggcttagtcccaggaaacagtcagtctacgcggctccgtgccccggggtgtaatatgcccgggaggggcagcgcttggctaccccaacccttcctcctcttctgtactagtccgagcccggcagcgcgcccggaaggcgaggggcgagcagggagaaagaggccaggccgccctctcggactagggcgcctctctcccttagcaccccaactccgacttctcccaaacagggcggcctctgcgatccggccgggtcgccggccgagctccggaataaatggacaacttcaggaaacttcctcccgtggccacgttgcccgccccctccccgccccctggttgggttctcccggccgacgcagtcaccgccgttccaggcgccgggcccccgggacccggccagagccgagcgcagtggcagacgcgggtgcgggggttcttttaggggcgccggtttcgggggacgcggtgagcatagcggtccgaatctccctggagctgaagttttcttctctctaactttgcaggcagcatctggcggggccgaaccaccccctctgggctccaccgccctcgcgccgaatcgggagacgccgggtctcctccgggggcgctggggccgggcgcgccctcggctccgcgcccagccggctagcaaactttgcgggtcccggagccgggcgcgcagccctgagcgcccatgtccgcgccagccgcggggcggcgggggagggtgctgggcttcgcgacgcgggctgtcgccggcgcccgggcgcagagcctcctgccggcccgaggatggagaccggcggctctgccctccgccgcgccccggccggagctctcgggaagacgcacggagagcccggcgggcagccccggctccggggacgcggcgccccttcggacgcccggcgatcgccgacctcccgggccggaggagcaacggccgccccagcgcctcggccgccgctgccgctcgccgagcccgccgccctccgcttcccgggctcggcgtccagagagccgctcctgcctgcgccgagccggagctgcgggggcagcgtgagccggggacgagcgcggcggaggcggagacgcggagaggggggccgagcgctaccccgtggccgcgactggagagcagcctgcgcgccgggaggggcggcggcggcggcggcggccccgagccaggcccgggagcgagccccgcagaaatacaatccgactgcgcggccgcgggcgcccagcggctctgggacccgcaggggggcagcagtgccaaccttctgccgcgccgggagagatgcgcgcgagcccctccgctctctgcccagcctttccttccagcctcgctcgcgcccctgtctcaaaggcctcataggactcccagagtctcctatagtcgggagcccccagcccccttccggacatggagtgattggtggggaggcggcggttgggaaaagggggtcggtcaaccgattgattccagtttccccttcccaagtcaggctctccaaggtctggaaatgctcagggcggagggggagacatcgggaggcctgggacctgcagaagcctgagaaagtgaagttggtgccaaggagcgtgcgttctttgtttcttcttttttccttcggagcccagcttgtaaagagtagaagaaccggacattggtggaggaattcaaacaagagagcccggaggcgtcctctgctgtggcccagagctagcgcctactccacgaagctcagctggggttaacaggcttctgttaaaatttcccgggcactgggaaaatttcaggtgccttcgcctcggtggactcctttccctgctaacaaaattattaaaaataagattttgcaactgcgttggcataaggaaaagtatattaatattgcatattaaaacat

SEQ ID NO: 1244654 - DNA, 4001 bp, Homo sapiens
gccacagttacatcgcaaagtcaggatttgaatccagtgcagaccgcaaacaccatggttttctctccaaagcagagcagctccagaggtggaggtgactggaatgtcctagattcagtgggaccaggagctgggggtgctagcagaggctctcatctccccagggtcttgtcagtcagagtcctaaacccttcaattaactatccctctaatcccagctgaagcctgggtaatacctcccaccaagaggtatctgtgtggaacctggccctatttagggattaggtgatggagataaatttccatggcaaacggccctcgtccccgttcgtttgcagagcacaacaatccagattaaggtacagagtttgggttttatttggagattagttggtattacaggtgatggtgataccaaaacccaatgctgctatacctgcctccatcccagatctgtcaggttgtctccacagccccacatcagagggcatccaatctgatctttgtgaaaattaaatcaacataagccccagcttcctatctttgcttcattactttaatgccactccctcttcacatccgtagttctgattaatttgtccaggtggtcgatggtcaagagagggggccctgacccataaagaagttggctctccagcagtctagatgaggagcagcactctcctctcctacctcacttagcagttagcaaggtaatggcctggagagacctcaggagacaggagcctgccccttcagaaggaggaggccatcagctggtgagaactggggaccaggcctggcaagagtggaggaaaacatgaccctcatctcatccttctgaaggtaccacctgccacaacaatgagcatatgccccaaaggggtcagggtgtggggtggcaggagccaggccccagtctgcttaggacctgcatctaggctggcctggaggccagtggaagggagggatgcctgagctaaactcctttcccgtagggaatccctttgcataaaaagtggggccagggaatccacttctgatgtgttcaatcccaggaggggcagggtgggccacaggagtcagaggaggggccttgcaagttctggacaaagactaggagtggtccacattgacgacaatggccaaggcatagatgaggtcagacaggctgcctagtgaagtctggggagtagctcgctctaaagaagggtggacctctgaagccccagctgatccccatggggctacagctttagccccttcccagccctgccgtggactcaagccaggagctggacaggagctatgtcgacacactgaggtgcgctgaggtgtgccgctggagggtggaggttggcctggcatttggggatcccagggctgctggagggtgtctggaagagaacaggagctctgggggcactcagacccagggcttagaattcctgacttcctgttcttgattattttggcccagcgcttctggaaccacacctgctaggaaagaagaaggggtctgttctggccccagcatcccctccacccagggacaggggaaacaacctgaaggcaggctacccagcgaaggggctgtgggccaagcctagatgttggctgtgtgagaaggggtcacagctcacctgtaccttggcctcaggaaggcaagtgacccaggccaggtgctcatgggtgctgatgttggggtagggccatgctgcaaacgccctctccagctccagtagctgccctttgctgaaggtggtccgctttctccggtgggaacccaacccgctgccaccgtctgcaggccatggtgggggtcaagctgggactccctgcaagagcctccacccagcctcaaagccctcaatcaaccccgaagtccctactcccacccctctccaaccgtcctcatcctaccatggcctgcgttctcaccctgcccacacttcccccatcagatcacctgctgaggatgcatccacagggctgggcatggagctggcaaagggtaaggtgccagagggccgtgccagagggccatgccagggctgtgcccacaccagacccccccatttgggttttatcatgctcagggtggctggccccgccttcaggagtggagaggtttagagtccagctcaagcaaggcagagaagtctcggtggggaagaagggaggctggaggccgggttgggcttatgagggtatgggtggggcaaattgtataccccctgcccctccaaggcctcgcaaaggaagctggacccagcatcccttctcaaacctcaaactggcagtctgtgcctgaaatcctatacttcatgaaaatcctcccaggggtccttccaggcagccaaagaaaaccatctctccagtgctcccaggcactggctgccccttctggagcccttagtgctctgaacctggctaccttcaggggagagggagtggagtcctctcccacaactggggactgggctggtgaagtgggacaggatgagaaggatggtagggtgtcaacgggatgaatgggagccagccgctgtcagcaggactggggaacagatgtcaccaccagattgccctcaggtctgctttagagctttgcctcatctaaccctttctctctctggcccctcaagagccagatggacttcctggggttcggaacctggaaccagaggaggttccacaggtgcagttgaggggttctaagaaagatgataaagatgtttatgtgtacagtattctcttccttggatatattctgagccactttttcttaaattttgaaaatttttttcttttttctttttttttcaagatggagtcttgctttgtcacccaggctggagtgcagtggcgtgatcttggctcactgcaacctccacctcccgagttcaagcaactccacctcctgcctcttcctccggagtagctggggttacaggcgcctgccaccacacccggctaattttttgtatttttagtagagacggggtttcaccatgttggccaggctggtctcgaactcctaacctcatgatccacgggccttggtttcccaaagtgctgggaccacaggcatgaaccaccgtgcctggcctaaattttctttttctcactctgttgcccaggctggagtacagtggtgtgatttctgctcactgcagcctcaacctcccaagctcaagcaatcctcccacctcagcctcctaaatagctgggactacaggcacacaccacccataagttgcccagctaacttatttatttttgtagagatggtgtcttgctatattgcctaggctggtctcaaacttcgggattccagcaatcctcccaccttggcttcccaaagtgctggaattacaggcatgagccaccatgcccagacaaaaattcccccccttttttattttgttctgtttttagagatagagtctcactctattccccaggttggagtgcagtggtacaataatagctcactgcagcttcaaactcctgggctcctgggccacttttccacaagaagtgtgtgcttttgaatttcctttcagtttctgcccttcactatctctcctggtcttgctgctccccatcctagaccctagacagagacctcaagaaaggctcaccctaggggtgggtttggggaagcacagtgactggttccccaagtgctcaggagtcagagctactaggatttcagatcaggatggacaaaaaagctgagccagaaccccaccaactcttgccccttctctctcctccaagaccctagtcaactccaaggggcaaagcaagcctcacccacggaggctggcctggtaactttgtcatcatcagaggagttcaagtgtctgcttagctgctggtgggttgctgggggctgcttagctcaagaggaagggtagctctcaggaggccttccccagccccaaaccggttcacagagaggtcctgagcacagagaggtcctgagcccaaca

SEQ ID NO: 1244655 - DNA, 4001 bp, Homo sapiens
cgtaagtaatcggttaaatgttcacacctaattcacagtcaaggagccctccttatgggtgcataatcattctctagcgccagcctacacggattgctctaaaaacacacctggacttgccagtcctctgtctcccctatttaaagtgagaaagaaaaatcgaatgagcctacctgtcttgttgaggataatcattaagaatggtactttatgctgaacatggtgagaggatattcaaacatacaaaactgaatatcctcaaggagcccgaagtctagctgttaaaaaaaaaagagagagacaaattaccaagatgtattttatttcagaaacttccaagattcctttttttttttttttttttttgagacagggtgtctctctgttgcccaaggtggaacacagtggcacaatctccactcactgcagcctccaccttctaagctcaagtgatcctcctgcctcagcctcccaagtagctgggaccacaggcacgcaccaccatatatattttttgtagaaggtttccccatgttgcccaggctggtctcaaactcctgggctcaagggatctgcccacttcagcctcccaaagtgctaggattatagtcatgagtcacggcgcctggtatagaattcccatctatagtactaaggtttaaacaggtttggaactttctctggtatgtctggcatacctctcagaggagaggtcatggtggaaaacatcgccatctgacagtgtgaaaacggctaaggaatgactctgggtgaccacgagtaagccatttgacttccctaggactcagtttcatctctgtaaaatgaggttttcggggagatgatcttgaaagacttccacctctaaaaccatgagaatgagagccaaactcccaagttctccaaactcaacttgaagcttttctaatattcatcttgattatgcgactgacacatcctgatgtgctgggaccacgttctttttcttttgcaaaccttacagtgttggtgcacagtgggaatccaatcatcttttaaaaatttaattgggaatattaattttagggtactctcccagatatgaggacgataaccgggtacaaacaagagttgggggaagaagcaaaaaagcgtaatgctcgtttaagaaacggtaacatccattcaggattccaccgcctggcagaactggctacactcacttaagaacctgctaattcacgagcttgtgaaccacagccaggtctcagctgccgatgctctggtccagataaacgccctacgcgggcatccggagtgacaacgaccaagtggcatccaggagccggacggcctccattgcatgacaatcgctgtttaaacaggagccaaaggccagacccactgaacgcatcccgagcaggctcgaggggcggccggcgcccggggctgctcagcaggggtcccgcgcggctgagccccacggggccaaagccccgaccgacgggagagaggggcgggcactggctccggacccgaaactccgctctcagcaaaaagcggctcccgggaactggaagcctggcgaggtgggggtgggggcgggggaggggggcgaggggcggcgaggggcgagcaggggggcggagggcgagcaggggggcgggggcacggcccgtttcgggtgccgggccgatggcagccggggctggggagggacaggctcagcaagcgggcggccgggagttccggggggcccgcccgagaggcgccggactccacggagaccgggaccggggcgagggcgcactcggacccgccgcgacgacgcgcctacctcttgtcagaaaggccgggcctgggacacggggtggcgaggggcgctcataccggcggctccgcggggcagtctcggttccactgctccgcgaccgtagctcgaccgccggttccggggagggggccggggaggcgggagggggaaggggcgcggcgacggcacttgtggttgttacgggtgacggggtgggcggggccgggcgccgggaggggcgcgcgtgcgcggccgcggccgagggagcgggggcgggagcgggcgatggttgctaagaaaggggaggggggaggacacccggggcccgaactgcgcaggcgcgagctccgacccgcgagcgtgggaggagctcggagaaggcgccggccccgtcgcactgctggatgtgcccgaggtcctcgtggcccctcccagttttgcgtcacttgttgggggcggggccgggctgggcttcgcgagtagcgggcggaggcggagtgaagccccaaggggctgccggcgtgcaggggaggggttcggctgagcgggaaaagggaagtttgcgggaggtcaaaaccaccggggccctcccgtatggctgctgctctgaggcctgcctctggtcgccctggcggctgcccccgtgcttcctcatttcttgttgactgttcaggagcaccaggctgctcgcgccagtgccccgaccgcattctcgccgagtaatggggaggaggcggacgccggtgctgcgcggcccagggctcgggagggcccgggtgagcccgggtggagcccagcggcatccttgtcaacacatccagacggctctagtgtcgggccgcgggcttgaaactgagacgcgcgcccagggcctgcccctcggaaacgagggtgccaaggtggggctgctaagtagctcccgaatttcagcaggagagcaccgtccagccccaattttcaatccggtaccactgagacattttggggtccttaagaggagctcatgactagaaaggggcacctcgcatgcccacccacacagcaaagctggttttataaccaacatgcaatttcactgtcaaagtcactgttgttccgttcacattagtcaccctgagtggctgtacatttcatgctgccattggacagaacgtttttggacctgtttaggaatttccatcaaagccagtttaccagacacacaagcaaatcattcatggcctcatcaccccttgtgttccacgtcaaaccatcatcttccagctgggtcacctacattattcactacattcagtctgactggcttttgcttgtttgtagaaatcacatccaccggccgggcgcggtggctcacgcctgtaatctcagcactttgggaggccgaggtgggcggatcacgaggtcaggagatcgagaccatcctggctaacacggtgaaatccctgtctctactaaaaatacaacagattagccgggcgtggtggcgggcgcctgtagtcccagctacttgggagtctgaggcaggagaatggcgtgaaccctggaggcagagcttgcagtgagccgagatcgcgccactgcaccccagcctggtcgacagagcgagactccgtcccaaaaaaaaaaaaaaaaatcacatccaccttcaaaagacgctttaacgccgttgcggtggctcacgcctgtaatcccaacagtctgggagacctaggtgggtggatcacctgaggtcaggagtttgagaccatcctggtcaacacggtgagacctcgtctccactaaaaatacaaaaagtagccgggtgtggtgccagatgcctgtaatcccagctacttgggaggctgaggcaggagaatcacttgaacctgggcagaggttgcagtgaggcaagatcacgccacctgccctgcactccagcctgggctggactccagcaagactccgtgtcaaaaaaaaaaaaaaaaaaaaaaattcacctgacctgctgaacttctagatgcaaccaccagtttacaggaaatacagaatagaggaacatgctaaatgacaccatgaaaaacaattggcaaagtacagactgtgggaaacggtacaagacaaatatattctttatcaaattccaaaggaaaaaaagaggggaatggtcaatctatagattaaaagagattgggaaatttgttgagccatacattcatttatgatttgcaag

SEQ ID NO: 1244656 - DNA, 4001 bp, Homo sapiens
tcccttctccaaaatgcctgggaccagaagtgcttctgatttcagaattttttcggatcttgggaatagctctattatacttactggttgagcatctcaaatccacagatctgaaatccaaaatgctccaatgagcatttcctttgagcatcatatcagtgctcaaaaagtttttgatctggagcatttcagactttgaacttccaaatttgagatgctcaacctgtactaaaaatgaggcgaggttagaactgtgaattcccatcttaaattaatcacaaccaaaaacagagttaaggaagaaacctttggtgttaaaaatattaatgaaaatggcacaaatggctttgattttacttctgacaaggtacaagtagcttcagaccattattatactaaaaacactccctttctggcagcaattccctgatgtttaccttcaacaggactgcccttctgaacagaagtaatacacagatcacaaatactgccatcaagatcccagaaggactagagaatcacaggaattcctccgcctgggtttttactacaattccttcaaagtcaccctcagttttcttgcctgtatctcactttctctccacaacgttacaaggttaaatcgatgtgaaaagcacatgctacactccagctgcctacgcacaagggaccatggtagtcagtacaggagggagggaagggagtcaatgacatccatgagggtcagaaggataagcaggtgccaggaggcagaagggggagaacacgctctgcgtggagaggcagcgtggggaaagcctttgagagagaggaggcatgcaggctgggcctcaaagcgtgccagggtctgttcacagccagcgaggcggagagcgtttccaggaaagaactcaggagtgcgactgcaaggcaacctcaggtggcggcaggacccacagcccccaggggagggaagtggtgagaggtgaggccaggggtcactgtggtgcatgacgatgtggcatagaccatgccttgccgggtgcagacagaaggccctggccttcctctccaggagctgggatggagggagcacgaacaggtggccagagtcacattttcagaaaattaataagagactcatgcgcaggatggtctggaaaggatgcaaaacccacatgtggtagccaattatatttgcttcttaaatgttcttactttggaagttaaaaatatattctttatatttatctgctcccctcttctactcaaacatgttctgaatcccattactgccagaatcttgaaaaatcactcagtatctgtctcttcatacactttatgtaaacaacacttaagcagtttaatcacctgctcagatcccaccacagataagtcccattcaaagccctaagaatttattaagtaccgaacacgaacaattcctaggaaaacaggttggctaccatttgttctatacggacactgaaaaccatctaaactgacttccactgcactctaattaaaaaaacaaaaacaaaaaaaactggctttgtacattccagtactgtgacgtaccaagaaattgagacttacaaaggtttcaaacaaaatgaatctttttaagtgacatatagggcagagtaagcacttactaagaggtagccttagctagaactaggccattttcaaaatacacacaccatccttccaattcctgaaacaagagtggtcagcataaggtgtcacccacgcagcctcaccttgaatttcaaccacactaaaaacgttcccttccctgtaaaattctccatccacgtagactcatatttgcacagacgttcactttaccttggcatgcccaaccagatggcatttaaggtatccaggctaaggagcagctaactcagaagctgcactgacctctccagagctctgtcagcgtcaggggcagttagcaagcgcctcccttactccctccacattctcttccaagcctgtcactctgccaccaaatgcactgctaggctgcagggcagagactttttatcctcaggagaacgaggacttcaatgcctaaaacaaagtccttgtccaaaaaacatgttttgaagcatacaatacaatcttactcaataaaaagataagtcctgccttttgtttctgcactctcttaccctgacccgtctttcagagatatgttaaggtcagtagattctgcatactgtcagcatacacaattctaactgtggagggttctggaaatgaaaagactgcaaaaagtagatgtaactttcatctctgggatggcttaggtaccagaacctgagtttttcagcatgagctacaagccacgcgagtttctacaaagtatgtaagcaggccctgaaaaacagaagcattctaatttgattaaaaacatcaatctatgtactagctcctagctctttccattggaaggggtgaaaagcaatgacatctcagttcatgatgagcaaacctggcaaccagatcttgatttccaaataccagtccctattacaaaggaatccgtgcggttgattacaagtctggagcaagggaaggtcaaggcgaggcagaaacgtttctcaccaggaggcaagggagtgctcagatgggcatatgcccaagggacagaggaaccagcctgaaggggctccactcaccaagtctgggataatttgaacaccagaaagaaaaaagggtggcaaagcattataaaccacatagtgatactcaacaggggagaaaatttttcaggaaaaaaaaaatctaatcaacacagaaggattgccaattaggaaatcaccattttctagccaccaatgcacaataactgattcagacaaggatcatcaatgaatgctaacgtaaggcattcagaagagacagggcctcaaattatcatcctgcaggttacagataaatttaacaaaggaacaaaggtgggtacctttacaatggaaagatctcatgggcaccaccttcaccaaatgactgaactgagccccagcaacaggacagccacagagcctggcgtgatgcagcggaagcagacacaaacaccacaggcttctgcggccctcaggacaaagatggctgacccttagctaatcatggggaaataaggccgggcatggtggctcacccctgtaatcccagcactttgggaggtcaaggcaagcgaatcacctgaggtcaggagttcgagacccgcctggccaacatggtgaaactatgtttctactaaaaatacaaaaattagccgggcgtggtggcgcatgcctataatcccagctactcgggaggaaatcatcagacaaacccaaattatggaacagtctacacaaccaccctagacgcttaaacgaaaaaaaaaatgtcagagtcttgaaagataaacagaagcagcaaggaactgtctagaataaaggcatctaaagagagaacaaccaaatgcaatgctgcattagctcttggattggaataaaaatagctatcgaaacatctggggaacaaccaaggaaatgcaaccatgcgtttcatattgaataacacttttttattttttatttgtatttttctgagacagggtctcactctggtcacccaggctggagtgcagtggcacagtcttggctcactgcatcctccgcctcctggctcaagcgatactcccacttcagcctcccaagtagctgggaccacaggtgcacgattctttgcctgtgataataatcacagctagacagaagaatatctattcttaggcaatacatgttttagtatgtaggggtaaagtgtcatgacataaagcaacttactttcaaatgtttctacaaaatgtatgtgcacatgtgtttgtgaaagagacagagaaagcaaatgtgctaatttacctagcggacatgcatacaggtgttcacagtacttttctaccaactttttaaaaaatgagcattactcataataaaaagtttggaaagccattaatagtttga

SEQ ID NO: 1244657 - DNA, 4001 bp, Homo sapiens
tttcagttccttcaccagctgcacctgctggggcactgtgcccagcaaacttttacccatccttcagattctagctcgagggtttcatcctcagaaaagccttctagtctccatcggatcttttttttttttttttttaataattaaaaaacatagaaatgaggtcttactatgttgcccaggctggtcgcgaactcctgagctcaagtgatcctcccaccttggcaccccaaagtgctcagattacaggtgtgagccaccacacccgccagatccttgggatatatgttcttacgttcccttccttcagagcactcactttggcttgaattatgcccttttttttttttttgagatggagtcttgctctgtcacccaggctgcagtatagtggcgcgatctcggctcactggaacctccacctcccgggttcaagcgattctcctgcctcagcctcttgggattacaggcatatgccactgcacccagctaatttcatgttggccaggctggtcttgaactgttgacctcagatgatctgcctgcctcggcctcccaaagtgttgggattacaggcattaaccacggtgcccggcctgaattatgacttttttttttttttctcggagttttgctcttgttgcccaggctggagtgcagtggtgtgtgtgatctcggctccctgcaacctctccacctcctgggttcaagcgattctcctgcctcagcctcctgagtagctgggattacaggcacatgccaccatgcccagctaattttttgtatttttagtagaaatggggtttcatcatgttggccagactggtctcgaactcctgacatcaggtgatccacccgcctcggcctcccaaagtgctgggattacaggcatgagccactgcacctggctgaattatgccctcttaagtgtgatcatttaaccttgtctccctaactgggttgtagttcccagagaacaagggccatgactgttttcttcatctctgtatccgtaacatttaacatgatgtcaggccaatgtatcaacaaatgtttattgaatgaaagacatgacagtaacattgtttatgaagttttgaaaagcaagggctctctgatactaactacaaccattttctttaaacgtaggtcctgtttgcagtatcatacatgatcatcaaactgctgctagaatgctcacacctgttactgcaaattcaaaacccaggaaagacttcttccgggaatttactttaggtcagggttgggctgcctggtaccatgctgcacccacaacttggcaggctcaacaacacaggagcctttccccagaccgtctgacctgaacactttgtcaccatgcttgacatacctggatgccctgctgaggtcacttcgaatgctctcatcaacgaggggcaggaagaaaatagtggttgctgcatgttttcagccaatcgtcgggggatatttctcattttctgttgaaaccttgggggaaaaagtaacataatgtgctttaaaaggacaaaagtcattcgacgcttaccacactcctagaaacctgggctaacccagccagggaccccaatgcttttctgctggctacggggcctccctacagctcctcattccaatttcggtggctgtgtgcggaccaagttctcttttgtcgcctcccgtccaagccctacttgcgatgggagaagccgtccccgaaatcccgggcgccgtggagggggtctggtctctgggtctctggtcacccggtcagtgcctccagcccccggcagagctctgttatcgtcccggggcgagcccaattccgcaggctagggccgatggcggcggaactgtggtcagggctgccctgagtcatcctgcggactgcgagtcggcgaccaccaggaggcgagagcgggtttcccctccaacaggccaaagcacgtgtctccacttacttcccactcccctgggcggaagtagctccgtcagcaacttccggccggaagtgataacttaccatagagatagcagctagagagtcgatgactttggatctgggtcatccaagccggacttaaaggggtcgcagcccgcgcggtgtgattaatggggactagagcctgggccagaggggagggccctggagcgagggaatcagaaggaacatcccatttcttgaaagcccgctgggttcctggagccgtgaaagcattatctctctactcctcatgcaaccctctgaattaagtgcaaagaccactcctgtcttgtagatgagaagtggggcgctccggagatgcttggttacttttccaagcacagccggccaggaagtggcagagctgggttcacacctaagtcatttctgctccaaacccaatgccctttccaccaccccaggtggcaggaaggagaaagctcaagagcagaggggctacgtgaagatgcaggccgtcctggcctattgggataccccctgaaaagcctattgctccaaaagacctggtagattcccgacagttcactgtctgtgggcacaggaagcaacgaacaggaatcttgctctgagtctaatcccacaaccaaggaagaattgctggaccttgtctcagaggcgtttgaaccagagcaactccatcttgaataggggctgggtaaaataaagctgagacctacttggatgcattgctaggtcatacagctcataaagaccttgctgatcaaacaggctgcagtaaagaagacggccaaaatcctccaaaaccaagatggctatgagagtgacctctggttgccctcactggtacacgcccaccagcgccatgacagtttacaaatgccgtggcaacgtcaggaagttaccctacatggtctaaaaaggggaggcatgaataatccaccccttgtttaacatatcaccaagaaataaccattaaaaaaaaaaggccaggtacactttgggaggccgaggcagatggatcacttgatgttgggagttcgaaaccagcctgaccaacctggtgaaactccatctctactaaaaatacaaaattagccaggtgtggtggcacacacttgtaatcccagctacttgggagtctgaggcaggagaatcgcttgaacccaggaggcggagggtgcagtgagccaagactgcaccactgaggccaggcatggtggctcgaccctgtaattccagcactttgggaggccaaggcgggcagatcacctgtggtcgggagtttgagaccagcctgaccgacatggagaaaccccgtctctactaaaattacaaaaaattagccaggcgtggtggtgcatgcctgtaatcccagctacttgggaggctgaggcaagagaattgcttgaaccaggcaggtggaggttgcggtgagccgagattgcgccattgcactctagcctgggcaacaacagagaaactccgtctcaaaaaataaaataaaataaaataaaataaagaccgtgccactgcactccagcttgggtgacagagcgagatttttatgaccgcacctccttcacaatgtctttgagttgtctcactcacattcaacaatacatactgttagttttattaacttggaaatatttaacttacatttttgttttgatggaggagctacagttctgttttgttttaccatatttcatgagtttacataagaatgaaaggatataattgtataatcagcttaactggagtaaacaggtttgtaaacaacgcaagtggcttcaggcaggcattgggctcacctggttggagcagaagccgggtgccccaggaggggagcctccaggtttcttttgtgtgggtgatccccgtcagtaccacttggagtgggagagggacttttctcaaaggaagcaggggtgaaggcgtcctggacaggcgaaaactacaggcgtctactacatggccctacctctgccccctggtggtggctcttggtggcgctgctgaccacaggtgatgt

SEQ ID NO: 1244658 - DNA, 4001 bp, Homo sapiens
atcacaccactgcactccaacctgggagacagagcaagctccatctcaaacaaaacaaaacaaaacaaaaaccccaaaaatcccataatggtatcccattattcttaggccaaagaccaacatcctcgcctgagccgcaaggccctgtatggcctggccttccctatcttttttttttttttttgagacagggtctcactctgtcacccaggatggactgcagtggcaccatcatgactcactgcagctttaagccccccacctcagcctcccaagtagctgggatcactggcatgggtcaccacacccagcttacttttttgattttgcatagagacaaggtctcgtgttacccaggctgatcttgaactccttggctcaagcaatcttccagcctcagcctccaaaagtgctgtgattacaggtgtgagccaccgcgcccagctcttcacctttttagcttcatttcccaccattctccactttgctttctgggctacaaaggccttctttcagttccttcaccagctgcacctgctggggcactgtgcccagcaaacttttacccatccttcagattctagctcgagggtttcatcctcagaaaagccttctagtctccatcggatcttttttttttttttttttaataattaaaaaacatagaaatgaggtcttactatgttgcccaggctggtcgcgaactcctgagctcaagtgatcctcccaccttggcaccccaaagtgctcagattacaggtgtgagccaccacacccgccagatccttgggatatatgttcttacgttcccttccttcagagcactcactttggcttgaattatgcccttttttttttttttgagatggagtcttgctctgtcacccaggctgcagtatagtggcgcgatctcggctcactggaacctccacctcccgggttcaagcgattctcctgcctcagcctcttgggattacaggcatatgccactgcacccagctaatttcatgttggccaggctggtcttgaactgttgacctcagatgatctgcctgcctcggcctcccaaagtgttgggattacaggcattaaccacggtgcccggcctgaattatgacttttttttttttttctcggagttttgctcttgttgcccaggctggagtgcagtggtgtgtgtgatctcggctccctgcaacctctccacctcctgggttcaagcgattctcctgcctcagcctcctgagtagctgggattacaggcacatgccaccatgcccagctaattttttgtatttttagtagaaatggggtttcatcatgttggccagactggtctcgaactcctgacatcaggtgatccacccgcctcggcctcccaaagtgctgggattacaggcatgagccactgcacctggctgaattatgccctcttaagtgtgatcatttaaccttgtctccctaactgggttgtagttcccagagaacaagggccatgactgttttcttcatctctgtatccgtaacatttaacatgatgtcaggccaatgtatcaacaaatgtttattgaatgaaagacatgacagtaacattgtttatgaagttttgaaaagcaagggctctctgatactaactacaaccattttctttaaacgtaggtcctgtttgcagtatcatacatgatcatcaaactgctgctagaatgctcacacctgttactgcaaattcaaaacccaggaaagacttcttccgggaatttactttaggtcagggttgggctgcctggtaccatgctgcacccacaacttggcaggctcaacaacacaggagcctttccccagaccgtctgacctgaacactttgtcaccatgcttgacatacctggatgccctgctgaggtcacttcgaatgctctcatcaacgaggggcaggaagaaaatagtggttgctgcatgttttcagccaatcgtcgggggatatttctcattttctgttgaaaccttgggggaaaaagtaacataatgtgctttaaaaggacaaaagtcattcgacgcttaccacactcctagaaacctgggctaacccagccagggaccccaatgcttttctgctggctacggggcctccctacagctcctcattccaatttcggtggctgtgtgcggaccaagttctcttttgtcgcctcccgtccaagccctacttgcgatgggagaagccgtccccgaaatcccgggcgccgtggagggggtctggtctctgggtctctggtcacccggtcagtgcctccagcccccggcagagctctgttatcgtcccggggcgagcccaattccgcaggctagggccgatggcggcggaactgtggtcagggctgccctgagtcatcctgcggactgcgagtcggcgaccaccaggaggcgagagcgggtttcccctccaacaggccaaagcacgtgtctccacttacttcccactcccctgggcggaagtagctccgtcagcaacttccggccggaagtgataacttaccatagagatagcagctagagagtcgatgactttggatctgggtcatccaagccggacttaaaggggtcgcagcccgcgcggtgtgattaatggggactagagcctgggccagaggggagggccctggagcgagggaatcagaaggaacatcccatttcttgaaagcccgctgggttcctggagccgtgaaagcattatctctctactcctcatgcaaccctctgaattaagtgcaaagaccactcctgtcttgtagatgagaagtggggcgctccggagatgcttggttacttttccaagcacagccggccaggaagtggcagagctgggttcacacctaagtcatttctgctccaaacccaatgccctttccaccaccccaggtggcaggaaggagaaagctcaagagcagaggggctacgtgaagatgcaggccgtcctggcctattgggataccccctgaaaagcctattgctccaaaagacctggtagattcccgacagttcactgtctgtgggcacaggaagcaacgaacaggaatcttgctctgagtctaatcccacaaccaaggaagaattgctggaccttgtctcagaggcgtttgaaccagagcaactccatcttgaataggggctgggtaaaataaagctgagacctacttggatgcattgctaggtcatacagctcataaagaccttgctgatcaaacaggctgcagtaaagaagacggccaaaatcctccaaaaccaagatggctatgagagtgacctctggttgccctcactggtacacgcccaccagcgccatgacagtttacaaatgccgtggcaacgtcaggaagttaccctacatggtctaaaaaggggaggcatgaataatccaccccttgtttaacatatcaccaagaaataaccattaaaaaaaaaaggccaggtacactttgggaggccgaggcagatggatcacttgatgttgggagttcgaaaccagcctgaccaacctggtgaaactccatctctactaaaaatacaaaattagccaggtgtggtggcacacacttgtaatcccagctacttgggagtctgaggcaggagaatcgcttgaacccaggaggcggagggtgcagtgagccaagactgcaccactgaggccaggcatggtggctcgaccctgtaattccagcactttgggaggccaaggcgggcagatcacctgtggtcgggagtttgagaccagcctgaccgacatggagaaaccccgtctctactaaaattacaaaaaattagccaggcgtggtggtgcatgcctgtaatcccagctacttgggaggctgaggcaagagaattgcttgaaccaggcaggtggaggttgcggtgagccgagattgcgccattgcactctagcctgggcaacaacagagaaactccgtctcaaaaaataaaataaaataaaataaaataaagaccgt

SEQ ID NO: 1244659 - DNA, 4001 bp, Homo sapiens
gcaggagaatcgcttgaaccagggaggtggaggttgtggtgagccaagatctggccactacattccagcctgggcaacaagagcgaaactccgtctcaaaccaaacaaaacaaaaaacaaacttctagagcgggaaaagatggaggcggcaatcagatttctctcaaaccacgaacacaggggtcggtatctgaggcgccggcaccagacacggcagggtctgagtgctccctgacaagcgatgatgcgcaggcttggagccatgccagtgacacgcctaggaaagttcacgcaccgcccagcacgcctgcgcatgcctgttcccgctccctggtgccccgggcgcctgcctgtcccggctcccatgggtgctgggtgtgtggaagctccggccccctcgggctgggttcattggggtcctcctgtgtggtcagtggactctgtacccccacagcacctgaggggtggctgacactgctttcccagctgctgcaggggctcagggaacacaggtgaccccacgtctctaccgagaatgagcacaccaacacctctcagaagacagctgcagcctgcagaggccatggaccccacccaggcccacggtgtggacggctctgccctggtctctgctgagccaggcccagaggggaccccaggtgagcagcaaagccccccaggcctggggctagaccgggctaacccttcctgctcagcacctgttcacctgtcccctctgctggtggcctcctgtcctcccgctctgggctcagcagcagccccgtggagaggccctgccaccacccccgccctgctggagacaggcctcctacgcgggctcctgcagccggtcgccctgggcctcctagaagccggggatcctctgctgaccaccggcagaaaacgtgcttctcaagctgcaggtgattcaccagtagtgggcaaggaactgaatgtggtgattactgcggagtcagcaaaacccgcgtgagaacgggcagctgagggcctgccgggtgagggaagcctcacggttcctgtttcatgagtttgctgtgagtgcacacgaggctgtggctgtggagtgtgcaacagtccacgcgtgcctgcgtgtgctcatgtgcgtgtgtccaccagcttgtgtgcacgcatatgagcgagtgcgttttgctcccagcttggtcgcagcgacggcgcagggaaccccgggtgaggccgaggaccgggaagggaggagggggctccgacccatcggacttaggggagccccgggtccgagacgccgcctctgtcccttcaagagtcgagcctggcgcacagggcagggacgcgggtccccacaccggccggcagctcgttcccgcccatactcgggtacgcccgctgcgaccccgcccgcctggcctgcgacgcacgctcagggccagcggggggtgacggtcccagaggcagaggcgccgcagccccagagtccccatccctgcgcggaccggcaaccccagtgcaccaagaggccctaacaccgagcccccagcaccgagtccccagcaccgggccctcagcaccgagtccccagcaccgagtccccagcaccgagtccccagcaccgagcccgcccctctggttcccccgcccgcccctctccgcgcctcaccgggtccgctcctggacgcgctcctctgggatgcagcttctccgcgccccggagccccaggaaaatgaaagacacgagagggaggggccagggaggaggcggcggacccgcgcgggacccacctcccagatgaggaaggagctgggtttacgggaagcctccaagtttcgggaaccacccgcgttcacaacaagcgtgacggtgaatttattattttcacgggaggcaccgcacccgcggttcacgctaaaggaagcaggaaagccgccgggagcatttttccaggagagttcgtgcctgggcgggtccagctcgcgtgcggcgcgcgttccccgcggggctgtttggctccgctcctggaggcctcgagtctgtgcacggggcgagctgggcgggccgagtgggccgcggggagggagggcggggggcggcccccagatgcctgggagtgcgcgggcagagtgagctggacccccggagggtcagaggccctttcataaaagcgcgcagagcagaggagtgatgtcccccagctcccccgcagagggtcctgcacctgcggcctgggccttcaggcgtcctgcggcccctgcggaggtgctggcctggccagcccgggaggaggggcccagcctgttggggcaggagattggggtgcgggtagaaggctccaagacgcatccgggccgggaacccacagacatcccaggtgggcaggaggtggctcgaggaggcctggaggacccggcgcctggcggggtggcaggcgggccacgtcctccactagaacccgagggggcacgcgggcaggtgcgggcggggtcaaggatgaccaggtatcttcgggacactaggaggaggccccacaggctgcagtcacgtgagtgggcaagtccccaccgggcagatgatgggggacactggggcgtgggcaatgcccccagtttcatggaagagaggaagaagcagaaccaaactccgggaaaccctcaaatgtggggaatggacggagcagggccagactggacgctgaaccttggagcctgcagctcagccatcagacccagggtccagaggtgggtggcacagaacaaagtcccccgggatgttccaaaagagaaactgtcgccaaattggcaggtgaaacacagcctgtcatcctcccagcaagacggcaccatggccggggcacagaggtcagattccccagcccccgccctcggggaaaccccagccaccctggctgccagtgagatgctggagagggggctgaaatcccacctgcccacgtcctctgcacagaggggcttgtccccgaggccacatcccccagcagccacagcttccttctccttttttcctgcctactagatctctcaactcagagggggctgcagttcctgggggcaggggggtccggctgcttaggcaggagcacctgcaccgtgaggctctggagggcagctgaaggctggcaggcttttgtcccgtgaggggacaccactgggggttggaggaaaacgcatatcctgataaagcatttcatgttgtgaaagtgaaactagtttgtttattttggaagtaatacaggcacagaaacaaaatagaatgaaaccaactgttgccttttcctccccaccctggcttcaattcccaggttgagttatggacactgccttacctatccttctagaagttttcctggtccatacaaacagcacagccatccactcacgtttatttctttcttttttttgagacggagtctctgttgcccaggctggagtgcagtgctgcagtctcgatcactgcaacctctgcctcccaggttcaactgattctcccacctcagccttctgagtagttgggattgcaggcatgtatcaccacgcccagctaatttttgtagttttagtagaaataggatttcatcatgttggccaagctggtctcgaactcctgacctcaggtggtccgcctgccttggcctcccaaagtgctggggttacaggtgtgagccaccacatctgggcagtatctttccatttcttttttttgttttgagacggagtctcgctctgtcgcccaggctggagtgcagtggcgcaatctcggctcactgcaagctctgcctcctgggttcacaccattctcctgcctcagcctcctgagtagctgggactacaggcgcccgccaccacgcccagctaatttttctgtatttttagtagagacggggtttcaccgtgttagccaggatggtctggatctcctgaccttgtgatccgcccatcttggcctcccaaagtgctggattacaggcgtgagccactgcacccggccgtat

SEQ ID NO: 1244660 - DNA, 4001 bp, Homo sapiens
actgccaggctcactcccaggcttactttctgctcaaagtggggcttaatggagacatttcgcagctcttctggagccggcactcttccatcctactttccttaagcccagctctcaccatggcaacaggctcctggtgctccaggctcttaaccctccctaacccctcccccgcaaccccacacccctttcccaccttacccgagtcagggtccagaggagactttggagtccacctgagtccatcttcctccatggggggcccagagggcactggtggagaccctctcaccccatcctcagccatgagagcacctagcagacccagccggggtggaggtggcccccggggggagtcaaaacgacaacagggggatggcacctgtggcgtcgcacccccttgctggggtgaaagatggttcttggggtgtgcgaggccccgccgccggccccggtggcgcccccaaagcttccagtggaatgtcagcgaggtgctttttgagtagagcagcatccggaaggctctcatggctcggcggcggcgctgtgagcaggtttttcgatgagtggggcgggaagggcggggccgctgggaggttcccagctgactccatcttgggggcagcctccaagctgccacttcctcctcttcatcttcatcctcctcctcctcctcttcttcctcctcttcacttgctgaggcatcaaaagagggtcgggggacagggaggcgtctggctggcactgtggtccctgacccaggatctggcccaaaccctccacctgacttgagtcggggtttgggaggtgggggccaacgaagacgctcccgcctgggacttgagtaagctgggggtatgccgggtccaggaggctcaggcccccaggacccggtcccttgtatagtctctttcatcttccagtaccctgaaaaacaaaagatcagggtatcaaaatctaagcatcaccccaccgcagatcctgcctctcttcctggccatgcctcctctggattcagatgcaaataaagaaaagaggaaaaaacgcaaaactcctaacttaagatcttcccggttaacgcggtccacaaggggcccttcagggtctgtgccatcatctctccccagtccagagacaagggaaaatggctaagcagcaggcctcagagatcttatttctaagatcaccaggccaaacccaatagcactgccaggttctacgtctttattttaataccaccagggctgtcctttgagggcccaacaagggcagtttctttcctcagggacatgataaccgtggtacttgaggagaatgcaacttgcacgtggaaactggactggaatgggagacagttctctaacaccctggatgaacggggggcatgggaaggctgcggtcatctcaagtgcagatgccagggatatggttcagggggcagaggctgataaacggggaagaactttgaaggaaacttaaagagaaccgaatcaagacgctgggacagaacggagcgcacaagccaggccggcccagccccctcctacttcatcctcggggaccagaatgcaacccggcaccagtccggtcccacgagcttggatggctcggcgcacacgggccttaagaagcccctatgcgggcctctgggccccggttcggtgggagcgaggcccaggaatgggagaggccaaggcagggctggggggaggggagggggcgtcctcaccgggagcggggaagccgggcggacgggcccgaaggcgggcgtctccggcctcaagcttcccggctcatctctccggcgacggcggcggccccgccactcctgctgtctttaggcgcagccgtctcaattcaggattccaacgcttctgggccgcgtgccgcgccgccgagcaccccgccgcgccgcctctggctctgcttcagcttcagcttccacctccacctccacctccgccaccgccgccaccagcgccaccgccgccgccgccactcctccccccctcctccttcccctcccgcgagccccgggcccaccggcagcggtggcgcacgattagtacgtcacacccggcgaagagcgccggcgcggccaccaagcgcgcggtcccgtctacccgaggacgccggcgccacgggactggccagcccagagcgctacgcgaggctgcgcctgcgcacatccgccgcccggccgcgcgtggcggccccgccactttcccttttgcgccgcgctctgtcttctccgcgctcgcgggcctgaccctagcggcatccccagtaccttgatccggcggggggcgcgccacaggagagccaggagggcgggagatccccgtacgaggaccgggctgaggcgaggcagtgggggaaatggagccggggtatcattcattctattttatttaactttaagcagggcttgatcagaaagaagagctcagaggagtgaggcaacaccaacaccagggcgtacgatacacccgaggctcctccgacaccagttccagcccggaagggcttggaatggcctgccacgccggggcaatggagcgcgtgaaagccaaaccttgggacccgaagagtaatttgactgcgaaggcaccgtcatcgtcgggcaccccctgtagacgggcgcataatagctacatctctggagatagtgatggaaactggggtccgatagatggagagaaggacgtaggataaggcttcttgtggggtgaagaggcagagggcacctggagagaggtgtggcatggagaaccaggggttttccctagcagagggcggcttcgtggacttcggccaaccggcgggtgcttccctcgagcggccgctagatggtggtgctgttctggatgcttccagtgggccccgaccaggtctggacaatgcctggcgcccgtcccccgcccctcatctacacacacgcaagaattcggagctccatggggaacagaagcaagatatccgtaaaatcaaagtctagggggtgggaatgaaaagggaaaagtgaggaacggggagccaaacccaggaagacgcctctgttcctgcacattccctctcctttatatactcagctcttggctgtctccagtatgtacccaccctggtcttccaagctgggagccactttttataacacaatcacagtttcacaaaccccaggaaggttccatgtggagagaggttaagtttcgcccttgcccggggaattatgacactcagaatatccccttggtgtaaatggaagacacctgagaaaagagagaaagtagattcgcagtgaagcacagccatccagatgccctgtttccccctgccttctccagctccaccgttcctctgcctcctgtaaggacccggcattctgcacttcactcctcagacccgcctctgtttaggtttccaacctccctcctagcggtagctccctgcactgctacccccggtcagagacgtcctgctttcggctgcccacacggctctcacctgcgctatagcagctgttgtaggcccggtccgggtgggagggcatacttcttatacatcggaatagagtctcctgccttccttggccttctcgagacaccacctgacccatggtgaaagtcacgtcttgaaacaggacctggcagggaagggagatgttgaagaaaacaggatggcctggctcagttctgggaggcctcaggagcgctaacgagggaagaaagaagggtctgctgggtttggtatgaatagaggggtcaggaaccctcagtagggggccaaagaggccctctgtgaagctcagagtgtggctggggttacctggctatacagcagataaactccagcatcctggattcggacaccatatccttgggcctgtaggcctctcccacgcctaagagctggttgccacatcacctctgtcacatcggagtcatctggaggtgagagtgtgtcggtcaggacttcttggcactctcaggtgctttttggtt

SEQ ID NO: 1244661 - DNA, 4001 bp, Homo sapiens
catccccagctgttcacccagagaggcttgtgaagctcaacaacaaacatgatgccttccacaagccaggcatcgtggccaggccaccagagaattcctgccaggaatggaatctggaacagactctatggtcaaccattcccagatcagaggaatcagaggccttggacaccagcaccacagcgtctccatcctgaggctgcatggggccatgccggctgagggacaggccggggagagcctagctctctcatgcattagagagcacctggcccatctccatgccatcctacctccagagagtcagagaagaccagcagcccagctgcttgggagccttcttttcttggcttctggggagcagctctgctgctgaacagggctggagagctgtaattatcgagaccggataagagctattttaggaaggagccaccctgttgccaaggcttttgacttcctaaactaaaacaagatgcacagaaaaaggggatgaaggtgggggagaacagggaggagcctgctcagtcaaaaacatcaaatcttgactgaagggaaatattaaccccttcccaaaggtacagatttgcatctaggggtgagcaaaaggctagctaagacaccaccatcccctggctttggaaaggagggcataacctgatccgctacccatctccctgcagactccctctctaagaccctccaagagcacttactcagcctgttccatctattttgacatttgagcacaaactatttcatattgttgtttaaatgtttcctgtctgtgttttatctccccaaccacatggcaagtttctcaaggccaaggaatgtgtgtgctgtgaaacttcaattcttcccctaaaagtgcctagcagagtgctaggcaactgaataaaaattgtttatggaaggaagggagggagagagagaggagggaaggaaggaagggagaaagggagggagggacttactgtcttgcatggagataatctctgaaagtagccactcccacctatagctgagctcagggcataaggttggataagaacccatggcagtggcaggtggcagccttgtttctggtcacctccccttcagctgttccattatctgagcttaggctgacccccactatgcactcatttgttttctatctgtggccaactgtccatcctgagtcagcctatgaatgggacctattagaggccattgctaggctttgggtaatagagaaatatggcaagagaaaataatggaagtaggaagagctttgaccatcttatcaaacatgggccaagaatagccaaagtacttatgggaacaatgcagcgaaatcaggacactgccaaatcaggacacgggactgctgacagcagagtccaccttgagtttttccaagttgaggacccaaatagtgtgtaacccaaaaaagcgacccctttctggaatgccccaggctgaaaagaggagaaccaggtggggactgatccaacggctacctagacggccttcccacagagcacttggcaagagtcatcatctgccaaaaggtctctgttctttctcggactgcaactagctcatacagtgcttttgtgcaaatccccctctggggagatgcggttccacaggtgcacagcttggcaaatggaacacaggttatatttcagccccccacttgccccctctaccaggtgctcttgtgcagtgaacaatctgcccaaccatagggagcagctctgtctccctccatgcccactcccattacaggacaggagatggatttggattgtggggtgggcccaggaagactgggagtaacctcccaggggcattcttacctcctcatctgtcataacagagtagaagccaggcattcccagggggcagcaaatggaattcagagagtgccaataggaggagaaaaagagaaatttactaaagatgcccagtggacttgggcaaacctggcccaatcccttcctagtgcaagtggcccaaacaacagcagctagtatttactgagtgctcactgttgccaagcaccgtgctaagtgttttattggtaataacttgtaataatcctcacaataaccctaagagggagccattattctcagtaacagatgaggaaactgaggcttggagaggtaaaataacttacccaaggtcacagtcagaaaatagtggacccagggcccaaatccagttagataactcgagttcgtactttactatgcccctactttatagagctttgctccctctgaggagcaggactgcccttctctgctctttgctgaccatcactaggagggttcatgctggttgggattggatggaattcccagggctctctcctccccaggaactgctttatccatagccctggcctctgtcatgctcatagggctggagtatattttgggccacaatgctcacagcaagaagtccctgctgccaagatttactccttgaggtcttgtccccaccctcccctgcccccagagaggccaagagtataaagggagaggagggtcacaaggcctggggacacttctcttaaggattctagagctgcaagacacactgatggcctcaagggggaggcccagacatctctgaagatcttgcctgggcagcaccaataagtaccccaggtggtaaacttggggcatgaggagggttctgaggaaccagagaaacacatgagaagagcccccagcctgaattagcgtgaagtcaactctgagcaagactgtgaagcaggcggtttgctttggtgtattttttaaaatcatgtgatagatgaccaactaagctgaaaaggccatgaggcttaaattattctccattccagaagtaacttcctgttaaaaggagactcttgaaaatggaaaaggttccaagccccaaagaaatgactctaatggtgaaattttcagcaagatgagaagttcctctgcttcttcaggtcaaaatcccagcatttatctcctaaacgacccagctctgtagatacatagatgccactcctcacctgtcctcccatcccccaagctcccacagtgggcccataggagggaaaagcacagaccttttagccaccagatgacacgattgtacatttcctcagagacatctgaaagtaacagagagatggttgcttttcttctctctgtgggatgcacatcccactctccactacttgcagctccctttctagctccacatttctccactcaaaggtgccctcagcccttggtcctctccaagaagctcctccagcctaggactatatatcgtattcccactctccctttctcttttttacaccctctctctgtgccactgtgaatgcctttcccctcctggaatcccagctcatctgcatcccaccctctccactttgtagccagagtatttacctgaggcccttattctatttaacagcccttgccagccctcaccccagctcagttcttcatccccactcaggaagcagctttcaaccctgcaagcccctctctactaccttcaattaaaaaggtaagcagtgttgcctggaggagtcaatgcctgtcgcccggcccaagcatccatcatcaatgtcattagcttggagcacagagaagctggcagggaaggaatggagcaataggctcaaggataggactagctttggcactggcaggagagcagcccttaggcccagaatgaagaggtggtctttcctgcccaccccaacatcccatctcactaaattggggctgcacctgggcagtctgcttcttcacatacccaggaagaaagcagtaaacctttgaatgggttgtttgcaggtgtgcttgggggtctgtggcacttcactcagtggtgcccaacttggaaactcctttggtggtgatggtggtgataggcttgccttctctctctggaacttcagatcctcacagaaagggctagagtctattttaaaaccggacaataaaaga

SEQ ID NO: 1244662 - DNA, 4001 bp, Homo sapiens
ccaccccacatacatacactctcacaggccaatgactcctggctgttttgcaaaacagtacagccactcgctgcttgctccctgcgacctatactcccttcccactcacggacacacacaccatccccacctgaaacacaccctgcccaacccagccctgccccttttttacctgccaccatgagggtaaagtcaaagcctttcttcacggactttcggtggacttggttggggagggttgcaaagcccacatactccttgtcatcctagtagacaggaaggcagaatgcatcacggtgaggagccaaaggggccccggcacccagcgccaatcttctctccctttcaggcctttgccccagccttaaaaaagcagtgccagacttctgtgagttcccatctgaggccaccagctgggcctcctgcccttgctgaaactgcaaatttccagtgcccttgggggcagatatcttggagctagggctgacacaggactgaaataggtcccagatacacacacacacaaacacacacacacacacacacacacacacacacacacacactctgctccctgcccccggtcttcctgcagcagcccactgaaaggcaaaggcagggctggaggctctacctcagaggaatcatagggatcaagcttgccccatgggctgcggggcctggcagatgggctgagaggggctggggcacagaagtactgctggttgtcagaggactggggccgcgaggggggtctgaactccaggtcatcatcatagaggtccggggcctggggccttggctccgggacttggggcctggatgcccaggtcttagcctctggtgggtggcagctcgcatttcctgagaaatccttcacgaacttgctcagttctccatcatccgtggtgtcctccaggaaacgcttgatctgggggaagcggggtgggtagaatagatgggtggtgccgggaagggagccggaagggaagaatgaggaaggagacagaagacaggagaaggcaagagggaaagggaaagcacttgtggttagaagaaaaagaaactgcagccaagacagaggaagtgctcaccatccctccctcacctgctcacaagcctccccaatccaatatgccaggaagggtcccagggtccaggaagagccctgggcacccccagagccctggcaactgctcttgggaactaaggaactccagttctggtctccttctcagcagcatgttttttgaggctgcctttcctggggttctggcctagccagggactgtctcaggccaggaagtaaggccagactgattaagatagagcagacagaggcattaaacccaaaaggagagtacagtgcatcagaatggggcagggacatgagggaagtaggcaggggagaagaaagctgactgcatcaggcaggtcaaccagcagggggttctgtacctcctgtcactactggtgagctgggggactggggtacagattctactgctggtgctcaattcccagggttcactgcccagcgctcagtatagttgatcctaccccttactccagacactgagccacacccaaatctgaccctgggccctgggagagaagagtaaacccgccagtggatgctgactgtgggtgggaggcagctgggagagaccaggtgagggaggatggaagagcctgggaaaggctgggcctccagagcttctgacagcccccaactgtgagggacatataaggggaagcaccctgagttgtctccttaccccctctgcccagagccggcagtgcacgagagggcctggcctgaaccatgacccacagggagtggaaggcagagaatggactgactcctctgtagaagcctgttctaccccatcctcagctcagaagaggaactgtttcccccaactctcattgtcagctctagaccctaaagattctcctctcctttgggggtcagcctccttcgtggggtgcctggcagtgctgggctcagctctgcctcacaatacccacgtgccacccccagacaatggacaagggccggctgcagaggctgactcactctctgagggttagccaagccagtggggactaccccagaccactgtggagtcccagctagagtgaggaagataagatagccacagtcttcctgcaaagggaagaattgagggaggcagatatgcatactgccaggtgtatgccagagggaagaggttgagatagggaggttagagggaaaagtctgctaggagctactgccaggctgttgcctctgaagtcttcacacctgcttatagccatagtctccagtgctcgcctggacagaggggaggaaaagaggccccttagcccaaaactagaaccagcagatggaggctgggtgaccagaagaggctatcctgaggcaagcctaacccaaggcttttctcacctatgacatttgtgaggtccagtggtgaccatacatcccagtctatgcctgctgtcctggcatcatgattaattgtgccctttcactctcaaaagtgtcccagcttagacaattaattacatggcaacagagaaggggtgggactgggggcagcacgacgtgttgtctggcagctaataagtctggggaattccaggaaatcctgcctctctgcacaaatccacaatgacccagccgttggtctgggggtcaggacaagggtgggagagagaaagctgtgcttcacctggtttcccaggagcactgagtggaggggcagggaagggagaaaggaaggccctaatgaagatccctagcccccatgatcttccagcagagcctccgggaacccagcaccatcctcatctctgccagccctggctgctcatccgcatggagggggccacaggggctctagacaaggagtcaggacaccagggtcctcacctcctgcctgtccatccccactcccagctctgccagtgaccaaatcattttctgactttgagccccaatcccagccaaggcagggggaagacaggtcacgtccacccatctcccagagcagcaccttaccccagcttcagtcctgtcctcagggacagaattcccttgccatcccagtgaacggtccatgtcccacgcttcagactccctgtcagaaagctctaggtctaattttatctcccaggcaaagttcctcacacacagaaacagccttgttttgatgctgttgttgtctggcttcctggcttgctcctttccctttctctttgacccccttctgtctctggcaggggccaaaaaagcctgtggaatgtccttccccacccctcttctcctccccttcccttggctcccaccctccaaggacagctcagctgcagcaggatcacttggttcctctgcagtcccctcctcctctgattggctgtcccatgacgcctgcctgctgcctaccctggtgggcacagcaccaacctcccaatgtctgtttgcagccaggcttttgatccatttgacctctcctgttaacccccaaggacactgtggcctgtatgaggactatgagctatccccaagtgacctggcccatcagcacatgaggacagccacctaggatacccattcccaaaggatttcaatcccccagtctctctttcaccttaactttaagcagtgctggagtaggtgagatgtcctatactcccccatataggtttttgtgggaatggtcccacacttcttcccaagtgttcatttgtttttttttttttttcctgtgaggaacgtcactgtttcagaaatctgctcctaaatttccctgcagggagcatcagccacagagaagactttgctccagggactccccttaccctaggacacctgacctctgacttatagcaacctgtatcaattagatcactccatggcttccatagtgtcaacaggggagctgttagcacttggtctctgaggagcacgggttcaaggcaatgggaggctggca

SEQ ID NO: 1244663 - DNA, 4001 bp, Homo sapiens
actgcatcaggcaggtcaaccagcagggggttctgtacctcctgtcactactggtgagctgggggactggggtacagattctactgctggtgctcaattcccagggttcactgcccagcgctcagtatagttgatcctaccccttactccagacactgagccacacccaaatctgaccctgggccctgggagagaagagtaaacccgccagtggatgctgactgtgggtgggaggcagctgggagagaccaggtgagggaggatggaagagcctgggaaaggctgggcctccagagcttctgacagcccccaactgtgagggacatataaggggaagcaccctgagttgtctccttaccccctctgcccagagccggcagtgcacgagagggcctggcctgaaccatgacccacagggagtggaaggcagagaatggactgactcctctgtagaagcctgttctaccccatcctcagctcagaagaggaactgtttcccccaactctcattgtcagctctagaccctaaagattctcctctcctttgggggtcagcctccttcgtggggtgcctggcagtgctgggctcagctctgcctcacaatacccacgtgccacccccagacaatggacaagggccggctgcagaggctgactcactctctgagggttagccaagccagtggggactaccccagaccactgtggagtcccagctagagtgaggaagataagatagccacagtcttcctgcaaagggaagaattgagggaggcagatatgcatactgccaggtgtatgccagagggaagaggttgagatagggaggttagagggaaaagtctgctaggagctactgccaggctgttgcctctgaagtcttcacacctgcttatagccatagtctccagtgctcgcctggacagaggggaggaaaagaggccccttagcccaaaactagaaccagcagatggaggctgggtgaccagaagaggctatcctgaggcaagcctaacccaaggcttttctcacctatgacatttgtgaggtccagtggtgaccatacatcccagtctatgcctgctgtcctggcatcatgattaattgtgccctttcactctcaaaagtgtcccagcttagacaattaattacatggcaacagagaaggggtgggactgggggcagcacgacgtgttgtctggcagctaataagtctggggaattccaggaaatcctgcctctctgcacaaatccacaatgacccagccgttggtctgggggtcaggacaagggtgggagagagaaagctgtgcttcacctggtttcccaggagcactgagtggaggggcagggaagggagaaaggaaggccctaatgaagatccctagcccccatgatcttccagcagagcctccgggaacccagcaccatcctcatctctgccagccctggctgctcatccgcatggagggggccacaggggctctagacaaggagtcaggacaccagggtcctcacctcctgcctgtccatccccactcccagctctgccagtgaccaaatcattttctgactttgagccccaatcccagccaaggcagggggaagacaggtcacgtccacccatctcccagagcagcaccttaccccagcttcagtcctgtcctcagggacagaattcccttgccatcccagtgaacggtccatgtcccacgcttcagactccctgtcagaaagctctaggtctaattttatctcccaggcaaagttcctcacacacagaaacagccttgttttgatgctgttgttgtctggcttcctggcttgctcctttccctttctctttgacccccttctgtctctggcaggggccaaaaaagcctgtggaatgtccttccccacccctcttctcctccccttcccttggctcccaccctccaaggacagctcagctgcagcaggatcacttggttcctctgcagtcccctcctcctctgattggctgtcccatgacgcctgcctgctgcctaccctggtgggcacagcaccaacctcccaatgtctgtttgcagccaggcttttgatccatttgacctctcctgttaacccccaaggacactgtggcctgtatgaggactatgagctatccccaagtgacctggcccatcagcacatgaggacagccacctaggatacccattcccaaaggatttcaatcccccagtctctctttcaccttaactttaagcagtgctggagtaggtgagatgtcctatactcccccatataggtttttgtgggaatggtcccacacttcttcccaagtgttcatttgtttttttttttttttcctgtgaggaacgtcactgtttcagaaatctgctcctaaatttccctgcagggagcatcagccacagagaagactttgctccagggactccccttaccctaggacacctgacctctgacttatagcaacctgtatcaattagatcactccatggcttccatagtgtcaacaggggagctgttagcacttggtctctgaggagcacgggttcaaggcaatgggaggctggcagcccagaagcttcagagctgccatttaggtgggagataaattaaggggcctggttggaagtgtgcactcaactaggggtcaggggtccactgtttctggttgggtggaaacatcttttgtgagtctggatagtgtcttaatttgaggaccttaatgttcagttgtgaatggcccttccttgcctcccagcgaggctggggagagaaagcactcccagatgatagataccttaagctgctttgaacctgagaagagaaggtgcatcccaagtcacaggatggtcattaatgttggcctgtcattcttttcacatgtaaatttaaaccccctggcatagctgggttgggggggtctcccccactgattcccaaagcagctaggacactgacctcctttgacaaagagaccctcatagaggagtctgatctgaaccagtcagcctaagaacttggctggcttgagggcaggggcctgaggatggggactttggtgatggtggttggggtggaggggggtgtgtctttaattagagaagaacagtgtggcctcggacaagccgaaagcaccaagacctcagctgaactgaagttagtgtgtggcagaaaaagcccctctagcccctgctgggcttggcactggggacaatcagtgcttccctaggcttccatccctagaacaatcagtccatccatccaccatgtggggagaagtgggggaaaggaataaggacaggcctctctcaggaacccccgttgggggaaggtcacagggtcaccaagacttcctggccaaggcttgggcctctgcctggacacagcttgagagacaagagcccaaaaggttggccctaccaaacctgaaagcttctgatcccagggggcccagggagctcccttctggaggctgcccacagccaacatcccgccccacaggctggtcagtgatccccccctgctgtaaacagtttgtgtcccccaatgcagagggcaaaggctgtggggcttccagactgagaggagaggacggtgtgtggcctagaggtcctgacacccttacgttatttgtggcaggctctggcaacaatgtcaggagaagagattacatcttcagagccaagcatcaaaaacttcctacctgggcacctccagggaggctggctggggttactgtttctcttcccactacaggcaggtggcagggatgggtgcccccacccccacacactgcagagggacctggctggtggggagggagcgggtagatgcagcaggaggaagctttcccatggttcctgtcccaggggcagaaggatatagctaatcccaccgggcaggatggtgggctgggcctccccctctctggggtccctttgggaaagggccagggactgccccttgtcaggctgagggaaggaggggcc

SEQ ID NO: 1244664 - DNA, 4001 bp, Homo sapiens
taaattaaggggcctggttggaagtgtgcactcaactaggggtcaggggtccactgtttctggttgggtggaaacatcttttgtgagtctggatagtgtcttaatttgaggaccttaatgttcagttgtgaatggcccttccttgcctcccagcgaggctggggagagaaagcactcccagatgatagataccttaagctgctttgaacctgagaagagaaggtgcatcccaagtcacaggatggtcattaatgttggcctgtcattcttttcacatgtaaatttaaaccccctggcatagctgggttgggggggtctcccccactgattcccaaagcagctaggacactgacctcctttgacaaagagaccctcatagaggagtctgatctgaaccagtcagcctaagaacttggctggcttgagggcaggggcctgaggatggggactttggtgatggtggttggggtggaggggggtgtgtctttaattagagaagaacagtgtggcctcggacaagccgaaagcaccaagacctcagctgaactgaagttagtgtgtggcagaaaaagcccctctagcccctgctgggcttggcactggggacaatcagtgcttccctaggcttccatccctagaacaatcagtccatccatccaccatgtggggagaagtgggggaaaggaataaggacaggcctctctcaggaacccccgttgggggaaggtcacagggtcaccaagacttcctggccaaggcttgggcctctgcctggacacagcttgagagacaagagcccaaaaggttggccctaccaaacctgaaagcttctgatcccagggggcccagggagctcccttctggaggctgcccacagccaacatcccgccccacaggctggtcagtgatccccccctgctgtaaacagtttgtgtcccccaatgcagagggcaaaggctgtggggcttccagactgagaggagaggacggtgtgtggcctagaggtcctgacacccttacgttatttgtggcaggctctggcaacaatgtcaggagaagagattacatcttcagagccaagcatcaaaaacttcctacctgggcacctccagggaggctggctggggttactgtttctcttcccactacaggcaggtggcagggatgggtgcccccacccccacacactgcagagggacctggctggtggggagggagcgggtagatgcagcaggaggaagctttcccatggttcctgtcccaggggcagaaggatatagctaatcccaccgggcaggatggtgggctgggcctccccctctctggggtccctttgggaaagggccagggactgccccttgtcaggctgagggaaggaggggccaagcgtcttaccatccctcctggtgaggcaggcagtgtttgtgggcctcctctgcgttttccaaatgaagttggtactggcccctgtgcccagggtaggtgggtgaggaggggttactcaggtaaaagctgacccaggcgaggatggggaccctcacctccgcttattactgatgcgccttccccagcccaacaagcgcgtctccaccagcgggcacctccctcagcacggacccaccccttcgtcctagagcgcaggcatcacccaggggttggcgcccactccgtggctgctcagagggaaaaacttgggagcagcgacgcaccgccgcccggcagcagtgccagcctgtgcccggggccggcgacggcgcctcccaccctgcacagccgcggctgcggtgccgcgggtccccttgcagccgcccgggagcgaccggccctgcgcaccccagccctgccccgcgcccgcccgcctgcctgcctgccttaccatggctgcagcccgggcggggccggctccgcctggacagcgcccgagcgacccgcggcggagctgcgcgccgacctcgcagcaccgccgtcaccctcccgcctccccgagtgcggaccgctgcgggaggggcccggcggcgggggcggagcgagtcggccccggggcggggcctgtacctcagctgctagcggtgccggcgcgaagtgggtcggggtgcccagctgggggccggcctcgcagcccgcgacccccggatgcgcagagtatgcagagtcacccaggacagagcggggagcctcagctcctcgtccccgggctgcactggacacctggctcttttttactcagctccagaagcaccgcgggggcttgagccagttcccaaagaaaaaggaacggcccacctgacatccccagaaggagacgcctttggaagggagggggagttgctgcatgagttggagagaaaccattagttaccgcagggattcaacaaggttttcacaaagtgaatccggctgatgcccaagttactgatcactacacctcctaaaggggaatgtcagatattctccacctccacccgagctgtgaaggggcaggttagaggcaggttcccttcatgcagtaccccagattacagattaaagaggatttgctgcacaaattatccagggatcatctgctggaaggatagaagggagaggctgagtggctttaacagggcggtgtagccttgcctgtggctgaggacagtggggagggcctcaggagaggccaacccaggcgtgacccaggcccagctgggccactcttcctctgacaagcaggtgagatgccgaggggacagatgccccagaagctttagaggcattagaggctcagaaaggtcagagcagcagctaggggaaggcagatgcttggtgagtggggtgttggtgagggattccctgagctaagtagggtctgagctggtcaggctcctgtggaagtttccagaagcatgtcccttcctgacccgcaagacccctctctcaatggcaggctgactggcttctgcctgaatacactctggacaaaactgagacccacaggcacggccctctctgttggtagaagtgccagaggcctgcctgctgtatttcagtctgacctgtgaaccagtagcactggttgggaccagtcagaactcagccaggggagggaagagggcctggggcagcaggtaagatcaggctgagaaaaacaatggggctgctactggagatgttattggctgtttggcactggtggactggaagatggcagggtgttcatgagccagccggttgaggagaaaccttcctagctgggtggccttgagcaacttacttcacctgtcagggtctcaatttccatacctgaaaatgaggggattaaactagatgatttctaagcttccttacagctctggccttctaaaagtggatgcagtgggggaaggaggatatgctgtatgctactataggccttggaggaagataagagaacaaggcagcagcaggaggtgctggagaaaggttggacatgcagtgattcaggagagggcccaggatctgagtgaagggggaggacgtgtaggatgggggcagcagcttgggttccctgaaagggaacctctaaaggtacagagaggctcccggaaaagacctggggtagatcaggggatcggaagctgtactcaggaaaacaaagacataaagagagaaaccaatggcagttggaagtctgcagaagcagcagctgctgctaccatcagccccaaatgtcaagcttggactatacaaagccccactgttcaaagccctgggcctccaatactcatgtatgcactctaagaatacctcttgcgtgcttccagagtcctgtggcctagggtaaggagaaagcctacatcagggaagacaggccccagcagaaacccttgttttcctctattataacatgcccctccccgtggcctcagctgaattccaagtgtggacacagacacatttcaaaaggcagcccaaccagctcatcctcagctgtggctggaatcccagctcttctctggcacctgctgcccaggcagcaggttggt

SEQ ID NO: 1244665 - DNA, 4001 bp, Homo sapiens
ccctccagtcccactccatacaactgcaacacagtgacccagcacaccttgggccactgccaagcagggagcaaaccagaaatggtctgagccctcccttcccccatcctcagaggggcctgcccctttaggtaaacacaaggaggcaccgaggctgctgtacaagagttggttcctgctcactccacaaactctacttccacctactgcaaaaggttctgtccttttttttaaaaaaaaaaaaaaaaaagaaacccagtgaggggtggggtaggtgtgtgtggaggagaggagaaaaggacaagtgatggtctccccacctcccagtaagccgcaggtgcagagactccaagcctgcctcagggcccttccggcatctgtgcaggagggtctccgcagaaaaaacccaggacccacgacctgggaggaccccggtcacccccactgtctggacccaccagtgggaggtaaagtgtaagaaaccaagggcaaagggccctccctgggcgggctagagatcccctggaaagggccatgcaccgcgcgatccccacaacaatctcaagtatttggagcatgttggggaggaagccccggtgccaaaaccaagcatgtgccacctggaagcccgctcccgcccaccagcacaccaacccacccacgctcctgacagagctgtgctccgggtgcgtagagggccatcttgttcgcaacaaccgggtgaaagttgaaattctaagctactgacccagaagggtattttcggggaagttctgagtaatcctctttgagacaaggtactttatcactcattttggttcctaaatatggaaagccagaggaaaccgacaatggcccaaaggcagggggatggccccgatgactccttcacctccaactaaggcccatgattctgttctcctatcaataaaaattaattcatggatccttggcaggtacctttctatctgaatgaattaaaggagggacattaaacaaacggtttctagatttagaagaggagacgctatttataatttgaggactgaggaggacaaaggatcctgcctgcctggatcctttggagaaaaccacaaaggaaaaaaaaaaggaaggaaaagacaaataatgaagatctggatttctcttaacctgcccttgtggcctcggtgtgcccatctgtgaaatggaacttcagagtgccagagcgggagcctcttatgaaatgaaagctcctgaaccggctcatggtgaggcccaagtcaggcccccttcgcctacttaaggcgggccctgctagggtggagtgaggatgtcagccgcgggcggcgtcctgagcgcaaaacgtgaacccgagtcgccaagtttgggcgctgctggacggtcccatctggaggccgtcccgtgccccactaagtagaggagaaaccgaagagaatccgaagaaaggatgctgcggcctggaccaccagccctagaggctgaacccaaggacacccctccacctagccccgaccccattcacccacacagacgcacagggacccaaagcacccggccgacctggaaagtcagcgattcctgcgagggtgcaaggggcgaggaagagggagcgtcccccagggcagcccctccgacactcgagcaagggctggagacagcgcaggggacggtcggctcaggtcgaaagcggcccgacagcggccctgtcctgggaggaactcgacctgcagtgtgcccgccgcggggactcgctcagctccgggggcgcctcgccactcccggccgcaggcactcaggtgagcagcgctggtcccgggacaccgacccctccccaccccgggcgcgaagcccacctgagtaagacttcttcatggtgcctccgtggccgccgctcccaggaaagtgtggcggcgaggcagcggggcgcgcgctcccagggcgctaatcctgggccggtagtaggaaggcgggaagagggggcggcccgccgtctggagtgcaccgaccgggccccgccccggccccgcccccgccccgcccctccccggagatgcgcatagaaccccggcccagccggctgtggtcccgcccctgacccgccccctccccgccccgtgaacgtgcgcgccgagccccacccccgcccacccctgcgctgcgctgcacctggcggagcggggctggcgggcgccgggcctgggagggggcgcccccgcgcggcagcgcagaccagaccagaccaggccaggccgggggtgggggccgcctgcgtggcccgccgcgcccgcagctctgcacccccagctccccgcgctggcgccaatggctggttccgggagtcgccgcacttcccagtcccgagtccgggcggggcgggcccggccaggtggaagcgggcggaggtgcgggcgctccgggcggccccgccgggcgaggcggcggcgccgggcaccgcggcggcgccgggcacagccgggggtcggagccggggtgccggcttagtgggccggggtagggcgggacaggacacctgtcctgctacttttctggtaatcaaaagggcagagtgcgtcgattgagttggagccttagtttcctcacctgtaaatgggcgcgttggacagatgatcatttgttctccctgcgctgggcaccgtgcgcagctcggtgtatcggtgcagcggggcagacacagggagccgccctttacaactcgggtaacgcaggcagtggtgagaggatgcaaaacttgcacggaagaattctctctacttggatatccttaaagtctccacgataaagcggtgtttccaacgtacagaggaagaagtgactaattatgactggagggtggtgtcagagttttattgaggcgaaatcaaaacagggttttaaggaatgagcaggaattagccaggcagccaaggtgatggaaggcagctgttcccgaaagagggaagggcgtggcggagcctgggaggcctgaggtatcacagcgagtgtggagagacagaggcagggccgggcccttgcacagctgccaatggaggccgtagaggacgagaggaaggcgggaggccagttgggaagcgctcgctagttctgggtaggggcgcagcattgccttctcctgcagccctcccaaaaatgcacaggaggctgaaagtgtcactaacagccccgaaaaatcctcctcctcttcccctctcctttactctccttgggggtccaagaagcattttcatttcctgcctgagtgtgggaaacttatatgcatgagaacggaggcctatgtggcaccgtgggttcgttccggcccacctgcttcctttcttgagtaatctgtccagccacagccctgcagagggagcagcccagccagaggagtttcccctcaccccaggtagagctgattggaccggagtggacactggacttcaactgagtccacccctttccttatctgggggttagaggctcaggaggcctcgggagggaagtgctgtaagggaggggagcagggagtatggacgaattgtgaacagcgtcctggattctgggatgtccacaccctaaccgcaacccccacccacacgcccactcaccgcttgtaccagcaccagcagattccggcttaggccgtgtcctgacttggccagcaagcaccatgatgacactgcccccagcctagccatgatgacactgccacgagcctaatgcctgggattcccaaagtccagcggtgtctcaagaatctgggttatgggtgcattgctggctttgtccattttactcagcacaagtcagaggtgccctggagcacagtcaccctgaggatgccagccctggctgttccctggctttgggtaggtgggttcctctgcggatgctcacgcttctgcctggggtcacaattcacaggaacctgggcacccaggacccaaggacacctgcgtggagtgatgttggacacatcacatgggtgcctcctgtgtgat

SEQ ID NO: 1244666 - DNA, 4001 bp, Homo sapiens
tggaacacagaagaaatgctacagccaatgattgttgaagttttcctttcaatttcctgttcatgttgtttggcaataagtaatacagaaaactgacaacaaaaagcaaaagagaaagaaaagatacagtgtacagtttagattgctttccttaaaaaattaaataataataataaaaagcataggccgggtgcggtggctcacgcctgtaatcccagcactttgggaggccaaggcgggcggatcacctgaggtcgggagttcgagaccagcctgaccaacatggggacaccccgtctgtactaaaaatacaaaattagccgggcatggtgacgcaggcctgtaatcccagctacttgggaggctgaggcaagagaatcgcttgaacccgggaggtggaggttgcagtgagctgagatcgcgcctttgcactccagcctgggcaacaagagcgaaactccatctcaaaaaaaaaaaaaaaaaagcataaatgcaagctgggcgcggtagctcatgcctgtaatcccagcactttgggaggccggggcaggtggatcacctgaggtcaggagtttgaaaccaacccggccaacatggcgaaaccccatctctactaaaaatacaaaaattagccaggcatggtggcgcgtgcctgtaatcccagctattcaggaggctgaggcaggagaattgcttgaacccaggaggcagaggttgcagtgagccaagattgagccaccacactccagcctgggtgacagagtgagactccgtctcaaaaaccaaaccaaaccaaaccaaacaaaacaaaaaaaagaagcggcataatacaaagtcccggcagttaaagcgttaacccccagctaccaggaaggctctgctatccaatgactcatcgccccagccaaggtcagccacaccttgggtctctgatgctggaggcaacatgatgccaacactggcgagaaatccaccacctcctcctccccgcccctcggtgccggcctctgtgtgcacttgcagctcttccactaccggtgcctccatggtgtctacgccaccggctcacctcccagcaataacccgacagcccgacacctctgtagaccctgtggctacagagctaaagttccctgttattagtgggttttgcagacaaccctccaaatccctctgggttgagttagtcaagtccttaacaagctggaagatgacaggggttggatgtaacccacttccaactggcttgggttacatggacattattcctcttctgggatctgatttgggatggaaacaggagccatagttcatgggaaggctgtgaaaggaagccccggccccagggtgcggatcaggttgatctgcggaacaaggccccaggggcggcccacccgcctgctctgcccagcccttcctggtaaccacactcacccggggcccatctcaaacctggcaggcaatgctgctgctcccatctcagccgctgccccaacacgcctcgcctggccaggacaggtgcccaggcatggcattcagggacatcctcggcttccggggcccaacccctggttcccaggtgcagcgctgggaaaagcagagggccccggccatggcgcaggcctcgtcacaggtcatttaagcagcctgggaggagccggaaagagagcaatgcacccacctggacagagactgaagccacatccccattgagaaaagatgacactcctgcctggaccccttctctgaaaccccaggccggggtggggtaggagtcagcgagagagtccagcgctccaaaggggactttctggccctccgtgccccctaacccagcacttctggggacccacacactcagggcagagtggccatccagggttcctctcacccagacacaaaggccactgaaggccccgggccaacaccgctctgaggatgaccagcgacttgagttcctgccagagacagcaggcagcctgggtctaagggccgcccagtgacttgaagctgggatcatcttacattccctgcgccactcctgtttcctgtcctggaggttttcaggctgccaacagtcatgctttggagaaccaggtcagattaggctgggaacaaagctcagctgtcacagagctgccgagaggccattggcaagcagtgcccaggagccgcccctcctctgccagcaacagctcaatgtctcccttcacaggggctgcaaatgggcccatgcccagggtggggtcagggagataaagcagagagaaactgggctgggagcagagagtgccatgctctaccctggagacccaaggccaggccaccctgcagagctggtgcccagagcctccagcgtacaggagaggaggcaaacagaacctgacactcagcagcgcccggcagacgcttctggaatgaatgaccaaatccacatggagagttgaaatgggctaggaacctcagggagacgggcagctcacagctcagcagggccgctccagtagagcaggccaatgccaggcctcctggcaaatttcccggggcccaggcacaactgtcacatcaggaaaggggcaggggtgaccagcccatcggccacgggggcacttcactgctcccacagaagctcggcacccacaggcctgggtgacacacgatccccatgcctggcatcacgatggctgcccaccaagtccctccacccaccaggactgactccctttggtcagcgattccagatcaccatgacctggcagttgccgtcaggcctgcctggctaaggactctcccggagactgagccacttcacacagcaaagtgagccatggggccacagcgctgtgtgctgtgtacaagccccgagggcttcacccagggattggcacccactgatccccataaatccctggcaaccgcctagagctgggatgtttccaaggtaatagctccaacaaacagaggcgcaggaacccagcgcgtcacttcccgcctcaccccaaaggttcacacccctaggggcctggagcctctctctggagcccctcctaccctaaagccagctggatctgcccaggaactgccatcatcaccccctggccgggcctgcactgatgtgtactgaactccccttatcaggtccatcttaggcaaacttcagagcccacgcaacactgcctgtggacaaacactggggcggaaacaggggccacctctaggtcccagtcacatggggctgtcagggctgcctgggatggcaggagagtgtcagaggagggcagcccaaggaccaggtagggggtgggaagtgtccccttccatgggtcctcaagtgagatgtcctctgcaaacacccacctgggatctccaagcagagggttggctcccatgtcacctggacctggattccagaccactgcccctaagtggcaatcctgggtccccctgtacctgtcctggcttgagctggtcacacttgtggggggtggttccaggaagaaggtggactgtcgcaaacgcaatgctccgctgccaggtgcattgccctcggctatcagaatccctctgggcaggccggggagatctgacgggcaagtgcctgcggtctggcgtgagcgggcagggcaggtggcccctgcctgggcatgcctttctacctttgcaacagactagggagagggctggccccaggacttaggctcagccagctgtctcacaactgaggggcctcggcggaggacacaagtcagacagagccacagactaaccgtacgaggtggctttttctctccagtccaggtcccctgaatgcgccagagcagacaagcttggacgtgaggaggcaagaggcagcgagaacaggcgcggagacggggctgggggagaagaggaagaaaccctgtgcttgtgcccttcccacgctcgcctgtcaccgggttagctgactggggaagtgttctctgagggtgcaattccttgcccttcccgtaagtcagctcccg

SEQ ID NO: 1244667 - DNA, 4001 bp, Homo sapiens
agggaggagttgcaaagaggcaggggcagggaggtcacattcactcggggactgcaggaggctcaacggaacacagtggacctagggagaccccagtatgagcatgtgcccaaagatgtccagatgaggaggtgttgtgggggaggggggcgggaacagcaagccctcccagctctgcagacccagacctcccctccctctgggaagcagggatgcaaagggatagagcctgaaaaagggctttcaccactaagctgacaaagtaactacgatgtttccagctcacactctgcacagcgccagtggccactggatcacaaccccctcccgtcccttcgccgccccacaccctcctcaggcccagccctgaagaacagccactggcactctgcttggcgtccagccaaagttctggtcccccaggaggccccgcctcccccactcagatagggctgaccccaggtgggccgtgtgggcagctgggctcaggacacccagatgtcagccctggttctggccatggagcggggaggacctcaggctggtcacctcccagcttggcctgacacctggacagtttgctcatttcaacacagcctttccccctcccggcccaccagagggctctgcccaagtcagcctaggagcctctccgaggggcgggggctccaggtcccggcagaggcaggcccgcccctcagaagccctgccccagagcgctggagaccattgtgtgagcttccccttcgcctgctgtatttactcccgcggacgcaggacgcagagccccagcaccggcagtcaagaggacgcaggaaagcgcacgcactcacaggctcagagacgcggacgccagacccaggcttggacagagcagccccgcaagtcccaacacactttgtaaaccccgaagacaggagagagccaaaatactctccctgcccgcacgcaggccccttctgtcccccacggcccgattctgggaggcggatgaggatatccccaggcctggatgggggccatgggacatcccactctagaccctgccacgacctgggctgtgtccgttcggtgctcccggcccacgggctgcacaacttggcggccccgaaactggcgtgggggaggggagggctgtccacccgagcaggacgcggctgtccactcagtcggaggtgaggaacgacctccctatcccgttgccgggtccaagcggggcccgagagccgccggggagagccaaagggaggggaccgatggatttcccagagtgaaactgtgcgtcctggagagttccgaggcagcctcgcgagccctcgaggaggtcgctgtcgcttggcaaacacaaacaacaataaaaggaaggaaacccaggcggcagtgcgcagaacgagcacagggtcctgtgagggcgcgcagggtctacgcgggtgcccctaacagggtcccccacgtaggcggcgcgggcacggggccgggggcgcgcggcgctctcagcgggagggcgcctggattaggggtcccgtctcccctcagcgcactcccgtctcccctcagcgcacccccgtcccgcgccaggcccacccgcagggtcctctccagcacgtccgcggccgcagcagccagcccagcacccaccttcgaagtccgaaatgatcccatccagctgcgcgttgaccgcggggtccgacatgatggctggtgggcagcgggtcgcgcggagggcagcggcgaggaagcgcccccggcggggcccgggccctgcgcgctggctggggcgccgcgcccgcgctcctgcagtgcagagctagccgccggaggagcccctaggccccctggctcagctgaatgaatgggggaggaaggcgggcgccggcccctccccgcgcgctgcgcccccgccccgcccccgcctcccgggcggatcaggttcccgcacccgcaccggcctccctgtctcgcactggctgctccgcccgcctgtcaaggccaggcctggggggctggggcccgagtggccgctgggggacagtcctgggcacacgaccggagcgcccccctcctccccgcctggcccgcgcccaggggacggcgagagacgcggcctcagcccctccccccgggcgccccgctgcggccagatgtgggcggatgtggaggccgggccatggcgaggagggcgggcgcccagaggggaagagattcctccccttccccgggcgcagggtccttctgcaggaggctgtatttgggcagccaaacaaagttctctgtcaccgccgccgcgcgctctgcgcctgcaagggttaaacggcagcgcacgcggctggcaggcaggatcccggcctgtgggctcaagagccgaggggcgcagggcgaacatgcgagtcccatggcaccagcgagaggccaccaactcccacccaccgagggcacccctgcagctaacacccccaccacgaccaccgccccgggggccaccgctgcaccctcctgggtgagccctggagaaggcactgtccgggagaaggggcacagggcggggatggaacacggctgtcagagaagccagggacgggcgacgcctcccttcctccacaataagggcctcctgagagcaggaagtagaccttgtcaggagcagacgtttccgaaggaaggtgtgaaggaaggagctaggcagtgagtgagcagaaagggagctgccccaagggcttctccctcccttctgggccctaacctgaggcctagccttccctccaggccagcggtctctacccttaaactatatcatccacaaggcaggcagggccgaggggctggggtagacctggggacctgggttagacacagaacttgagaagcaacaggctctcatcctcaagaagggccccccaggtctgtcacctacaagagagagaggcgcttcttccactcgccctggaaagccagaaacccactcctgcatgctctccctgtcaccccgtcccttagaccctcggcctctgcccagagtcaggggccatgtgagaattcacagcatggaacaacacccccacccccgaagcagcaggccgcaacgctacaactgcactccggtcccttgaatgtgtggccggggagcgcctgacagctcatcctgggtctgaggtcgctcgctgcccacttgcccctccccaccccctctgaaatatcccaaatgtgcaggagtgctgagactctccagccattctggagaggcggggggcagggggtctcttgcggaaaatgttctaggtttgggtggctttttaagtagatgaaatcaagtccttcctttttaagaaaagcaggcactccctccctcatgctttggatattttgaactattttcaaccaagtgagtttgtggacatgggaactgcaaaaccacagacatttcagatgcgtgcacaccctcgtcggcctgggagcccgggtttcagaaatgcagccattgctgccattaatagcaccccgtatcttccacgccaggccagggtatgtcttgtctgaactccagcacctgggcctatcggatagtccagcccctactgggccacctgtccacgccgtatttggggatttgggggtccagtacctaagaaactcagcccaacaacacagcccccctgggaagatgccgggtccggcacaacagccatcctaagccacagcattattctcgagtgtttttctaaaaagcacctggtgagtgtggacacacccatgcaattgttctttcccagggctggcatggagttccaccagattagcacagggtcagccaattgtacattctccatctccacgcacagtgcagcaaacatatttagttccctggggagcgccgccagggtgcacgcctcaccaaaatgggaacccaagggacaatggcaggagagcagccagaaagtgcgcatgccttcgtgactgtgctcagagcccaccggctccagccccagccactgccccttcaatgt

SEQ ID NO: 1244668 - DNA, 4001 bp, Homo sapiens
ctgatcacagtgcatctgctgcctgggtgctgtgtccgcccccctctaaatgaaccaactcgtagtcgggacagtgggtctgtctggccctgggctctgaactcaaagagcatcaagtcagtgctgccagtggctgtgggacccgtgtaagaggcctgcccccactccccatggctcctgcctcccaccacaaaagctcaaactgcagagaggcagtattcacaggatgccttgagtcttggctgaaaggcagggttcatcacgcaagaggcctactggcattaattagggacaggtctgcacctattaccaagcaacggggcctttttctctagagaggaaagaggcacctgaatcctgccagcgcgccagctcccacgtcccggaggtgttgggactctcagacaagaaggcatatccacatggtccttcccacccagaagcccgtcccacagcctgctctgcctccagaacacagatctgggggtcctcctcgggcgacagtgggggctcgggagaagctcagatgccacacagctctgggatctgagcacgtgggtcctgggccagattgtttcaacaaacatcaaggacttttggattctttctcggtgtgcaaatctggttacagcaaacaccgctgagcaaagcaggccaacagctggtacttggaaaggcttttgttacacaaagacccgagttgtaatcgtgtttgcgataacagatttggcctgaattcacgaaagcacatgccgtccgccagccccgtgcctccaccaaccagaagggagaaagaggaaagggtcatccctcttgtcaccctattacgggcagtggcgggtgctgcagtcgcctggaggcccgtttgtacagtggaaaagtagaaaatgagactctaaaaatctcatcagccaaatacaaaacattctccttgctgctacgtggcggcctccacagagccctaaaaccttgaagctcggagacctatcttgaagggggagcaaaggcgggatgcgggaagtttgagtccatggaagacactgataccctctccattcctgggaaccctgagcctgaaggacccggcctgaacagcggaaggactgaatccctgtgcaactcatcggtgatggaacataaagccatggtgccctcggtccccaagacgggagggatggggaaggccctgggtgaaggggacaggcggggaaggaaaaggtgaagagaaaggtgctccccagggagggggtagatgtgcccaggacatgggacattggcagaattttaactccgagcacacacacaggcccacggacggcttcccgtctacctgttccttacgggtgtgctgtgccggcctgggcacctgcctctttccccatgccaggtcacttgccgtctaccctgtatactgccactagttctaagcctcccagaacaccctgatcagggccctgtggcctctgttacaggattccaggcctagacgtctgctcgattggaaaactgcccccagagatgccgtggctcagagctcgtcctgctttggggtggcccctggagtctccgcccctcagcaacccacatggtgacaggcacccacatccgctggcctcaggaaccctggggccaccatcccagcgctgtaaggagctggcagtttcctccccaccctttcggcctaccttgcaggaaccaagacaccaggtgagccgccccgggaaagagacctgtgctcccacggcgctgctcctgcgcccattcccagccactccagatgcttcccgtggaccagctgcactcccggcgggcatgcctggccctccgcagcctggcccatatgatcttcacaggcaggcccctccttatgccccagccccctctccagccagctcattccagcctcccccactgctgctggctgctgctggccagaaggctctccttcctcttgcaatccaattcctactctccctcaaggtccgcctcctccatactgacttctcccctgctagctagtggtgacttttctctaccctgattcggaagctgcctgtccacatcacccctggctgggctgaatcacactctctcctccacctccttcaatcatcccttccccacgtctgtctgtccacccaaggttgtccaactcccatatacacacccccacaccctccaactatactccaggctccttgggcaccagggagggccacctttccataccccaggtcagcccccatgcacatgcgcactcatgcacacacacactctctcacgcctatcgactcgggccacctgatggctctaagaccagaattcccagcaaaaccattcaggacacacaagggggagactgataaacacagggaaccagcagattgaggccccactccccgagactgagaaaccttcccccagagccaaaggattgccaactgctgcaccaggatggtctcaatgagcccattgtcttggactaaattacagggtcacaaaactggcttgggagacagccgcagaagcagctccagatggaggcacatgggggcaagggtggagttacacccagagacccaaggaaggggcactaacaactttcatagtgcaaatggtgacagctgtacaacgaacacaaccccaaaccctggcctcccctcccgccacagggctcccgttgagacacgagagttcttccccagaaatcccactgggggcccgacactttctgttaggaactgagagcagagacctcgatcccgcaggcaggaggagagctctgcacaacacagggcctctctccataagggcttactggaaagtggtcagaccggctaagtcgtgccacttggacatttgggacaaggaaggcccctggaggagcggtcgcagggaggagttgcaaagaggcaggggcagggaggtcacattcactcggggactgcaggaggctcaacggaacacagtggacctagggagaccccagtatgagcatgtgcccaaagatgtccagatgaggaggtgttgtgggggaggggggcgggaacagcaagccctcccagctctgcagacccagacctcccctccctctgggaagcagggatgcaaagggatagagcctgaaaaagggctttcaccactaagctgacaaagtaactacgatgtttccagctcacactctgcacagcgccagtggccactggatcacaaccccctcccgtcccttcgccgccccacaccctcctcaggcccagccctgaagaacagccactggcactctgcttggcgtccagccaaagttctggtcccccaggaggccccgcctcccccactcagatagggctgaccccaggtgggccgtgtgggcagctgggctcaggacacccagatgtcagccctggttctggccatggagcggggaggacctcaggctggtcacctcccagcttggcctgacacctggacagtttgctcatttcaacacagcctttccccctcccggcccaccagagggctctgcccaagtcagcctaggagcctctccgaggggcgggggctccaggtcccggcagaggcaggcccgcccctcagaagccctgccccagagcgctggagaccattgtgtgagcttccccttcgcctgctgtatttactcccgcggacgcaggacgcagagccccagcaccggcagtcaagaggacgcaggaaagcgcacgcactcacaggctcagagacgcggacgccagacccaggcttggacagagcagccccgcaagtcccaacacactttgtaaaccccgaagacaggagagagccaaaatactctccctgcccgcacgcaggccccttctgtcccccacggcccgattctgggaggcggatgaggatatccccaggcctggatgggggccatgggacatcccactctagaccctgccacgacctgggctgtgtccgttcggtgctcccggcccacgggctgcacaacttggcggccc

SEQ ID NO: 1244669 - DNA, 4001 bp, Homo sapiens
tgcttatagaaggttgtgaaaaaatgccactcaactgtgctttctgaatcggcggatggtgtaatatggaaattatatccccatgaggacgggagaggaagggaaagaagggaaggagggagggggaaggaaacagggaaggaaggaaaaaagggaggggaggagggagggacggaagaagggaaagaaggcagtcatttctagtggagctggattgaagagtccaatgggtgcagcaaaccactatggcacttgtattcctatgtaacaaacctgcacgttctgcacatgtatcccagaatgtaaagtaaaataaaataaagagtccagtgttttccacaagtgcccaggagccagctttacagctcagaggacagctgaggcccagaggccaacacttaggcctgaggttctcaagttggtgtcgccagaccatgccccagacaaactcccccatcttcttgcagcaagggtgtttctagggtggcagccaggcggaggtgtcaggtggcgggagaccttgacagtttctctgcaggttcccattctgaacccaggccttatgccagggcccctctgccattcactggcgctggtggcagtaggtcaccggtcccgtgatggggactgcccccaaatctgctcatcctggggaccagctccctcctccccgcaggcgtccactgggccatcttttctccagagttgcaggtgggtctaaggcagggatgaaagggctgtaatccacgcagccctgagccagcaccctctgggaacatctgcacttagtgacaaattcttaccccaaccccaggacctgccgaggatgagggaatcagattgctgtctgtggctgggacgggggctgtaggatatctggctgggaggcagtgcccagagaggaggcagctattggacatgacacactttaggggcactcacactcatcacagccccagggctgaccctggcccacctggcctggtgccgagagagggcttgacacagcaggcttgcaaagcctgacttggaaaccaagacccaggggccgcccttctctgcctacccctccctgtgtgtcatgctgcctggtctacgtcccagaaatgtccacacaagtcccatcagccttgctggccaaatgcagagatggtgccgctggggcaagggaccctgagccaccgcccaatgccattcccagctccaggggagtgacagccgggcctgcaccccaggacaaagtgctcagggtcaagtcaatgccattcccctgtcttccccaaacccaacccacacctggctctcagagcacggaccgaaatggccacatccccacacaccttgtctgtcactgccaatggtggccaagcagaatgcaaggtcatcctcctcctgcccacggaggcctgtgaagccactgaccaggccacggcaggggagccggtggcactcaccacaccctgtcagccttccaggcccgtgtccaggagaaagctgccggcatctacagctggtgcccttgccccggcgaagacttccttgcctccatccaccccggcccagcgtgggcccagcagtctccttactttgcctcgtaacaatgcacactggagcagcctccagctgccctccctctgcaggctcccctgaatccagaccctggggccagcacccctgcggcagccctacggccacctgcaggccttcccagaaacttgagcccatgggggcacttcaggtcctataaactaacagatgctccctgtcccccacaaaggggcttcttaaagctgagtgagtccctgatgcaggcaatgctaggaggacagtgtccggccagggctgctccctcctcctctcctatctccctgggtgcctgcaaagtccttcagatccctgctgaatcctggggaagccctgcctcgcaaccagggcttgccctccccgctcccacacagagcctgctctctgcgtccagacagtctccccacgatggtaactgaataatgatgtgtgcggtttcctctcaccacaacccccccacacagggtttgtgaagccagacacctcatccatcacgctcaccccagcccggctttcttcagagcagcgtagggctcacggcaagccccggcaaaaagtctggtgaatgaatgaacaaatgaagaaacaaagctcatcacagcagccgaggtttactgggggctctctgtgccaggcgttactctaatttttttttttagagagtgggtctcactaatgttggtcaggctggtttcaaactcctggcctcaagcgatcctcccaccttggcctcccaaagtgctgggattatagacataagccactgcaccgagccccaggtgttactctaaacgctgctcaggagctattataactgatggatcatcacacaatcctataaggtagccactgttattgtcccatttcacagataaggaaaccgagaccgagagggcttttgtcaattatgagggtcgcaaagcgagtaagcggtagagccaggatttgaagccaggtaggtgagccccaggctgctgaccccctccccaggccaggtcttcgggaaccatggaaaggctggagaagtatggggttcctgcagccaggacccagaaggtgcagctgcggtgcaggcagctcagcactgaggccttggcctccagctcctccctcagttgctctcccccagggagctggaggcagagccctgaactgccaggagaagattctacccgccagccagggaaagttgccagggctcttcccagggcttagagccaccccaggcctatcaaagcacattagcatcttagtttccataacttcccttgcaagaaagatgatggtaccagctactgggccgggctgggggtcccagattccaggggccctctcaggcctgcctatggctctcccaggacacagatgcttacttgagaaaccctagtgcaccaggggtcccacagccaaaataaagaggcagagctgccctggggcccctgccaaagctcccaggtagatctacccagcagacaccaaaatgtccatccctcatctgaaaactccacctccaggaggccgccccaggttgggctgacaaaatccacagagacctcaatgatgacttctcacttcaggtatgagtgagtgggtggagggagaagctattgttaactattaacagttcaggaaatgcaggtaaaggaaagagaatggtaaggcgacagggctggaaactagacacacgtgcagaggtgagcagacctcagagaaagaactgctctggaacaagatggtaaagaaactatagacaataatggtagacgatgatcctggggtcctagtggaccaggaccataacattgattcatttgacaagtatttattgagtgtctacttcacagtaacaaaaagatgacactacaggcttgagagtagtcagaatgaaaacagtggtggcacatgggaatttgaagttcatttatttaaatgtttattagccgagacttccggacagatttgaagcagtctttaacatgtaaggaattcacaatctgatacagtagtacaggacatgtgtgtgccacaaacctctggtgaaaagtaaagactctccctagaaaagtatacattgaagacagacagacagacacacacgtattttgaacggttcatcaaagaatccctaggcccgtggatcccagttaaaaaaataacttggcactctgggaggccgaggcgggaggatcgtttgagcccaggagttcaagaccagcctgggcaacgtagcgagaccccatccctataaaatgaaataaaataaaatgagaattaaaaaaaacaaacaaacttggtgtgatgagaacttacagaatttaatagggttatctcagcattacctgcagcactctctaaacttttgaccacacacacaaagttctgggttctacagctagagaagagggagagcaggttaa

SEQ ID NO: 1244670 - DNA, 4001 bp, Homo sapiens
tacaaacttatcttagatgagcagagagctgttccccaaacctctgaccaaaacacagcagatttcacatgaaaaagcaaagagagaggggccagggatgaagtgcagcaggctggaggctgagtcagtccccagagtcactgggacggcgtttcaggagcagatggcattgcctacaaagctcctcgcccctccctgctttgaggccggggaccaccccgttggctgcatgatttagtctctggggttctcccagcatgaaaagaccctctgaaagcaggtccgttagggagatccctcagcccctgctcactgacatgcctctgcatggccgacacgcagcatgccattgtagagaagcaaagcacacgcagaccagccccgccagcagcaccctccctccccgctcctcccaggaacgccctgcacatatccaacacatccaggaatccagagctgcgctgtagcagcagctccctggatcccagtgccggcgccgcggggagcttcggttacggcatttcgagcattgagactatctccagcctccagccagccggtcttcgggagcccagaggggtgataacttgagcggagtgattttagagaaagcggtggccaattcgaatttcttcctggccctcctggaagccagggaaaccccttgcgaaaaggaaacatgttccaagaagctccgggcagcaggagaacttagccactcagcttagttggccaaatatttacaaagagatagctgtgaccacacaaagccctattcttctattttgaggccgaaaatctggtccccgcgtggagatcgagctccccgccacccctctcctggggaccccgctcggtcctgccggcctcgggccggggcccagggacagcgtggctcccggcaccgccaccatggccatcagggtccgcctcgcggccgcgccacctgagagcccccgagccagtggtgcaaggctgggaagaacaaaggagcaggactcaccccagcagcggaacgtcgggctgcgctggacgcgccgagagccgcggcccgcccaccgggtcacatggctcagagccgagcagaggatcaaaggggctttgtggtcgcggaacaaggagcctcccagagcgcggggcagaggtagggagggacctcgactgcctgggaagggaggctcggtggggaattgctccaagggggcagggcgaggggagcaggaggagggggcaggcagagataggggcgcccagcggcaggcccggcgcagaagcaacctgaaggcacgggagggacgccaaggagctgccacacgctaaaggaaagtgacagggtccctgggaagagtgagggggagctgctaggaagaagagaggggaagaggctcccagggacctctggccatgccgtccttgcccttgtccctgtgcttgccagaggcggtgcccgtgaggagccccctcctctcagccaggtcctgaaactgacctggacaccctctctccttgtgctctgcctgacacccctgcttcctaggtgctcccccacctacctgctcagacatcgccacagctgggctctcagggagcatggccagccaccccagaaagccattcagacctgcagccagggctggaacacagccacctgggtttgtcccctctaccccaggtgcttgctggctgggaccatggaagggagaaggagcaggagaggaggggcaggggatgggggcgcagctcaccctgagctcttcctccgagagcctctggattcagatctgatccagctcctgcctctccagcctctccagcccctgggggacctggccagtgagtcagtctcttcctctccccctccctgcaggcctgggatgtgctgggacccagaggggcacaagcaagggggtccccagaggagggagctgacactataggggctgggcctggacgctgggatctgccagacccatctcagtgccacgacctctgaacccaagtgagtcactcccagcaggggcgtggccactcccacactaggagagagcgcctgggagtgggctcgttccgagggcttgctgggggctgggagggattcactcaaatggaaagaagcctttggtgacaccttctgagggccaggggctgaattctggaagctacgccctcaggcagcccccacgggacctcatgttgagtgctgactgggctccacacactcttacctttcccatcccgcacccccacacgtggctgggggtgactgaagccccggggcacccgccacactggccaaacaggccagccacgtccagcggctccccagccagcagtcactggcatctgacccgtcgcttcccactcctcatggccaactttccccctaaggcctcctggtcccacggccctccccaccctcacagtgaacggccgtggggagctgctgctactggtctccgggcgccaggccagagccgggggagtgtctgggagaagactgcatgcccggagtccctgttcccatctgaatgggagggaggctggtggcagatcagagacctgggttctgagtcaaacactgaaatccaaggccctgggcctgtcactcaatatctgtggaatttgaccttccccatccataaaatgggcaccaccaacaccagtcgccaaaattacagcaagacacacacgtctaggccaggaagtgcggccactcagaaaatacagctcccccttcctccaagaagctaatttccccagcactgggagtgagaagagcctgtcttttccactgtctgcagcccagcccagggcaccctcatcactggcccctaaagggcagctccagaaaccgctgacaaaggatgccagaaggaactcctttctggccaggtgtcagggtcaacagaaagcctcgaggatgcagctcccaccacgcccctgccccgtgggcctctccctccccgtgggcagaacccttcttccttggccctcctctccgaaccttcttctctttgcctctggcctcaatctgtcccccagctttctggccccccaggcttttcccagggcccaagaccctgctctcctccaagcccagcctcctcccctcctctgcctctggattcctgagctgggaggccagcatcctgggtgctttgctgaggtggccgcccctcttgcagtggttcctcttgctgtcaccaaatgagggtctccagagcacagagaaggcatctccggcctggggctgcatcccccacacaaagcctctgtccttcagcacttctcaaagttctctaccgctcagcacacactcagcattcaggtagagcagccccagagccttctcggctggccctcggtccaaccctccagcagaaacggcacatgggccacagacgcaaccttacattttccagcacctacaataaaaaatgtaagaacaagccaggcacagtggctcacgcctgtcataccagcactttgggaggctgaggtgggcagatcacctgaggtcaggagttcaaaaccagcctggccaacatggcaaaaccctgtctctactaaaaatacaaaaattagccaggcatggtagcagccacctgtaatcccagctacttgggaggctgaggcaggagaatcgctcaaacctgggaggcaaaggttgcagtgagccgagatcgtgccactgcactccagcctgggcaacagtgtgagaccccatatttaaaaaaaaaaagaaaagaaaagaaaaaggaaatcattaaaaaatgtaagaacaggtgatattaattttaatatcattcacttaacagagcccaaaatattatcaattcaacatgtaatcaatgtaaaaatgacagatatttgatattcttttctttcccccttgctaggactctgaaacccagagtgcacttcacacacacggcacctctccacttggaatcaccacatttcaggtgttcaaatggccccgtgcagccagtggctatcat

SEQ ID NO: 1244671 - DNA, 4001 bp, Homo sapiens
gctcaagcaatctgcctgcttcggcctccaaagtgctggatttacaggcatgagccactgcacctggccccttatgggattctttataaaaaccaagacaggctgggcacggtggcatgatcccagcactttgggaggtcagggaagctgaggtgggtgggtcacgaggtcaggagttcgagaccagcctggcctatatggtgaaaccccgtctctactaaaaatacaaaagttagccaggcgtggtagcccacgcctatagtcccagctactcgggaggctgaggcagaagaatcgcttgaacctgggaggcagaggttgcagtaagctgagatcatgccactgcactccagcctgggtgatagagagagactccatctcaaaaaacaaaaaacaaaaaaaaaacacaaaaaaaaacaaagacaacagccctaccctcagaatctagtgggggcatgaaaggaattttgaagactatacagcaaaacctcaagcatggatatcgctggcttacaggtgaattttaggttctttctcatttctgtacttcctgcattttaaagaaagggtactcgattactttttatgatctgaaaaactactttcacatttaaaaaaaaaagtctagcagaggaaagaaagtttatacacaaatcatttatatcccaagccaaacacgaggtatttggaccaggttttgagggatgcataggagttcaccaaggcagtgatgtaaagagaagcagaggtcagggttcaggaggtcagggcaaaggggttgtgaggaaaggtgtgagagaccaagggaagaccaaagcaggagaagctgggaaggagagaggtgtgagctgagcaggagagtgaatcaaccgtggaggggcctatggtgagtgagcagagaaggctcagcacgggaagagatctcagcagtgctgtgctttggggaagtcagtctgggagcaattcagctggggccccaggagaccctgccctgcacccacagctctggggtggagacaaaccacagcacagatgccctcccgcaggcagaagccaaggggctgggcgtctgctcagagggcacggaactccctccatgattcctttccccatggtgccagctggatccctggtgctcgggggacagaggggccgcagagattggtcagagctgtgcatgtcggggctcagggaactcccagcccagccccacatggaggggcagaaggggatgggcctgaaggaaagatgggcaggaagctgagttggagagaactggatccgtgtccagaacggtcgtgacacagagagggaggacggagaagcaagcaggtggtgcctcggaggaagaactagtggggctcaggcctgggccccccgagaagccactcccatcggatttcaagagcactcctccattgggaaggccctgccctcgtctgtccctgcatttcctccacctggacttgcttaggccctcaggactgtcagcccagcccacggacctctccacgtgagctggactcccacctgcacaggtccctgtccgtgggtggccgggtctgggatgctgatggttttctcccatgccccggctccaacgtgtacatcctattccatggagaaagccaccgtccccccagagcgccaggttcctggcagctctgaacgctgctgcctccacgtggcctgcctttctctccccttcctggcctgatgaaattgtacttccactgctggggaagctccctggacactccttgtgtcccagccatcctgctcacggctcggtgagctccagaaagcagagcccgcaggttgtgtccctgggcctggctcccggcacagtctctggcacaatttaggggctaaactgtgtctgcccctggaggagaatgttcttgtacatccccatggacatccccctacctgtcccccagagccaggaccacgtccctgtgcatccagcaccagccatcaccgagatttagatggctcggtgacaaccgcctccccagccacatcctgtttgactcagctgagtgtgaacacatcaacccaggatgggggtgtatccggcacgtcaaacaaaggtcctgcaccaacagaaggcaggggaggaaacagcctcctgccactctgcaaactgcccatgcctttggcctgacaccatgccaccagcaaccactgtcactgagtctgggtggctggggcagggtggctcttcagagtcaagcttagagagatgggagagggaacacgggactcgcacactgagggccggaaaggaccttccaaggcccactagcctctggctactcagtgtgttccgatgccccctctgtaggaaatgcagagtcccaggccccagacccgccaagacaaatgtgcactccacatgcccatgaaagcatgaggagcactggtctccccccaaacccacaccctctccaggccccacatcctcccagcccccaagcccactgaccactggagaactctcattcaaaaagaaaaaccaaaaaggggttgggtggctcatgcctataatcccaacactttgggaggccgaggcaggaggctcatttgaacccaggagtttgagaccagcctgggcaacctagtgagaacctgtctctacaaaaaaaatttaaaaattagccaggcatggtggcgcgcaacctgtggtcctaggtacttgggaggctgaggctggggaatcacttgagcccagggggcagaggttgcagtaagcagtgatcacaccactgcacgccagcctggaggacagagcaagaccctgtctcaaaaaagtcaaagaaaagtcaaagaagatggaaagagggacttagagagatgtggaagcaacccaagggtccaccgatggaggaacagctacacaacacaagtgcatcgcacaacagaatattattcagcctctgaaaggaaggaaattctgccccatgctacagcacgacggatgaacctttaggacgtcatgctgagtgaaatgagccagacacaaaatgggcagttattgtatttttccacacacacaaggttcctagagtggtcaaataaattcataataaagacagaaaatagaatggtggctgccagcagctgggggaggggcatggggagcttggtctaacggggacggagctcagtttgggaggatgaaaagggtaccggagatggacagcggtggcagctgcgcaacaccgtgaatgtactgaatgccgctgaaacgtacactgcaaagtggctaaaattgcacattgtatgttgtgtatttcaccacggttagaaataagaagcagcagctaaatcaaaaacccagactgtgctgtttgtccaacctaaagaaggcttactgagcattactgagttctgatcctgtgcccagaatcagacctggctcttgaggggcttctaacccagctggcaccttactatagccccatggagccacgatccctgctggggccagggggcacgcttctgagaagggacccaaccatgtcccacagcctggcatttccaaacaggccctgtgtcccacaggactggcaccaatcccctgcctgtaagctccatgtcagcacggctgtgggcttgagccctcccaggacgctgctggagccccatggcctctctcctctcgccagaagggcacccccaaataaaaccgtgtgcagctatcacacagccccctggtccaggcaccccttcccagtgccctgagaattttgtcctgcaggctaaggtgctcctcatgttcccctccctctgccacaaccatccctcctgggggaggaggaccagaccatgggctccaatgcaagcctcaggaggcatacgtccctcctcccttccccaagccctcggcctctgctgggcatatccaggcagcctgcaattcctcaagcaggagccaccagaatgtgacagcccttctaggggtctcaactccaccctgtcctacacccctgcatgag

SEQ ID NO: 1244672 - DNA, 4001 bp, Homo sapiens
ccattaaagcagggctctcagggcagaagtcgcatcttctcatcccagagtgccccacgccaccccccaggcgcacacagtgggtcctccccaccgcagctgaattggccccatcaccatcacaatgacagcctacaggggcgggggctagtgggaacacaaagtggccaatgcaatagtgtctcagccaccccgacacagaaatggccaggggacagaaggggcaagctgggagtcagcagcaactcaggtctccagagacgagcattaaaaaaggcgagccacaccacaggccttccttgaccacatctcagcctaaaagagacccaaggagaaacaagaatcccacctttccaacaaggactcgtatactagatgctaagcaaacaccttcttccttttcctgaaaaggagctcctggggctgccgggggagttggccaaagagaatgacattcatggaaacacacgtggccccattaagtttcaaggcaaggtggcaatgaatggaggaggaaaacccacagcattattagggaatggggcctttttctgcttcctcctcttccaacgggttttctcatgtgggatccaaaccaaattccaactccatcctgatccagcaggtgctgtctccacagccccgaacagacctgccagaaaaccactgctcaacctgcttccgggtggcatatttttctccaggaaaggaattacaaacttatcttagatgagcagagagctgttccccaaacctctgaccaaaacacagcagatttcacatgaaaaagcaaagagagaggggccagggatgaagtgcagcaggctggaggctgagtcagtccccagagtcactgggacggcgtttcaggagcagatggcattgcctacaaagctcctcgcccctccctgctttgaggccggggaccaccccgttggctgcatgatttagtctctggggttctcccagcatgaaaagaccctctgaaagcaggtccgttagggagatccctcagcccctgctcactgacatgcctctgcatggccgacacgcagcatgccattgtagagaagcaaagcacacgcagaccagccccgccagcagcaccctccctccccgctcctcccaggaacgccctgcacatatccaacacatccaggaatccagagctgcgctgtagcagcagctccctggatcccagtgccggcgccgcggggagcttcggttacggcatttcgagcattgagactatctccagcctccagccagccggtcttcgggagcccagaggggtgataacttgagcggagtgattttagagaaagcggtggccaattcgaatttcttcctggccctcctggaagccagggaaaccccttgcgaaaaggaaacatgttccaagaagctccgggcagcaggagaacttagccactcagcttagttggccaaatatttacaaagagatagctgtgaccacacaaagccctattcttctattttgaggccgaaaatctggtccccgcgtggagatcgagctccccgccacccctctcctggggaccccgctcggtcctgccggcctcgggccggggcccagggacagcgtggctcccggcaccgccaccatggccatcagggtccgcctcgcggccgcgccacctgagagcccccgagccagtggtgcaaggctgggaagaacaaaggagcaggactcaccccagcagcggaacgtcgggctgcgctggacgcgccgagagccgcggcccgcccaccgggtcacatggctcagagccgagcagaggatcaaaggggctttgtggtcgcggaacaaggagcctcccagagcgcggggcagaggtagggagggacctcgactgcctgggaagggaggctcggtggggaattgctccaagggggcagggcgaggggagcaggaggagggggcaggcagagataggggcgcccagcggcaggcccggcgcagaagcaacctgaaggcacgggagggacgccaaggagctgccacacgctaaaggaaagtgacagggtccctgggaagagtgagggggagctgctaggaagaagagaggggaagaggctcccagggacctctggccatgccgtccttgcccttgtccctgtgcttgccagaggcggtgcccgtgaggagccccctcctctcagccaggtcctgaaactgacctggacaccctctctccttgtgctctgcctgacacccctgcttcctaggtgctcccccacctacctgctcagacatcgccacagctgggctctcagggagcatggccagccaccccagaaagccattcagacctgcagccagggctggaacacagccacctgggtttgtcccctctaccccaggtgcttgctggctgggaccatggaagggagaaggagcaggagaggaggggcaggggatgggggcgcagctcaccctgagctcttcctccgagagcctctggattcagatctgatccagctcctgcctctccagcctctccagcccctgggggacctggccagtgagtcagtctcttcctctccccctccctgcaggcctgggatgtgctgggacccagaggggcacaagcaagggggtccccagaggagggagctgacactataggggctgggcctggacgctgggatctgccagacccatctcagtgccacgacctctgaacccaagtgagtcactcccagcaggggcgtggccactcccacactaggagagagcgcctgggagtgggctcgttccgagggcttgctgggggctgggagggattcactcaaatggaaagaagcctttggtgacaccttctgagggccaggggctgaattctggaagctacgccctcaggcagcccccacgggacctcatgttgagtgctgactgggctccacacactcttacctttcccatcccgcacccccacacgtggctgggggtgactgaagccccggggcacccgccacactggccaaacaggccagccacgtccagcggctccccagccagcagtcactggcatctgacccgtcgcttcccactcctcatggccaactttccccctaaggcctcctggtcccacggccctccccaccctcacagtgaacggccgtggggagctgctgctactggtctccgggcgccaggccagagccgggggagtgtctgggagaagactgcatgcccggagtccctgttcccatctgaatgggagggaggctggtggcagatcagagacctgggttctgagtcaaacactgaaatccaaggccctgggcctgtcactcaatatctgtggaatttgaccttccccatccataaaatgggcaccaccaacaccagtcgccaaaattacagcaagacacacacgtctaggccaggaagtgcggccactcagaaaatacagctcccccttcctccaagaagctaatttccccagcactgggagtgagaagagcctgtcttttccactgtctgcagcccagcccagggcaccctcatcactggcccctaaagggcagctccagaaaccgctgacaaaggatgccagaaggaactcctttctggccaggtgtcagggtcaacagaaagcctcgaggatgcagctcccaccacgcccctgccccgtgggcctctccctccccgtgggcagaacccttcttccttggccctcctctccgaaccttcttctctttgcctctggcctcaatctgtcccccagctttctggccccccaggcttttcccagggcccaagaccctgctctcctccaagcccagcctcctcccctcctctgcctctggattcctgagctgggaggccagcatcctgggtgctttgctgaggtggccgcccctcttgcagtggttcctcttgctgtcaccaaatgagggtctccagagcacagagaaggcatctccggcctggggctgcatcccccacacaaagcctctgtccttcagcactt

SEQ ID NO: 1244673 - DNA, 4001 bp, Homo sapiens
tccagggcagtcccctgccccgggggagatcgtgttcaaatccccgaggaaatgctgctctttggccctttttctgaaaaaccccccaaggagaccttgtgcggagcgtgcagggagaatggagattcttgtgagactgtctcgggatagcctcacagaaaccacaaactatttggataaaagttgaaaatctgcggtcacacaatgctgaccattcattcaaacactcgttgagcaagcacctatgacgtctgggaactcaggacgtggatcgacaagacacaatcctcatgtccgttctagtgacagagagagagacggcaccatcaaccccgcccgctgggggcccccttggagggggcgtgcaggttcagggctgaatctgcccagtggatgtgccacccacgtctgcgtacctcctggtcctgtggtggcccctggaacaaaggctgagagataaaagacaaggatctgggggagggaggacgtccatgcacattccactggggacaccagcaaggatgactgttcagtgaccattcagtgaccgagtcacctggtgcttggagcctggcacccacagagcagggcgggggcagcaggccctgccgggggcacaggcctgagaagggagtgctgccagccaggctcgacgggacagagagcgaagggcccccttcctgaaggccatgcagaggccggaggtcaatgtcagcaactccatcaacgtcagtcccctgagaccgacccagagttggggttccaagagcagtcttgggcgctcaggagccaagatctcacagagggtgttccccacccttagcttagggaaagtgacaaatctggagtgcttctgcccatggtccaactactgaacccaaatgaatgcattgacaaatcgcatttagtgttatttatagggaaaagggagggaaaaaaaaaaaagaaagagagccaatcgcgtttaggccggccggccagggggaggacagatgggccatcacctctgccacttttcaggccctttgcactgaccccccacccccagcaaaaccaaggcccagccccttcccgcagccccggagtcggctgggatgaagcaactcctgcaggcagatcattaggtctactgtgatggttccagcagggaacccagctcaggccacagcagctcaggcgcctgcagaaggcccagacctctgggtgttaagctctctcttcctgcacccgctccggggcccggtggggtgggcagtgtgcgattcccagggttgatgaaagagaggaggaagaggctgagcggcggcgagtttgaacagccaactctgggaggggctgaggtggggaaggttcccactgctgctctacaggccccggagcaaggctcccatgattccaccagcagctgggcaggcacaggcccaggtgctgagtgtgccaggatctccgctgcttcctgggtgggggcgagagggaccctcatgggcctgtaattagacccgcgccttcccagccaattcctcatcaaacaaactcacacgtacagcggactgggcatggccgccaccctcgggagccctcctgggaaagcttcccaaggctctgctgagctccgggaacaggtccctacctgtccgggaaccgggctggcactcaataaacaaatcaaagctcggcgccggaaggcagaactctgggactagagtcccagccaagggccacaagtccctcaggaagcctcttccccaaagagtggctgtgggacgctgggagcctccagggtggtcagcctccaggtcttcccaaagcccaggtggtatcgatgctctgtgttaaggtgagggctgcagagaggggccggcggggaggagcccccacagcttaccctggccattgaccctactctcaagcattgaaataaagccctcttcccacactcccggccagggagagagggcggaagccctaaacatccggggtgtatgggaaaggcttacatgtacagaagaaccagataacggaagctgctggtggtggtgacaggcttcttaaaggggccttgagacctttgacaccggcagggaagccacacactgcaccaggcctgggggcagggagaaggggctcctaaggacggggttgtcccctcctgtggaagtgcctcgcattgtctgataagagcagcttggaccagccgtggcacaacaggaagttgggagaatacggtggcccaggaggctggccagggctggggagtggtcaacccagagactctggttgcccaagtgggtctagggcttccggggtgaaagtccttgtggagcacagtggacccagtgttcggaggacagatcccaggcccagataaggctttttttttttttttttgagacagagtttcactcttgttgcccagactggagtgcagtagcacaatctcagctcactgcaacctccacctcccaggttcaagtgattctcctgtctcagcctcccgagtagctgccattacaggcacgcgccaccatgcccggattagccagtatttttagtagagacagggtttcaccatgttggccaggctggtctcgaactcttgacctcaggtgatctgcctgccttggcctcctgaagtgttgggattacaggcatgagccactgcgcccggccaacaaggccatttttgacatggaatgctggtctgaccacagtgcttgatggcttctgcctgcaactatgcccccgccttccattaaagcagggctctcagggcagaagtcgcatcttctcatcccagagtgccccacgccaccccccaggcgcacacagtgggtcctccccaccgcagctgaattggccccatcaccatcacaatgacagcctacaggggcgggggctagtgggaacacaaagtggccaatgcaatagtgtctcagccaccccgacacagaaatggccaggggacagaaggggcaagctgggagtcagcagcaactcaggtctccagagacgagcattaaaaaaggcgagccacaccacaggccttccttgaccacatctcagcctaaaagagacccaaggagaaacaagaatcccacctttccaacaaggactcgtatactagatgctaagcaaacaccttcttccttttcctgaaaaggagctcctggggctgccgggggagttggccaaagagaatgacattcatggaaacacacgtggccccattaagtttcaaggcaaggtggcaatgaatggaggaggaaaacccacagcattattagggaatggggcctttttctgcttcctcctcttccaacgggttttctcatgtgggatccaaaccaaattccaactccatcctgatccagcaggtgctgtctccacagccccgaacagacctgccagaaaaccactgctcaacctgcttccgggtggcatatttttctccaggaaaggaattacaaacttatcttagatgagcagagagctgttccccaaacctctgaccaaaacacagcagatttcacatgaaaaagcaaagagagaggggccagggatgaagtgcagcaggctggaggctgagtcagtccccagagtcactgggacggcgtttcaggagcagatggcattgcctacaaagctcctcgcccctccctgctttgaggccggggaccaccccgttggctgcatgatttagtctctggggttctcccagcatgaaaagaccctctgaaagcaggtccgttagggagatccctcagcccctgctcactgacatgcctctgcatggccgacacgcagcatgccattgtagagaagcaaagcacacgcagaccagccccgccagcagcaccctccctccccgctcctcccaggaacgccctgcacatatccaacacatccaggaatccagagctgcgctgtagcagcagctccctggatcccagtgccggcgccgcggggagcttcggttacggcatttcgagcattgagactat

SEQ ID NO: 1244674 - DNA, 4001 bp, Homo sapiens
aggcaggagaatggcatgaactagggaggcggagcttgcagtgagctgagatcgcgccactgcactccagcctgggcaacagagccagactccgtctcaaagaaaaaaaaaaaaaaagatgtggccctgggagcagtggtggaggggaccacacgtcctagagaggagccaccgagatgggcctccctctctcaggcctctcagggaccccccaacacacacatagtggcaaccaacagaccagggcccaaggcacgtaggggttgacactcttagcgacctcccgctccatggcccgtaggtcacttcagaatacccaaagcctggagcttggctcagccaccccatgtctcccagcgctgggctcagagggcggcatgagcggcagaaactgtcatcactgctaattaccgatgacggcgctggccacgtgagatggcagccacggcaccgcatgtgagtgaagggaccaaggaggctgggcctgggagggagggcctggaaagctggggtgaactaaaggcaggggagccccctttctcttcatttgcctgttcacgccctgatgggtctgtgcctgcggcaagggggctgccagcgtgaatggacacacgcacacacatgcacacacacgtgcacacacacgccaggctcctctgagcgccgggagcttccccctctataatcaactgccaggaaggcacagaaatgctattttaggtaggagaccgaggcagccttgaagacagactttggctggaagcaaaaaacaaaccacacagtggacaaaccaaccaccagccaggtccaagcgccgccgccccagacccgagccaggggggcaggtcccccacaccctcccaaggtttcggcgccaacagcctcagcattgacagtggccatgacatgcaagaatggcacactggaaaatgaaagggaagtagccaggagagaggagagccgagtttaaataaaagccagactcaggagagcttagcttctgagacggagttcatcccacgagcttggaaccgtcaaaaagaaaagaaatatttctgtgaaaaatgagcaaaagcgccctttgcatgcttattcccccaggcataaataaagccccgagtccagggcagtggggggcggccgatggggagggggctgtctgcgtacctgagatccggtccctctccattcctacggatatatttagcagcggcgggagtcccggcgtcccgctcagaggcggcctcccctttctcacccccgtcgccctccctctctcagcctcctcctcctcctcctcctcctctaaaaacactctttgtctggtctaatttcttcaatctgttgcaatcacgaatgcatccgaattaccacatttccatgtgctgatcatatgtttgtgctccaaactgaagtagcattgtctcttcaaaacgggaggaaaaagggagcaaaggagagaaatccaaaaataggaggcaggagagagggcccgaagtgggccccgaggagtccggcagaccaccgggtctgcctgcgagagtcccagagtcccggccgcccggtctggtcggtggctgcagaggtcccgagtgcggcttccggcagcctcctctctccacctcctccagcccccgccgccccgaggcttgctgctcctttttaatatccacttggagatgcttaacttagactcttggaaaccaactcacagagtcaaattcctgacgacttccaaagtctttcattttccctgtcccgcgatgctacgatttccttgggcttaagggtttaaaaagcccagttcctgcgtgcctgcctcgccttcctctgtcctgggctggccccagcccttcttcaccctgtaccccaacgtggctgggcaggaggaacggccgtgccccaggccagcgtgctgagaaaaggttccggagcacctgcccaggaggaaccctgagaagtcacccccctccgtcccattagtctgcagtgacagaggcagttgccgtccccgcccaggcagagagggcgaacgggacggggacttcctggaagattcctaccacacacgcatgagtcagtgagtctctagccgtcccctgggagggagcgagtcttcctctccgggaactcggggccccactgggggatcagtgctgttccccactgttcatccggggtcctcagaggctgcttacttacctggggggtccccaccagcacatggtcagggtccatgctgaggccaagggctcagcagagcaggtgggggtttacaatgtgggtccctggggtgggaatcaggggcatcctctctgtctttaagcttcacctcaagggttcattcaaacccgagacacggaggctggttctgttggcccaagcctgtttaaagagaatgtgtgtttgtgccaaggctgagaactcaggcaatctctctgaaaactccagactgtcagcttctgttgagaaagggaggacgcgtggccgcaccacggaagccttcctgcctggccgcacagggctggtataagacagttctgctcttcagacaaaacacttttcagtctgtgctgctccccaaggcccccaacaaatttacaatatttgcacccctctacctcgacacaccccgcaggcctctgagtttacaatccctgccccacagagccaggtgagttacctgtgaccaggtgaggcccatgcacagccctcggctagatgacagagccaaaggccctgaagtgccacttcaggccacagtcccgtccgctctctgcctgggataggaccccaaatgcaatctccttggcagaaaggacatcttcctggggggtggggaggaccattcccagccttctgggagacatcaagcaaccacctcctcccaaagagcctggaggacagccccacaggcagccagacagtgagggaggtggggacagcatctcagccgaggtgggaggctggggaggaagggagggatcatagtcacgagagaaggctgaataatggccccagggatagcatgtcctaatccctagacctgcaaatgggaccttgtttggaacaagagtttttgcatctgtgattcagttgcagatcttgctgtggcgagagcaccctggatggtctaggtggtccctaaaggcagtctcggtgctcatacaagacgggggcagagggagatttgacacagacagggatggccaagtggagatggggcccggagagatctgtagatgctggtgttgaaggtaagggccatgcagccacaagccaagggacacccacagccaccagaggctcaaaggggcaggcgatgaaggcagtggcccccaacctttttggcacctgggatcggtttcagggaagacaatttttccacagaccagggagtggggagatggttttgagatgattcaagtgtattatatttattattttattttattttattttattgagacagagtctcgctctgccacccaggctggagtacagtggcactatctcagttcactgcaacctccgccacctgggttcaagcaattcttctgcctcagcctcccaagaagctgggactacagacgcctgccaccgtgtccggctaatttttgtatttttagtagaaacggggtttcaccatattggccaggctgatcttgaactcctgacctcgtgatccgccagccttggcctcccaaagtgctgggattacaggcataagccactgtgcctggcctttattttttattttttgagacagagtttcactctgggattacaggtgtgagccactgcacccggccacaagcacgttgtattgattgtgcactttatttctattattattataatatataatgagataattatacaactcaccataatgtagaatcagttggagccctgagcttattttcctgcaaccagacggtcccatctggtggtgatgggagacggtgacagatcatcaggcatcagattctcataagaag

SEQ ID NO: 1244675 - DNA, 4001 bp, Homo sapiens
gtgatccaccagcatcccaaagtgccaggagtacaggcgtgagccaccatccctggccattatcctggcatagtatttaaggaaactaaagtcacaattcaaatggacttgaaggagcgactttagtcttggtgcctacagaatctaagcccaaaccccagatcaggtggtagatgattgtcacaatgtgggtaggctgaggtgaggtgagggagcctggcagggaagggacatgggtccaaaggtggccccgagctagacacagggacccagagtattaacggcaagtctgaatcctccacttcaagccatctggataagggaagaggagagatgattgaaaaccctacaagggcagtgagagggcaagcgtgggggtctgcatggacgcccctcagcacacacgcaataccctgtccacagtggttgctcatgggctgagcaggcgaccgctggctggctgcagccacagacaatgatgccatcctgtccaaagggcagtatccaagccccgctctcgtcctagcaggcgggggagggctcagggagaggtagataccctccctgctgggccaaggtcaggccttattttctgacaattgcccacatcaagaaacacagaagcttttgtgatcttgcctccacgtgaggcggatcaactcaagccaatacatgtgtttcagattaagcccagttaggagacaaacagcctccaccgccacctccccctcttcccagaaccgcacagccttcagccacatggcagtgggcctcggagatagcatggggaagggcacctccccctcccctggctctccggaggggattgaggggtcctctctggcccacccatggtgacccagccccaaacaatgtttcctgaagctttagaagctgaatgagtcagcccagggtgccgtggagttgcacttccccacaccccagaagcagcagccccaagaataggactccctgccctccaaccccacggaacctgggggctaacgttgggttagctaacaccgggtggggggcctaggctggacaggggcggggtttctgggaatcctgctgagacctacccctcccagtggcttggcaggcagcagaaagggttcatctcggacggcccttgtctccagcactggcagctgggcccccatgccctatacacctgccggcctaaatagtggtcattgtttgccggaggccacaacctcattggtcgcccagccttgactcacgtagccaaagagagtgggtgggggctggctagaaggacccagctgtcctccatcccagccctcagccagggcgccgaggccagcggtttggtggtgctgggaaattgccttaacagtcagcaccagctgattttgaaaaagtagcagggagccgagggagcaggggccagggctgggctgcagggcggccgccttcctgactgcccttggtggaagcagctcccgtgagcctccttgcctcgggctccagtcttggggtgctgctcagacccgacccagcagcttagctcccctttcctccccatgaccgcccctccgctgtttcccactcacttcattcaaaagcctttccagcctcttccgtcggtgcagtgggatttggggatcactgggtcctggccttcggccttgtccccccagctccctctgccctctctcatccactcacccttttgcccaaattgcaggggctgctgtctccgcatttcctctcccttgcacccctcttttctgctccctggagtgcccctgcctctcccctgtccccccagcccaggggagcctctcccgccgtccctggcatcagagcagccagggagctgctttacctgtggatacgctgcagctccacacccagcctagtccctctaagcctgcacactgagggggctccagccagcacagagctttttttgctgccttctaatccagcgtccagcaggcttcagattacagctactcctttcttaaagcgacctgcactcaatttggattctgtgattgcatcactgtctcgtgttaactttaacccactgctgcaccaccatccattacgcctaaggcgcacacatttgcacaccttcctcttcctttagattttccttcaggggccgggcgcaggggctaacgcctgtaatccagcactttgggagactgaggcaggtgcatcacctgaggtcaggagttcaagaccagcctggccaacgtggtgaaaccccatctcacctaaaaatgcaaacaaagctgggcgcagtggctcacgcttgttatcccagcactttgggagaccgaggccgggggatcacctgaggtcaggagttcgagaccagcctagccaacacggtgaaaccccatctctactaaaaatacaaacaaaattacccaggtgtgttggcgcgcacctgtagtcccagctacttgggagtctgaggcaggagaatcacttaaacctgggaggcggaggttgcagtgagctgagatcacaccactgcactccatcctgggcgacagagcgagaccccgtctcaaaaaaagaaaaaagaaaaaaagatagaaaaatttctcaatatagtgacaaccttatatttccgcctcagttctttcccgtcaccataaccaccatcttgaatttgatttttattattttcgtacatttctttttacttttaccatgtaagtttttgtccctaagtgatatatagtatcagtttgcatgttcttaaaccttaggtcaatgtatcacactgttcttttttttttttttccaatggagactcactctgtcacccaggctggagtgcaggggtgcaatgtcggctcactgcaacctccgcttcccgggttcaagaggttctcctgcctcaccctgctgagtagttgggactataggtgtgcacgagcatgcccggctaatttttgtatttttagtagagacagggtttcaccacattggtcacgcttgtctcaaactcctgacctcaggtgatcccgcccccctcagcctcccaaagtgctgggattacaggcgtgagccaccgtgcccggccattgtcttttcatgtttatggcaggggtgtccaatcttttggctcccctgagacacattggaagaagaattgtcttgggccccacgtaaaatatgctaacattaatgataccgaatgagctaaaaaaacaaaaaacaaaacaaaacaaaatctcaaaaaaaatctcataatgttttaggaaagtttacgaatttgtgttgggctgcagtcaaagcttttctgggccacatgcagcctgtgggtcatgggttacacaagcttgttttaaaacaagtttttaattttaacaccaacattttcaatcttttcttttataatttgtgcttcttttggtatcttttttaaaaaatctcttcttccccgagatcacgaagggattcatctatactttcttctaaaacgtttacaattttaggccgggtgtggtggctcatgcctgtaatcctaactatcgggaggctgaggtgggtggatcacctgaggtcaggagtttgagaccatcctggccaacatggtgaaaccctgtctctactaaaaaaaataaaaataataaaatatttacagttttgtctattgtatatgtgtttgtattagcttttgttttgtttttttgtttgttttgttttgttttgtttgagatggaaccttgctctgtggcccaggctggagtacagtggcacaatctcggctcactgcaacctctgcctcccaggttcaagcgattctcctgcctcagcctcctgagtagctgggattacaggagcacgccaccacgcccggctaatttttgtttttgtttttgtttttgtgttttggtacagacagggtttcaccatattggccaggctggtcttgaactcctgaccttaggtgatcacctgcctcggcctcccaaagtgctgggattacaggagtgagccaccatacctgg

SEQ ID NO: 1244676 - DNA, 4001 bp, Homo sapiens
cagcggctcccactcctgcagctgggacatccgccctggcttctccccctttttagtttctggtgtttcatatttcatgcatttcatgcactgagggtgttttggtgaataggagggagataccaaatcaaaaacgttctcattctacaaggccctgcgctgtgaatcagatctgtgtctgaatccaggctacctcttgccaaaggacctcggcatttcccgtaactccaccaggcttggccttaccttgtaaaacggtggcacaagtccctcactcttctcacatgcatggtgaggaccaaaataagaccgtctttttgggattttttgttgtttattttttgagacggagtttcgctctcgttgaccaggctggagtgcagtggcaggatctcggctcaccgcaacctccacctcccaggttcaagcgattctcctgcttcagcctcccgaatagctgggattacaggcatgcaccaccacgcctggctaattctgtatttcttagtagaaacggggtttctctgtgttagtcaggctggtcttaaactcccgacctcaggtgatcctcctgcctcggcctcccaaagtactgggattacaggcatgagccactgcacccggcaaaagaccatctttgtggccaggcacggtggctcaagcctgtaatcccagcactttgggaggccaggggcaggtggatcacctgaggtcgggagttcaagaccagcctggccaacatggtaaaaccccatctctactgaaaatacaaaattagccaggcgtggtggtgggcccctgtaatcccagctactcgggaggctgaggcagagaactgcttgaacccgggaggcggaggttgcagtgagccgagatcacgccactgcactccagcctgggcgacagagcaagactctgtctcaaaaaaataaataagaccatctttgtaaaccctgagtacaatgcttggcactcccccgatggctggggtcagcttggctcaaggccacctcttctgggaagcctgccctgaagcctccaccgcagagctccaacacagagctcctacccagcctgctgcatccatttagcctgtcttttttttttttttttttttttttgagatggagtttcattcttatcatgcaggctggagtgcaatggcacgatctcggctcactgcaacctccacctcctgggttaaagcgattctcctgcctcagcctcccgagtagctgggattacaggcatgtgccaccatgcctggctaattttgtatttttagtagagacagggtttctccatgttggtcaggctggtctcgaactcctgacctcaggtgatccacctgcctcagcctcccaaagtgctgggatgacaggcatgagccaccacgcctggccccaacccgtctttctcaggctggtcaggtcttgcccacaaggctggacatacctgtgaggccctgaggtctcaccatgggtggcaaggcagccagagagctgccttttgacccagcagcagagcccagtgaatgactctggccagagccacctctgcacttaggagcatcacaggcctctgctccaggctggctctgggaagggcaggtgttggtctcaggaggataagtcagagcaggtctcagctacctccagcccacccccatcttggggccaacccttctggaggatcctttggtccccccggccccacccccatcccacacaagagcccttggccagggccccgactccgacctgggcattagaatcttcttgccaagaacaggctccagtttttcaagtcccagaagaggctggggagtgacaggcctcctgaataaatcccagacccctcagccagggaggcagctccctcctcctctcctacccaaggagcaggccgagcagcccctcccctcatacctctgcgggctccttgctgccacacacaacgttcctctggccccacttgggtgctcctcactctctgcccaggctccagctggcccagcccacccctcccctcccaccaggacctttactctcagccaacccctgttcagattgctttctcttctggtaaatattgacttgcacatccagttaaacattgatcttgaagccagaagcccctttcccaccagggcatctaaccctgaggcagccacgcagaaccccctatatttgggtccccccccccgagcctggaaagagaaagttcaggaggagagagttgaagagactggatctggctagccaagagggcggatccagaaagcacaggaacctagcactgtgttaagccttccagagaccccacgaggtgtggattatccctggttcagccaggctcagagaggccatgtgacctgcccaaggacacagagctgggctgaggcacatccagattctcactcccaatgtcctttcttctcccagagagctgcctcccgctcctgaggggaggaaaggggaagccacaagagcctatgcagagagcccaggataggaagcccacccccaaccttccaagcccaggatcaggttggctgccttcagactgggatggaaggcagggggtgagggaggagaaatgagagggactcaacttctcccaccgtcctgccactccagagcaatgtctctttcccctacccaagagcgagggttctggaaactgacctggggctgtatgaaccagaagcctggcagcccgtgcaaagatcaggctgcttcccaccctcactgtccggctcctcactccctgcatcaggctccttcccaccctcactgtcctgctcctcactccctgtatcaggccccttcccaccctcactgtcctgctcctcactccctgcatcaggccgcttcccgccctcacacctgctcctcactccctgcatcaggctccttcccaccctcactgtccggctcctcactccctgcatcaggctccttcccaccctcactgtccggctcctcactccctgcatcaggctccttcccaccctcactgtcctgcgcctcactccctgcatcgggccacttcccaccctcactgtcctgctcctcactccctgcatcaggccgcctcccaccctcactgtccggctcctcactccctgcatcaggccgcctcccaccctcactgtcctgctcctcactccctgcatcaggctccttcccaccctcactgtcctgcgcctcactccctgcatcaggccacttcccaccctcactgtcctgctcctcactccctgcatcaggctccttcccatcctcactgtccagctcctcactccctgcatcaggctccttcccaccctcactgtccggctcctcactccctgcatcaggctccttcccaccttcactgtcctgctcctcactccctgcatcaggctccttcccaccctcactgtcctgcgcctcactccctgcatcaggctccttcccaccctcactgtcttgcgcctcactccctgcatcaggccccttcccaccttcactgtcctgcgcctcactccctgcatcaggctccttcccaccctcactgtccggctcctcactccctgcatcaggccccttcccaccctcactgtcctgcgcctcactccctgcatcaggccccttcccaccctcactgtcctgcgcctcactccctgcatcaggctccttcccaccctcagtgtccggctcctcactccctgcatcaggccccttcccaccctcactgtcctgcgcctcactccctgcatcaggccccttcccaccctcactgtcctgcgcctcactccctgcatcaggctccttcccaccctcactgtccggctcctcactccctgcatcaggccccttcccaccctcactgtcctgcgcctcactccctgcatcaggccccttcccaccctcactgtcctgcgcctcactccctgcatcaggccacttcccaccctcactgtcctgcgcctcactccctgcatcaggccacttccc

SEQ ID NO: 1244677 - DNA, 4001 bp, Homo sapiens
tgagcaccaggagcccccagagcagcgccatgttcctgtggcagggacagaaagctctgttcccatctcacatccccacgcccgccagggaatcctacccacgcgatcacagataacgccaagtcctgggtcatgattgccaaggggaagaagcaggctccagaatcagaacagaccccaaacacacgagcagcggctcccactcctgcagctgggacatccgccctggcttctccccctttttagtttctggtgtttcatatttcatgcatttcatgcactgagggtgttttggtgaataggagggagataccaaatcaaaaacgttctcattctacaaggccctgcgctgtgaatcagatctgtgtctgaatccaggctacctcttgccaaaggacctcggcatttcccgtaactccaccaggcttggccttaccttgtaaaacggtggcacaagtccctcactcttctcacatgcatggtgaggaccaaaataagaccgtctttttgggattttttgttgtttattttttgagacggagtttcgctctcgttgaccaggctggagtgcagtggcaggatctcggctcaccgcaacctccacctcccaggttcaagcgattctcctgcttcagcctcccgaatagctgggattacaggcatgcaccaccacgcctggctaattctgtatttcttagtagaaacggggtttctctgtgttagtcaggctggtcttaaactcccgacctcaggtgatcctcctgcctcggcctcccaaagtactgggattacaggcatgagccactgcacccggcaaaagaccatctttgtggccaggcacggtggctcaagcctgtaatcccagcactttgggaggccaggggcaggtggatcacctgaggtcgggagttcaagaccagcctggccaacatggtaaaaccccatctctactgaaaatacaaaattagccaggcgtggtggtgggcccctgtaatcccagctactcgggaggctgaggcagagaactgcttgaacccgggaggcggaggttgcagtgagccgagatcacgccactgcactccagcctgggcgacagagcaagactctgtctcaaaaaaataaataagaccatctttgtaaaccctgagtacaatgcttggcactcccccgatggctggggtcagcttggctcaaggccacctcttctgggaagcctgccctgaagcctccaccgcagagctccaacacagagctcctacccagcctgctgcatccatttagcctgtcttttttttttttttttttttttttgagatggagtttcattcttatcatgcaggctggagtgcaatggcacgatctcggctcactgcaacctccacctcctgggttaaagcgattctcctgcctcagcctcccgagtagctgggattacaggcatgtgccaccatgcctggctaattttgtatttttagtagagacagggtttctccatgttggtcaggctggtctcgaactcctgacctcaggtgatccacctgcctcagcctcccaaagtgctgggatgacaggcatgagccaccacgcctggccccaacccgtctttctcaggctggtcaggtcttgcccacaaggctggacatacctgtgaggccctgaggtctcaccatgggtggcaaggcagccagagagctgccttttgacccagcagcagagcccagtgaatgactctggccagagccacctctgcacttaggagcatcacaggcctctgctccaggctggctctgggaagggcaggtgttggtctcaggaggataagtcagagcaggtctcagctacctccagcccacccccatcttggggccaacccttctggaggatcctttggtccccccggccccacccccatcccacacaagagcccttggccagggccccgactccgacctgggcattagaatcttcttgccaagaacaggctccagtttttcaagtcccagaagaggctggggagtgacaggcctcctgaataaatcccagacccctcagccagggaggcagctccctcctcctctcctacccaaggagcaggccgagcagcccctcccctcatacctctgcgggctccttgctgccacacacaacgttcctctggccccacttgggtgctcctcactctctgcccaggctccagctggcccagcccacccctcccctcccaccaggacctttactctcagccaacccctgttcagattgctttctcttctggtaaatattgacttgcacatccagttaaacattgatcttgaagccagaagcccctttcccaccagggcatctaaccctgaggcagccacgcagaaccccctatatttgggtccccccccccgagcctggaaagagaaagttcaggaggagagagttgaagagactggatctggctagccaagagggcggatccagaaagcacaggaacctagcactgtgttaagccttccagagaccccacgaggtgtggattatccctggttcagccaggctcagagaggccatgtgacctgcccaaggacacagagctgggctgaggcacatccagattctcactcccaatgtcctttcttctcccagagagctgcctcccgctcctgaggggaggaaaggggaagccacaagagcctatgcagagagcccaggataggaagcccacccccaaccttccaagcccaggatcaggttggctgccttcagactgggatggaaggcagggggtgagggaggagaaatgagagggactcaacttctcccaccgtcctgccactccagagcaatgtctctttcccctacccaagagcgagggttctggaaactgacctggggctgtatgaaccagaagcctggcagcccgtgcaaagatcaggctgcttcccaccctcactgtccggctcctcactccctgcatcaggctccttcccaccctcactgtcctgctcctcactccctgtatcaggccccttcccaccctcactgtcctgctcctcactccctgcatcaggccgcttcccgccctcacacctgctcctcactccctgcatcaggctccttcccaccctcactgtccggctcctcactccctgcatcaggctccttcccaccctcactgtccggctcctcactccctgcatcaggctccttcccaccctcactgtcctgcgcctcactccctgcatcgggccacttcccaccctcactgtcctgctcctcactccctgcatcaggccgcctcccaccctcactgtccggctcctcactccctgcatcaggccgcctcccaccctcactgtcctgctcctcactccctgcatcaggctccttcccaccctcactgtcctgcgcctcactccctgcatcaggccacttcccaccctcactgtcctgctcctcactccctgcatcaggctccttcccatcctcactgtccagctcctcactccctgcatcaggctccttcccaccctcactgtccggctcctcactccctgcatcaggctccttcccaccttcactgtcctgctcctcactccctgcatcaggctccttcccaccctcactgtcctgcgcctcactccctgcatcaggctccttcccaccctcactgtcttgcgcctcactccctgcatcaggccccttcccaccttcactgtcctgcgcctcactccctgcatcaggctccttcccaccctcactgtccggctcctcactccctgcatcaggccccttcccaccctcactgtcctgcgcctcactccctgcatcaggccccttcccaccctcactgtcctgcgcctcactccctgcatcaggctccttcccaccctcagtgtccggctcctcactccctgcatcaggccccttcccaccctcactgtcctgcgcctcactccctgcatcaggccccttcccaccctcactgtcctgcgcctcactccctgcatcag

SEQ ID NO: 1244678 - DNA, 4001 bp, Homo sapiens
cacactagtggcctcacacagtcctcacacccattcactgctgacccctcacccaagattcggaccacttgaagtgcagacacactgggactggctcctctagtcatgcagggccctgattactctcacattcagacccacaaactcacacacaaggccttgactaactgccaggggacagacacaggccctgcgccccaggggagctgtccagcgccaggacccatcaggacccaagataggttcggaattcctagggacatccccaggcagctaggcagggattcacacttctccttcccggtcttcatccctggggtgggtcttgcaggactcttcccctctccccagaacgtgagcacacggtttcaagttctgggcgctgccggaggatccagcatgggcagcccggtagcggggtgaggacactgggctgtgtgcaagtggagctagaggctcagaaaaaggcttctgcgtctccggggccacagtttttcttcctggatgaagaaaactgccgtccgggggcccagcctgtccctggccgcgctgccttgacctcggcagcggcctggaaagatcgagcagggaggttagaaactcccaccctcacacttcacatcaggcccttcaaaccatatggcaagggatggcaggtctcaactccaagtgcggttctgccgaccctaccagcctactgcagcgggagaaggacgtgggtgccagtagcttccatgagagcttgtttgagccaggacggcaggtccagacaagactcttccccgaggcacggaacccctatcctctccccaacactcccttgccgctcacaccatggccaagcttccctctacccaagaccgacgaagttggggaccagactcctagagggggcgcggggattctcagggtgtggggaacaggtcctccagagacaaatctgccttgcaggtggggagtggaccagggccgggcaggaaggcaggccgggagggaggcagagctcggggcagtggtgtgtgtgtgtgtgtgtgtgtgtgtgtgtgtgtgtgtgtacaaggaaaggactttggggaggacagagtctctatcccaggatctccgctgctgcagccgagggcagagccaggagccagatagggggtccaggcccttggagtttctctctagaattgtgctctaggtcccgactctggcgtggcagcgccagggcatggggaggtgagcgaggtcccaaccccgggtccggccgccatccggccccgtctcccctcagtaagaacactagaggccctggaaccggcggcaaagtcgagcgaagtttggcgggcggcaggggaagcgggaccacgggccgccagctggaccgtcccgactcactgccttgcgccccccggcacgcgccccagcaccctgagatgcctagagtgtggcgaggtagcgcgcgggtgagcgcgtgtgtgcggggagtgggtggcgtgatgaattgcatcagagaaatcccattagatctggggagatgattaaagacgaggtctcggccgggcgcgaatggcgggagccgcggcagcttcccgcccgcgaagcccgcgccccgcccggcttggccggcgccgggggcagcgcagccggcggggcgcggtgcttggactgggcagccagatgcccgaagctgggcaccgggtctcccttcccacccctggggccccgctcccgcccccgtcctgccgccggatgccggggtcccttaccgtgagccaggagcgccagcagcgagggcaggagcagcagggctaccgggcgcatggtgctggttgcggccgcgccctgggctgggaccgcggcgggagggcggggggcttggtggggcttgggcgcgggggcagagccgggtccggccgggtagagggagcggggccgcagccgtcaccgccgctgccgccgccagcgcctgacagaatcagcaccacggccagcgcctggcgacggcgccggggatcgccgagcggggctgggggcgggggcgcgggaggagcggcttaccgtaaagtctcatgcaaaggcgcagagacccaggggcaggagcccaggctcccgctccaccgcgactgccctactcatgtgggcacacggcccctgcccttctgcgctgcccacccccagccaagcatgccaccctctttcccgttaacggcctgctaaggaacctcaattaatagctcactgtagccttctgattctccatgagaaagagcaacactttccccacccctctccacccaatcctggtacctgagggcgtcaagggtgacctgggaagacatccgagagtgaggcagctggtgaggcccgcgtgcccttgtggcagttccgtcttgggacgataatgaagatggcttttgagcgtacaaaggataataaattattactttgcgctcaataaatgccagggctccaggcagctgcatcagcagcaaactgtgctcacagaaaagcttaattatcctgatattatagttaaaagccagtggcactcgcatcctggggagacattcttcacttggcaggaggcaacctgggccaagctgtgggcagctgaaggtagtatcctgggtccccacgtagccctgggtctccaggactctgccttggcccctctgcaggaccagagaagccacagtgacagtcgatacagacccttcatgccatctctgcccaggtttctggaattggtggagaaaatggcataggcatgagagagggtttcctagagctgttattttattttattttattattgtttttagagacagggtctctgttgcttaggctggaaatgcagtggcacaattatattaatagctcacccaaactcctgggctcaagagatcctcccacttcagcctctcaagtagctagaactacaggcatgcacccccaagcctggctaatttttaaattttttgcagagataaggtctcattatgttgcccaaactggtcttgaaatcctggcctcaagagatcctcccgccttggcctcccaaagtgctgggattacaggcatgagccactgtgccctacggctgttttagatagagacttgaaggaggcccaggggtgtagcctgtactattaaaggcatggaaaaataactttccagggccctgcttgggctgaggagccccagtgagtcacaggacagcaagggggcagtcacagctgtgccatcctgaggctgctctttaaaggcaggggctcatggatgggctcacttgaagagctttaatgggtacaatgggacaggatcctatggctgatgttattattccctgtagaggaataggagggctgaactccctattgcccctgggagaagggcagttttttgtttagtttctttttacatgaacttggttgctctccaaagcttccagactccagtcattgtccagtgtccttcctgaccctcatcctggaagcaggtggtgaaatttctgctcaagttccttagagagtgttttggtcctcttgaccagagtctcccaactctgctggttggattctctccagaccctcttcttgtgggctctggggagctgtgatgactgctgtaaagagtcccaggcagcaggcagatggcgtgtggaattaggaagacgctgggatttctggacagttgttttgagaagctgaggaaaaagagggcagcagcagaaggatggcaggaagaaggaggagctgatgcaagaatcaggggtgaggagaggaagccaggaaagaaggtgcaagaggggaggcagaaagagagttgccaacagaggaagggaagagacacagaggtagaaggttgtgtgaccgggggaagtttaggaaaatgctggcaaatgtcatgagattcctcttttcctccttgaaagtattcctgggctcctctagtattcctggtccctcatggctaggcagcttgggcaaggggagtgagtcatgacctagggatga

SEQ ID NO: 1244679 - DNA, 4001 bp, Homo sapiens
gggcgctgccggaggatccagcatgggcagcccggtagcggggtgaggacactgggctgtgtgcaagtggagctagaggctcagaaaaaggcttctgcgtctccggggccacagtttttcttcctggatgaagaaaactgccgtccgggggcccagcctgtccctggccgcgctgccttgacctcggcagcggcctggaaagatcgagcagggaggttagaaactcccaccctcacacttcacatcaggcccttcaaaccatatggcaagggatggcaggtctcaactccaagtgcggttctgccgaccctaccagcctactgcagcgggagaaggacgtgggtgccagtagcttccatgagagcttgtttgagccaggacggcaggtccagacaagactcttccccgaggcacggaacccctatcctctccccaacactcccttgccgctcacaccatggccaagcttccctctacccaagaccgacgaagttggggaccagactcctagagggggcgcggggattctcagggtgtggggaacaggtcctccagagacaaatctgccttgcaggtggggagtggaccagggccgggcaggaaggcaggccgggagggaggcagagctcggggcagtggtgtgtgtgtgtgtgtgtgtgtgtgtgtgtgtgtgtgtgtacaaggaaaggactttggggaggacagagtctctatcccaggatctccgctgctgcagccgagggcagagccaggagccagatagggggtccaggcccttggagtttctctctagaattgtgctctaggtcccgactctggcgtggcagcgccagggcatggggaggtgagcgaggtcccaaccccgggtccggccgccatccggccccgtctcccctcagtaagaacactagaggccctggaaccggcggcaaagtcgagcgaagtttggcgggcggcaggggaagcgggaccacgggccgccagctggaccgtcccgactcactgccttgcgccccccggcacgcgccccagcaccctgagatgcctagagtgtggcgaggtagcgcgcgggtgagcgcgtgtgtgcggggagtgggtggcgtgatgaattgcatcagagaaatcccattagatctggggagatgattaaagacgaggtctcggccgggcgcgaatggcgggagccgcggcagcttcccgcccgcgaagcccgcgccccgcccggcttggccggcgccgggggcagcgcagccggcggggcgcggtgcttggactgggcagccagatgcccgaagctgggcaccgggtctcccttcccacccctggggccccgctcccgcccccgtcctgccgccggatgccggggtcccttaccgtgagccaggagcgccagcagcgagggcaggagcagcagggctaccgggcgcatggtgctggttgcggccgcgccctgggctgggaccgcggcgggagggcggggggcttggtggggcttgggcgcgggggcagagccgggtccggccgggtagagggagcggggccgcagccgtcaccgccgctgccgccgccagcgcctgacagaatcagcaccacggccagcgcctggcgacggcgccggggatcgccgagcggggctgggggcgggggcgcgggaggagcggcttaccgtaaagtctcatgcaaaggcgcagagacccaggggcaggagcccaggctcccgctccaccgcgactgccctactcatgtgggcacacggcccctgcccttctgcgctgcccacccccagccaagcatgccaccctctttcccgttaacggcctgctaaggaacctcaattaatagctcactgtagccttctgattctccatgagaaagagcaacactttccccacccctctccacccaatcctggtacctgagggcgtcaagggtgacctgggaagacatccgagagtgaggcagctggtgaggcccgcgtgcccttgtggcagttccgtcttgggacgataatgaagatggcttttgagcgtacaaaggataataaattattactttgcgctcaataaatgccagggctccaggcagctgcatcagcagcaaactgtgctcacagaaaagcttaattatcctgatattatagttaaaagccagtggcactcgcatcctggggagacattcttcacttggcaggaggcaacctgggccaagctgtgggcagctgaaggtagtatcctgggtccccacgtagccctgggtctccaggactctgccttggcccctctgcaggaccagagaagccacagtgacagtcgatacagacccttcatgccatctctgcccaggtttctggaattggtggagaaaatggcataggcatgagagagggtttcctagagctgttattttattttattttattattgtttttagagacagggtctctgttgcttaggctggaaatgcagtggcacaattatattaatagctcacccaaactcctgggctcaagagatcctcccacttcagcctctcaagtagctagaactacaggcatgcacccccaagcctggctaatttttaaattttttgcagagataaggtctcattatgttgcccaaactggtcttgaaatcctggcctcaagagatcctcccgccttggcctcccaaagtgctgggattacaggcatgagccactgtgccctacggctgttttagatagagacttgaaggaggcccaggggtgtagcctgtactattaaaggcatggaaaaataactttccagggccctgcttgggctgaggagccccagtgagtcacaggacagcaagggggcagtcacagctgtgccatcctgaggctgctctttaaaggcaggggctcatggatgggctcacttgaagagctttaatgggtacaatgggacaggatcctatggctgatgttattattccctgtagaggaataggagggctgaactccctattgcccctgggagaagggcagttttttgtttagtttctttttacatgaacttggttgctctccaaagcttccagactccagtcattgtccagtgtccttcctgaccctcatcctggaagcaggtggtgaaatttctgctcaagttccttagagagtgttttggtcctcttgaccagagtctcccaactctgctggttggattctctccagaccctcttcttgtgggctctggggagctgtgatgactgctgtaaagagtcccaggcagcaggcagatggcgtgtggaattaggaagacgctgggatttctggacagttgttttgagaagctgaggaaaaagagggcagcagcagaaggatggcaggaagaaggaggagctgatgcaagaatcaggggtgaggagaggaagccaggaaagaaggtgcaagaggggaggcagaaagagagttgccaacagaggaagggaagagacacagaggtagaaggttgtgtgaccgggggaagtttaggaaaatgctggcaaatgtcatgagattcctcttttcctccttgaaagtattcctgggctcctctagtattcctggtccctcatggctaggcagcttgggcaaggggagtgagtcatgacctagggatgaatcttgtattgccaggatgattcatggggatttggaggttggtggcaggcttgtctgactctcttagcaacagggctccttgatgggctgggcactatgcacataaaggagggggagagaagccatcctggaacttgtcacatcaccttccctatggcctgaactaacctagagggtccaatggagactacaagtcccagaatacagtactgtaccctgagctcagaagatgggcttgtactgcatgatgggcatgacaatgcaccggggctgtccctccctcctaaaggcagttaacatagcctttatgcagtgggttcctaggcaggttgaggcagagcctgggccaaactgggaaacagcagagcttctgtcag

SEQ ID NO: 1244680 - DNA, 4001 bp, Homo sapiens
atctccagcaccagcctctgccgagtggtatcaaagctgtcccgattgtaggctgtgacctgggggatgggaaagacatctgagaagtgggttaggggagaaacgtggcacagcgggggcctggcaggagaggactcagataccaaattagaggtatgtaaattatatgtaaatgactgtgaatgagcacccaatcccaattcatagggctgctcctaggaggccactctggcccacccctgtgattttctcagggtccctgacggcacctcaatgacctggagcccacgatcttctggggtggcagagccgtagaggaagccagggtggtgggggctgcgctgggtgtagcggagccaccggggcaggtctgggtgtccctggaggtgggcgtggtaggtgatgtggacagcgggtgggacagctggtggaagcgaggagaggggattcgagtcacagcaggagccctgcggggtacaccccagcccgcccgcctgggtgcctgtcaggccgctcaccgacatgctcaggaaggctcagaaacgtctcatggtccaaggtgtgcacaaagacacggcccacaagtgggtgtagcgtggtctgctgggcctcggtgtcccccagccctgccaggagaactgtggggaccccacaagtcccaaacacacaggccagcctcagtcctgggcaggggataagctcccttccccaccaagtccttggagcccctaagggaccgagagaagcgcttcctttgctgcctcccaggaagggattggggtggggatgggggagcaagccctgctgggctagacattttaatcgtctgggtttcgggattcgagggagaacctctcccacaacctttccattccttgttttaggcccctattaatggtgcagtgggcagggactgatgtttgactgggaagtgtgtgtgtgagggtgtgtgtgtgtgtgaggggatgtgggggggtgtgtgtgtgaaggtatgtgtgagggtctgtgaggatgtgtgtgagggtgtgtgtgcaagtgagtgtgtgtgagagggtgtgtgtgagggtgtgtgtgtgtgaaggtgtgtgtggggggtgtgtgtttgcggggggtgtgtgggggtatgtgggggtatgtgggggtgtgtgtggggggtgtgtgtgacggtgtgtggggtgtgtgtgtgacggtgtgtgtgagggtgtgtgtgtgagggtgtgtgagggtgtgtgagggtgtgtgtgtgagggtgtgtgagggtgtgtgagggtgtgtgtgagggtgtgtgtgtgagggtgccgtgagggtgtgtgtgagggtgtgtgtgggtgtgtgtgtgtgtgagggtgtgtatgtgtgaaaggcactgggaaaagaatcccatgctaaatgcccaagagcccagaggagaggaagacggggccaggagcctacagaggaggaagggtagccattctgggcctggagacccccaccttcctcccctaaaatacagggaagaagaaggcctgccctagaggccagtaggagctgagcaaaaggaatcctaagtccaagagaggagcagaggacctggccgccagctccaccctccctcccagggccaaatttagcctgggcttagaagctgcggcccagccagctcattaaagggcccacgaccctttgggcctgtgctgtcagacccacccgggccctaggacacctccagccctcagagctcccagccccttcatcccagagcccagctcccagccccattccctggatccccagctggccatggcattaacaccccaaagcccttctggcgcctgcctcacccaacccagatccctcttctgtgggccctccacacctccgtcttaccacccctaaatcctgccccctcatcctgggcctccccgctgaacaaggccccaacttgcccacgaggagaggagtccagaagagtgtctcagccatggctgcccggcctggcccgcccggtgagtgacagagacagggggcagggaggagaggagggaaggagggaggtggctcggggcagctgggtcccagcgtcagcctcccctccccgcctggagcatgcaccaaatctgggatagacaccctcctcgcactcattgtccctccaaccgtcccctccagtggccacagtgttttttaaaccaccaaccaggccacctccatcctcccttaaaactctaatggttctcatggcccctgagttcccagctcatccccagttggtggctttctggcctgtcctgaacctggtcagctggtctagaatcccatcctctgcccctacccttccaaccccaggcccctgctcagcctcactccgctcctgcctagcttggcagactctctcaagtctccaagccgtcgtccaggctattgcctctgcctgcagttcccttcccaccttcattcaagcagcaaccttccagtcacctttccagactctgcacagatgtcctctcctctctgaagcctttctgacctcccttcttctgctaggccaagctgggtgtccccttagcccctgcgtgctttcctgggcacaacacaatcacacagactgctccaagctcctcgaagactaggatcttgtcacgtttgtatccttgggcctggcacagggcctggtaactagtaggtgtagctggctggcggcagcttccttaacagcaaacgtaggtgccatccacccagcctttatccccagtccaagcacttcagcgtggaggtctagcaagccctggacaggaccagccagctagagacaggtgagcggaggaggcaccctctctggcccatggagtcagggttcattcggcgcatagacttggaggcctggaggtgggccaccttggccacttgctggggatgaggccttgagtgcaccatttgccctctagcccatttccacaactataaactggcaagaatagtgcttgcctcttggcatcattgtgaggactccacaaagtaatgaatgcagcgcatatttatgaaacacctgctatgtatcagacattgaaattgcaaagataagcaaacctctgcccacatggaggtcacctgccagtgggtaataccagctagcgctgccagctactgtgctgagaatcttacatatatctacctatattacctcattccatctcctcagcagttccatgaggcaggtattattactgtgcccatttaacagatgataaaactgaggcacaggggtgtataccttccccaaggccacattgctgatgagtagaatgcatgtggacggcttagcccagtgcctggctcagtcgatgactgtgctgctgatgtacttgcccggccctgcttccccttccttcttgcctctgccaaaggatctcagtccaggggcgatggggcgcggtgtcctctccccaggtctctcacttagggcaggcacaggggcactctccccaggtgccctgagaagggggcggggacctatggctgccagggttcccaaatccttggtgcctgtgtgacctctcctccagggcctcaaaaggacaacaaaataccccaggcaaggatcacttgggtccagcctaagggcacaggtgttggcctgcagatggggtgactggtaggcaggttacgcagtccttgtcccttcctctctctctctccacctgactgacccgctcatccctggagagccaccaaattccagagtcagcgtcccctcaggcaaggcagtatttgtcccagcatcacctggccatctctctgtcttctcagagacagagggagggaggaagaaaggttctggaggcagaggaagagcccaagggttctgggggagcaggcagaagtgccaaccccctgggcacctgcccagcctcacccctgagcttctccatgtgactccccgccccctgccgtccccctggctatttttggagccacccactcagctgtcttaaggtagcagtgcctggccccagtgtcac

SEQ ID NO: 1244681 - DNA, 4001 bp, Homo sapiens
attttttactctccttcttccgaacttaaatcttccctccccatttcctttaccactgtttcacttacacagtaccagcaccaactcggcagcaaagagacggatggaagcctcaggaaagcagccaacagccgaccaaagggagtacagatctgtgctgcagtagctacacactgcaaagccagtgtggagctacatacattgccagaagtctaggcaatgtttgggagctgcaatgcctgggctcaaggcattgtaggcctcctgcccaaactgataccacctgctgttcccctccctttgggacagagaggtgccatgagaagggggacagagcaaaggcagaacaagccaaagaggtaatctcaggtggggaacatggtacaaagaccctgggggatgaggagagagtccagtcactcactaatgaaaaggtgccgttttccctgccagctgtcccccaagctgtgtacaaagggatggttgatctgtcgctaggaacaaagaaaacaggaagttagggaggaacagggtcattgagaataaaggcagctgagaaatcaggttttacccagatgtgcagagggggaactgctgcctcacctctcagttcagaggaactcaatatttggaactgactatctggtaatcctagaaccagcaaatactaaggaatacactgggacatgcttcagagatttccctagtaggacatgggaaaactgtgttgagagctgatacttttcccaggatctactttagtgttaaactaggctgaagcagatggatgaggcagaaccaggaaaagaaggtgggcaagaaaggtactttccctacctgtggcctagctcttcccacaatcctttccaggactctgtgcatacctggatgctaacctcctctttgcactgcctcacggtatccctctgtaggacctttaccttgggcaccacctataaaaggagagtagtgatgactcatagatagtgctattgaattgtttattcctcccaacctctctggaatcaagattggaaacagagactaatgtggtatctacgcccctaccttcactgcaaatacagctttctgggtgcaatctagcaccttgaggacagttccaaaggagcctttagccacgaggcctaaaatctgtacagaggaatggagaacaggccagttgagactggtcatttttaacttctcccaaagactgagaccccactcagggattccactgacttaccttcagctgctgctgccccctaatgggcctaatgggaaactctggtagaaagaggttgatgaactgaggcactggccactctggcagaggcttctctaccagtactggggctggctttagggattcctggtgcagatagtggtgcccccgtagttcccagagttcttccagatctgacctgatggttcccaaacctgtccagaggctcttccagcctcgggcccagggaccccggatgttgccaccctgctgagaaccaagggagccactctaaactttctgctcctgaggcatagcaggttccacccatcttactaggcactccctccccttaagtctcaacccctagaggtacatttttgagcatgaggcaaaattcccattacccttgctttgtgctaagccccagatttcctgggcacaattcaaatcctctaggaaaataattgttggacattttcaccatgacgcattaagagtacagcctgcacctcagtattgggctgtgatgctttcatagtacagcctccctgccccacccccacattgggtaatcacttccatgctcctaaccaggaacttcccaggactcaagcccatgtctccctctcctcccctcagtaggctgccagagccccacagcctaccttgtgagggacagccacccgggtgtgttccccctgctgggtgtgctgcccctgccgacagcttactgctcccattcccagcctctgcctcctctctctgctaaatctgctgtcccagttatataagcaattcctctccctgatgctgcgtgacacgagccccgcctcttccagtctgcagaaacccatcagcatggggccagagtcacactaggactagaaatttctgtgatacagcttcagggcagaggaaggaaggggccaccctcagagtggcagctgcaggatgttctgggttgatgagggaggaatacacagattgaatgcatgcactcaacacacacacacaaaaatgagcatcaaatttaaaatatctttttttttctctttaaatcattttgccattctccagggtatatcctacggggaagggtaggggacccatggccagccctggctcctactgccatcctcccaagtgaacttagcacagagactggggaggggttgacccccactccagaacaccaatacctctttcaaacatgacagtggagtgaggatcagaggatcagccccctcccgtttcctggcacagaggaaggacagttacacttagaaatatatatataatatatatatatttatatatgtctataaaaatttatcacacttgatcaggactatccccctaccctttcacttgaccccaagggaatagggtcctgccctgggcccattccctgggtcttgctctcttgttgcctctctggccctgagcctgatcagtgtgagacagaactcagcattactgtccaccatgccctgcagcgaacagaccaggtgctgaagagtgatgcctatgggctctgacacccacaaatcctcgtggataacgggaagcccctcccaccccacaagtccctggagcctgagccagagtcagatcctgtactgcagccactcgaatcgccaaatcatttgcgcctgccaaagatggacttcttgccagggttcttgtcgcccacacttaaaccaatgaggagccgggctttctcctcctcttcctgctgttgcatgttcaggtccgatttagtttctagctttccccggacctcagagcctgttgcagacttcagccttagcttctctttgattacctggcagattggagaggagtaaaagaaaatgtaaatattagtgggcaggcagaataaatcaaaatgaaccaagacaataaagatttattaaacacatccaaggcacaatggggcaattcacatacaatggtctctgctttcaagaagcttacagtctaattataaccccttctaaactttaggttgtgttagctctcagttccctaaaatcaatggtgctatacgaaacactcagtaaacactgaatttaataatctgagtgaggtcatggagagggtaggcatagaagccactcacttcatgcacctgccccttcccaaggatatttattcatggattctaaaatgaaaggctcctgaaaagaggatctgcctgccagccccattagccaaacagccatgagccctggcgggatacctgggcaaccagggctttgcggctgtcccttttgacagccatggcaaagtctagccatgtccatgtgttgttgtggtactccagacagggcagcaccaggttaaggtcaccccagtccacactgttcttctcaccctgtaagaggagggggaggggaaagaaaaaaagaggggtggggaatacatcagctgccattttgagtcccagccagccacttgagtgccaagtcctacaatagtaacctacagatactgatttccccttacctcagcctcgtaatgatgctgactcttgaggggagcagagggaacagcagatttatcacccacagctcagcatcacaaacaacctagctgtctccctgtatagaatctctgatcttatctggttcccttcccaccctgttctacaaagtgcttgagaggtgcagaccttgtagctgacacacagtggaacctgtggaatctttatgtagatgaaggagttgttcatggcagctcgctctttcatcttgtcaatgtcatccacagg

SEQ ID NO: 1244682 - DNA, 4001 bp, Homo sapiens
cctacaaccacaccaagcttcttccccctgctctggagtagaggacactgggggcaccacaggagaggctggtgggaacccccagaccaacactttccccagctccctcagaggcaatgtggtccatggatggacagaggaggctgggcaccttccagttgggcttccatcctccaccccacagtacccacaggtgtgagcacatggcagccacgtaaacctggagggagagcgggatgggctgtgctccgtacccgcaggccaggaagaaagctgcccttctccaaacccagagtgtctcggcacttggctgtgggcctgctatggtctgaactgtgtcctcccagaattcatatgctgaagccctaacgtcaacatcactgtatctggagacagggtccttaattaagggtaaatgaatcataaggatgagatcctgatctgacaggactgtggacttaaaggaaaagaaagagagggccgggtgcagtgtttcatgcccgtaagcccagcacccgggaggccaaggcaggaagattgcttgagcccaggagttcgagaccagtctgggcaacacagtgagaccttgtctctacaaaaaatacaaaaattagccaggcatggtgatgtgcacttgaggtcccagctacttgggaggctgaggcaggaggatcgcttgagcctgggagattgaggctgcagtgagctgtgattgtgctactgtgctccagcctgggtgacagagtgagaccctgtctcacaaaaaaaaaaaaaaaaaaaaaaaaaggaaagaaaggaaaaagaaaggaaaaggaagtgagaccacccccatccgcttgtcatgtgaggaaacagtgagagggtgaccacctgtaagccgaaagtggaccctcactggaacccaaccaagctggcaccctgaccttggattttcagcccacagaactgtgagaaatacatttctgtttaagccgatccatggcagtccgtgctaagaaaggccctagcccaggggccgcatagcctggactctgacagcctcctgtaggaattctgatccgcaggtgagggtccatgcagattctctgctgtgtttctgggaggcgaggagttggcaggagagctgtttatgttacagtgagccgaacccccgcccagagaccacaaaattaatcagaaagagggcaactggcagggcgccagacctcagaaggggaaagaatcgcaggccttgggtttggccttgtcacttgtcatgagccagagccttgattacctaaaccggaagtcttgtgagcagcacggtgcttgctctggaggaacctggggtttctgagagggactggggttgggggagacggtggtgggtgggtggtggagggctgtgcccttgggataagggaaaagacagctgagacacaggctctggggtcggaaatgagagccaggagggcaccctgtctgcagtctctggggaccggagcaccagcccctcctctgggatcccctcccaagagggatttgagatccgtggacccctgagccctggctgggcagggtcagaggagggtgggacaggcggcacgaggtaagtgtaggggtgctggatgctggggctcactcctccagcctttgctgccctctctggggagacacccgtgaagagtctgggggcggcacagagaggaggacgagagggaatggcagcgggggatacaagggcagggcacactagggtcagcattgaccacgggtggggaggaggccagtggccacttccccgggccaccgcaggtgggcgtgggggggcggcgccggcactcaccgaggagcagcagtgcgttccggggacgcgcccggcagagccccaggactagcagcagcgcgcagcaggcgggcacggggcagctcatggcggcggcggctcggactcgggatcgggatccggctccggctctctggtctcccgctcggccccgccccctgccccgaccccggtcacgtgcgcgccagaccccgccccggcctgtccccggcgattcctgcggacccagctgcggcgacgccaggagaccccaagctgcatcgccgagtgggtgagtccgtggcccgcgagggcggcgagcggggaccaggggcagggggagcggacagtggccggggtcgccgggggcagccgacgcgggggccagcgcggagtcctgaagtgcgggggcctcccgtggggaccactcccccgccgcgtccctacccgggtccccgcggccctcggccttgctcggggccaagggaccgcggacggtcaggtggcgcagggtctcctccggagaccccaggatccggagccagcggccttgtgggcggggccgggggccggggagtggattttgcccggagcggagcggccgggggcgtggggggctgggggtgagggtggcggctctgcgcgcgggcgccggggccctggaagatgctgcgcacctgaattaaccgggcgcctctgatgtcctcccagaagcaactagaactccagggctgtgaaagccacaggtgggggctgagcgaggcgtggcctcaggagcggaggacccccccactctccctcgagcgccgcagtccaccgtagcgggtggagcccgccttggtgcgcagttggaaaacctcggagccccgctggatctcctggctgccacccgcaccccccgccagcctacggtgcgcccgcgggcccagcttctctctgcgctgctccccgttaaattccctggggagacggaaaaaaaggcaaaggaagtcggttctccaggggccagaagtgttgagcctaattagtcttcagacttctcaatgaggaatcgcttatcagtttcttatctgggagagttgaggatggagggacagaaggcacccaggatttgcacgggggggattcagggagagagggtgatgagggacggggtgggccttccagtcttggcccagtccccatcttgcacacattgttggcttcctcttagagccgttcgcccccctggggaggggagacccatagtgacctctcctgacacccgccgaccctgaccagtgttgccgggttcttcaaaggccacgctctgactgctggtctgtgtcacctgcaccccccagccccaccgtagagatgccttcttcggtgacggcgctgggtcaggccaggtcctctggccccgggatggccccgagcgcctgctgctgctcccctgcggccctgcagaggaggctgcccatcctggcgtggctgcccagctactccctgcagtggctgaagatggatttcgtcgccggcctctcagttggcctcactgccattccccaggcgctggcctatgctgaagtggctggactcccgccccaggtgaggcgtctgaccctgctgccagccatatctcagaaacagtgcagaatacacagtatcaatcccagacaccatcagcgattccaggtttccagcccctgggccccaaggaacctttggtttacagtgtgtgacgcagattgtctctgggccgacccaggctcctatgcctgtttggcacacacagacactgagctggttatggaggggccagcgagatgactcatggaggcctcaggagttcaagaccagcccgaccaaaatggtgaaaccccgtctccactaaaaatacaaaaattaggctgggtgcggtggctcaagcctgtaatcccagcactttgggaggccgaggcaggcggatcgcaaggtcaggagatggagaccatcctggctaacagggtgaaaccccgtctctactaaaaatacaaaaaattagccaggtgtggtggcgggtgcctgtagtcccagctacctgggaggctgaggcaggagaatggcgtgaacccgggaggcggagcttgcagtgagccgagactgtgccactgccctccagcctgggcgacagagcgagactccatctcaaaaaaaaaaaaaaagaatgcttcct

SEQ ID NO: 1244683 - DNA, 4001 bp, Homo sapiens
ctgacctcgtgatccgcccgtcccagcctcccaaagtgctaggattacagtcgtgagccaccatgcccagctttcttttttagacggagagttgctctgtcgcccaggctagactgcagtggttcgatcttggctcactgcaaccacacctcctgggttcaagcgattctcctgccacagcctcccgagtagctgggattacaggtgcccaccactgtgcctggctaatttttgtattttttgtttttttcagtagagatggggtttcaccatcttggccaggctggtctggaactcctgacctcgtgatctacccgcctcagcctcccaaagtgctgggattacaggcgtaagccaccgcgcctgtccactttccaggatgttatgagagtccagacgcttccccaaccctgaaactctaattacggctcagctaaggtaaacttttttttttttgagacggagtctcactctgtcgcccaggctggagtgcagtggcacaatatcggctcactgcaatctccacctcccaggttccagcgattctcctgcctcagtctcccgggtagctgggattacaggcacgcaccaccacccctggcttattttggtatttttagtagagacggggtttcactatattggccaggctgatctcgaactcctgagctcaggtgatccacccacctaggcctcccaacgtgctgggattacaggcgtgaggttatatatatatatattagggagacggcatagagactcaaggtcacacagaattaggtccagactattccaaaatgtatgctttccaaacaccaggcctcgaagtctccaaaatcagcacatttatttaccaaacagtcacggagtgcctacagtatgccaggcactggatacaaggcagtggacaaaacagagggtctcctgccctggtggagtttacttaccaggcagacaacagccacagaggcaggcaggggaaggaggcccaatgtattctaagctgcgctgtgggttggagctctccagctctcatatgggagtgagtcattcacatggtcactgccccccacccgaaatggaaatgggcttttgggcagggtcaaggtaaacggagttagtagagggaaggactacttctctttctgaagtaggggggcttccctcaaaagggaaaaacttccgagtgttaaaaaccattccaaacaagcccctggtccctggctaaggaggtgggcgtggagggagaaactgaggtgtgcggcgcacccctccggcagcgatcactccgtagctggaggcacagcggacgtcggacaagggggagctcagcccgcacgacacccacttaggacgtggggaagctcggcccgcacgacacccacctgcgccgcgggagctcgcgcggggccccgccccctcccctggcggcgcgggcactgaatgggcagctccggatccagccatccccgccatcgccgccacccctcccccggccttgggctcccagcgccgctgccgtcactgggcggggagctgcggggctgcgaagcaaacaagccgggagcgccggccgggtcccccgggcagaggggcgctgccctcccccatccgagaaaggggaaggaggcgcagcccgtccaggacccgccccgcccggcccaggttcggcccgggtgcccgcgccggggggtgggcgcggacctttctgccccctgggccgcgcgggccagggcgcgagccccccggggttcttgactcgactttacctccttcttcacgttccacagcagtttctctttgactgcgtcctctgcgctgcccatggtgtggcaggaggcggcgccgagcggtcctcagagcccccgcgccctcgccgcctccgcgcctctcggctcagcgccccacgcgcaaggcggagcccccgcccgccgcgctcccggcccgccgccgccgccgccgccgcagccactgcccggtgctcggctccgcagccatcttccgagccccgcacagacgtcaggcggcaggcccggccccttcccacagccggaggggggttgcgcacagcgacgggggatcggggcggggagaggccgtgcgcgcctaggggcggcagacccgggcgcgcgccacgggggtcgctgtcatggcaacgcacccgctcccgcatggagggcgcgaagccgcattgtgagcgctggccctggagcccgcggccccgcggctgagagcgagcctcggtcccgctgaagctcccctgacttctgcctgctccctctcccgacgggacggaaagggccggggctcgggcatggggtcccctgcggtccgagcctgcccacggcgaagccggtgcagcctggccccgtgacccctctgaatccccgtccggccgtcgccgtgcagttgtcaagtttctgggaagattagtgggagcgcagccgcccgagcccgacggccggagggtcgcggccagtcccccttgccgggtcgccacgtcccacaaggtccttcccggccgctccgtgggaggcggggcgcaggttggagtaacagggacgggcttgagctggtacggaaccgggcaaggtgagagaagtgtcttccacgcgattcccaagcctcgctagggaatcgagggagaagaaaggttgctcagagtgataaagaacatgccgttgcaaacggaagagcaacgtgcccgaatctaggtgacaggaagggcttaggccttttcggcacgaatggagccttccagtcaacatgcttctacgtgatgcagctttatagcgcaaaaaaatgacaatgcaaggggtacaaacagccctgctagaccaacagcccgagcctcgacagtctacatccggcgccttcaagcccccaaccacacactgcgaagtgggaaaagttcccagcgcggcttggcgaacccgctaacacggcgctctcacgagctgctggaaaagaccttcgcgagagggcgcagggagtcccgctccctggagggcccgcccccttggaggggaccggaagcgcttgtcctggcccggaagcagtgctgactccgtacacgcgcgctgcggcatggcggcccaccgccccggcccgctcaagcagcagaataaagctcataaaggcggacggcatcggggtcggggatctgcacagcgggacggcaagggtaaggagataacgtagaaggaataagggctatttggccgttattaactctttttcctcatgcccagactgagcttctgtctcccgtctgggctccacgcgaaaggccctttctaaggtgggcggagaggagtcccttttcttgaccttgtggggccgatcacaccagccccttctaatctgccattcaggccgtctggcactgaaaaccctaagcaagaaggtgagaaaagaactcagcagagtcgaccagaggcatcgcgccagccagctccgaaagcagaagaaggaggcggtgagaggagcgggatttgggagaatgcggcttctctggtgttctaggtggctaatgcctcgaagtggaaaatgagaccgggaggagggtccagggacagagcatagccctagagcacgtgtcgagcgtgcaggtctagcattctttgctttggtcagaattcctgccaccccgctggcatacctgtggtcttttactagagagatgctggttttgggtagggggagcatctgtgggagtggaaatgcaatgctggagtgaagtactgagacactgagatgttctcggatatctttctattttcaggttctggcagagaagagacagctgggtggcaaggatggccctcctcatcaggtactggtggtgcccctgcacagcagaatttccctgccagaggccatgcagctgcttcaagatagggacactggaacagtacacttgaatgaattgggaaacacccagaactttatgctgctgtgcccccgcttgaaacatcggtggtttttcacctcagcaaggc

SEQ ID NO: 1244684 - DNA, 4001 bp, Homo sapiens
gacctcgtgatccgcccgtcccagcctcccaaagtgctaggattacagtcgtgagccaccatgcccagctttcttttttagacggagagttgctctgtcgcccaggctagactgcagtggttcgatcttggctcactgcaaccacacctcctgggttcaagcgattctcctgccacagcctcccgagtagctgggattacaggtgcccaccactgtgcctggctaatttttgtattttttgtttttttcagtagagatggggtttcaccatcttggccaggctggtctggaactcctgacctcgtgatctacccgcctcagcctcccaaagtgctgggattacaggcgtaagccaccgcgcctgtccactttccaggatgttatgagagtccagacgcttccccaaccctgaaactctaattacggctcagctaaggtaaacttttttttttttgagacggagtctcactctgtcgcccaggctggagtgcagtggcacaatatcggctcactgcaatctccacctcccaggttccagcgattctcctgcctcagtctcccgggtagctgggattacaggcacgcaccaccacccctggcttattttggtatttttagtagagacggggtttcactatattggccaggctgatctcgaactcctgagctcaggtgatccacccacctaggcctcccaacgtgctgggattacaggcgtgaggttatatatatatatattagggagacggcatagagactcaaggtcacacagaattaggtccagactattccaaaatgtatgctttccaaacaccaggcctcgaagtctccaaaatcagcacatttatttaccaaacagtcacggagtgcctacagtatgccaggcactggatacaaggcagtggacaaaacagagggtctcctgccctggtggagtttacttaccaggcagacaacagccacagaggcaggcaggggaaggaggcccaatgtattctaagctgcgctgtgggttggagctctccagctctcatatgggagtgagtcattcacatggtcactgccccccacccgaaatggaaatgggcttttgggcagggtcaaggtaaacggagttagtagagggaaggactacttctctttctgaagtaggggggcttccctcaaaagggaaaaacttccgagtgttaaaaaccattccaaacaagcccctggtccctggctaaggaggtgggcgtggagggagaaactgaggtgtgcggcgcacccctccggcagcgatcactccgtagctggaggcacagcggacgtcggacaagggggagctcagcccgcacgacacccacttaggacgtggggaagctcggcccgcacgacacccacctgcgccgcgggagctcgcgcggggccccgccccctcccctggcggcgcgggcactgaatgggcagctccggatccagccatccccgccatcgccgccacccctcccccggccttgggctcccagcgccgctgccgtcactgggcggggagctgcggggctgcgaagcaaacaagccgggagcgccggccgggtcccccgggcagaggggcgctgccctcccccatccgagaaaggggaaggaggcgcagcccgtccaggacccgccccgcccggcccaggttcggcccgggtgcccgcgccggggggtgggcgcggacctttctgccccctgggccgcgcgggccagggcgcgagccccccggggttcttgactcgactttacctccttcttcacgttccacagcagtttctctttgactgcgtcctctgcgctgcccatggtgtggcaggaggcggcgccgagcggtcctcagagcccccgcgccctcgccgcctccgcgcctctcggctcagcgccccacgcgcaaggcggagcccccgcccgccgcgctcccggcccgccgccgccgccgccgccgcagccactgcccggtgctcggctccgcagccatcttccgagccccgcacagacgtcaggcggcaggcccggccccttcccacagccggaggggggttgcgcacagcgacgggggatcggggcggggagaggccgtgcgcgcctaggggcggcagacccgggcgcgcgccacgggggtcgctgtcatggcaacgcacccgctcccgcatggagggcgcgaagccgcattgtgagcgctggccctggagcccgcggccccgcggctgagagcgagcctcggtcccgctgaagctcccctgacttctgcctgctccctctcccgacgggacggaaagggccggggctcgggcatggggtcccctgcggtccgagcctgcccacggcgaagccggtgcagcctggccccgtgacccctctgaatccccgtccggccgtcgccgtgcagttgtcaagtttctgggaagattagtgggagcgcagccgcccgagcccgacggccggagggtcgcggccagtcccccttgccgggtcgccacgtcccacaaggtccttcccggccgctccgtgggaggcggggcgcaggttggagtaacagggacgggcttgagctggtacggaaccgggcaaggtgagagaagtgtcttccacgcgattcccaagcctcgctagggaatcgagggagaagaaaggttgctcagagtgataaagaacatgccgttgcaaacggaagagcaacgtgcccgaatctaggtgacaggaagggcttaggccttttcggcacgaatggagccttccagtcaacatgcttctacgtgatgcagctttatagcgcaaaaaaatgacaatgcaaggggtacaaacagccctgctagaccaacagcccgagcctcgacagtctacatccggcgccttcaagcccccaaccacacactgcgaagtgggaaaagttcccagcgcggcttggcgaacccgctaacacggcgctctcacgagctgctggaaaagaccttcgcgagagggcgcagggagtcccgctccctggagggcccgcccccttggaggggaccggaagcgcttgtcctggcccggaagcagtgctgactccgtacacgcgcgctgcggcatggcggcccaccgccccggcccgctcaagcagcagaataaagctcataaaggcggacggcatcggggtcggggatctgcacagcgggacggcaagggtaaggagataacgtagaaggaataagggctatttggccgttattaactctttttcctcatgcccagactgagcttctgtctcccgtctgggctccacgcgaaaggccctttctaaggtgggcggagaggagtcccttttcttgaccttgtggggccgatcacaccagccccttctaatctgccattcaggccgtctggcactgaaaaccctaagcaagaaggtgagaaaagaactcagcagagtcgaccagaggcatcgcgccagccagctccgaaagcagaagaaggaggcggtgagaggagcgggatttgggagaatgcggcttctctggtgttctaggtggctaatgcctcgaagtggaaaatgagaccgggaggagggtccagggacagagcatagccctagagcacgtgtcgagcgtgcaggtctagcattctttgctttggtcagaattcctgccaccccgctggcatacctgtggtcttttactagagagatgctggttttgggtagggggagcatctgtgggagtggaaatgcaatgctggagtgaagtactgagacactgagatgttctcggatatctttctattttcaggttctggcagagaagagacagctgggtggcaaggatggccctcctcatcaggtactggtggtgcccctgcacagcagaatttccctgccagaggccatgcagctgcttcaagatagggacactggaacagtacacttgaatgaattgggaaacacccagaactttatgctgctgtgcccccgcttgaaacatcggtggtttttcacctcagcaaggcca

SEQ ID NO: 1244685 - DNA, 4001 bp, Homo sapiens
ttgacatgttggactcccctcttccctcattgctccaggctccactgaatacaggcaatgccccactgtccccctttacttgatcttggaggtggagactgagccaagatgggttctctggtgtcccaagagcaaggaggtggcctgagcctgctgcctgcttgagtcccaggtccaaagagaaggcccagggctctgcatgaggctggggaatgtctgtggggagaaatgattatcctgaggcctcaaagctggggtctcaaggaggaaaggggccagtggtagagggggacagaggcaggctgagctggccagggtgggaaaaatagactccgaggaaatctacctcggagattgaattctgcctgagtccctggagggagaaatatcccgggatttgattctacatcacagcttctgaggctagtgggggcagatgctgagatctcggcctgtttgtccagccaggaatcccggcgcaggcagccatccagggcaggaaccagctggagtgtgacagagataagatacggggatgtagaaatcagggcatcggagccgcagtcccgacctccctgccctcagttgactcccctctgagcatttggcctcccccttgcagctctcaacccttcccttctccctaaaagtgtggacttagattcccacggccagccacccagcagtgctttaccaagtcttggctagggttccacccctggggtgtagttaccggcaaccgaaggttggaagcggggaagagcagccccccaagcgcaatcctcatgatgggatggcgtttgctggtcaggggcccagagacctgtctcaggcgcagcacctcctccccatccacctccagcagcacagagtccccctccatcttgacttccacctgcaggaaggtgggaagcaaaatcagaggcccctgggatctgtttctgccaccttcctgtgaggcagcctagtactatagtggaaagaacatgccttaaagaagcagctagcatccttggccttgggtcactcagctcttgtcacttatatactgactgagccttagaattcccatcagaaaagatggggccaagaatagctactttgtgggggttcgtgtggattaaacgagatgacagtggtagagggatgcccaataacttggttttgttccctttcctcagaccagctccagacatccctcccctgaggaccagagctagcttacctggtgccatctcccatcatccagccgtggtccagcacccaccgtaagctgggcccagtgattgtgcagttggatctcaggcctgccgtctcgaagtcccagcataaaccagtcatccttagggttggtatccccataaaaaatcactccctctgggtcccaggttcgaacctcaaaggaggaggaggttctggaaggacacagaaggaaagattgtgtatgtcatgtgtcctttgagaaccagtgtgggtttgggggagatggtgttcacagataaggaaaggaagacagggaaaagagaagagctgatggagagagggcagaaccaggggactgggtcaagggctaggccaaccccatactttgtgatcttggtgaggtcaaaggtcatgacagcgataggctcttgtcctgggccattgctgaggtggacagccggagggtcgtgggcactctatcagaaagagaaaacaaacaaagctgagtagggacatgtcagagacagacagagggagaggccctgctacagggccagaggagagaagggaagactgcatgagctgagtgccctgtcccgctcctgcacctgggtggggagaacaggtctcagggcccatccctggcgggtgtgacgcagtagtagcaacagcagcaacagcagcaggcgcgaggtagccagtgggcctctgctctccataatcagccactgtccactcggcggctcagacaactcttgggagaatgtgtagaggcaggcagccttgcgtgtgggcggtggagggttaaaggttgcccggggaggagggggtaaaggaaacaggggcactgacccttgacccctgcccaggggcccagtcacaagactcagctatcacccctctggggatcaatggggtgaaggacagagtcccctccactatcatcctccactgccgagaaagtttctgaactgggagaggatattccatctcccctctcctcctctagggcctgatctaggtcctccaagatttctgtccactcggggagcctgcattcacaggcctgaggtctagaaacagtcctcccctgcgtcccaagtagcatcctgtatcaggactagaaatgagataatggaatcctaaatttctagctgagtgaccttgggcaagtcacttcacctctgtgcttcagtgtccttgtctgtaaaatgaggaaaataatactttacggggtgactgtgaaagagggttcattgagaaaatgcaggcacagtgcctggcatctggtctgaactcctcccccagtcttttcccaggcctctgaggcctgtctcccaagaaggtattgtctgtgtgtatgattcagtgaatattaagaagggacctgccccccgcctctcagttatcttcccttatccatttattacagggcctaaacagtctagcagtagaaatcacccactccctgacccattttattttattttattttattttattttattttattttagacagagtcttgctctatcacccaggctggagtgcagtggcgtgatctcggctcactgctgcctctgcctctcgagttcaagcgatcctcctgtctcagcctccttagtagttgggactacaggtgcacgcaccaccacgcccagcaaatttttttgtgtttttagtagagacggggatttcaccacgttgcccaggctgatctcgaacctctgacctgaaatgatccgcccacctcagcctcccaaagtacctggattacaggcattagccacaaggcccgaccctccctgacgcattttattttatttatttattttgagatggagtttcgcttttgttgcccaggctggagtgcaatggcacgatctcggctcactgtaacctccacctcccaggttcaagcgattctcctgtctcagcctcccgagtagctgggagtaaaggcatgcgccaccacacctgtctaatttttgtatttttagtagagacggggtttcaccatgttggtcaggctggtctcaaattcctgatctcaggtgatccgcctgcctctgcctcccaaaatgctgggattacaggtgtgagccactgtgcccaccccatgacccattttaaaatgcaaatgacagaccgggcttggtgggtcacatctgtaatcccagcactttagaaggctgaggcgggcagatcacttgaggtcaggagttccagaccagcctggccaacatagtgaaaccccgtctctactaaaaatacaaaaattagccaggtatggttgcccatgcctgtaatcccagctactccgagggtgaggcaggagaatcgcttgaacccaggagggagaggttgcagtgagccgagatcgcgccactgcactccagcctgagtgacagagtgagaatccgttaaaacaaaaaaaaagagaagaaaaaagaaaaaaaaattagccgggcgtgccggtgcgcgactgtagttccagctactccggaggctgagacaggaggatcgcttgaactcgggaggtggaggctgcagtgagcagagatcgcgccactacaccccagcctgggcgacaaagcaatacaccatctccaaaaataaataaataaataaatataaaaataaaacatttaaaaaatgcaaatgcccccaagaggtaacacttcatgctactcaagagctgcaggaaacagctttcagagctgagggtcttaaggcttacccagggtctgggcgggtgagtgagcctgaggctaaagcaggttatcactgcatatgtc

SEQ ID NO: 1244686 - DNA, 4001 bp, Homo sapiens
gacagagtcccctccactatcatcctccactgccgagaaagtttctgaactgggagaggatattccatctcccctctcctcctctagggcctgatctaggtcctccaagatttctgtccactcggggagcctgcattcacaggcctgaggtctagaaacagtcctcccctgcgtcccaagtagcatcctgtatcaggactagaaatgagataatggaatcctaaatttctagctgagtgaccttgggcaagtcacttcacctctgtgcttcagtgtccttgtctgtaaaatgaggaaaataatactttacggggtgactgtgaaagagggttcattgagaaaatgcaggcacagtgcctggcatctggtctgaactcctcccccagtcttttcccaggcctctgaggcctgtctcccaagaaggtattgtctgtgtgtatgattcagtgaatattaagaagggacctgccccccgcctctcagttatcttcccttatccatttattacagggcctaaacagtctagcagtagaaatcacccactccctgacccattttattttattttattttattttattttattttattttagacagagtcttgctctatcacccaggctggagtgcagtggcgtgatctcggctcactgctgcctctgcctctcgagttcaagcgatcctcctgtctcagcctccttagtagttgggactacaggtgcacgcaccaccacgcccagcaaatttttttgtgtttttagtagagacggggatttcaccacgttgcccaggctgatctcgaacctctgacctgaaatgatccgcccacctcagcctcccaaagtacctggattacaggcattagccacaaggcccgaccctccctgacgcattttattttatttatttattttgagatggagtttcgcttttgttgcccaggctggagtgcaatggcacgatctcggctcactgtaacctccacctcccaggttcaagcgattctcctgtctcagcctcccgagtagctgggagtaaaggcatgcgccaccacacctgtctaatttttgtatttttagtagagacggggtttcaccatgttggtcaggctggtctcaaattcctgatctcaggtgatccgcctgcctctgcctcccaaaatgctgggattacaggtgtgagccactgtgcccaccccatgacccattttaaaatgcaaatgacagaccgggcttggtgggtcacatctgtaatcccagcactttagaaggctgaggcgggcagatcacttgaggtcaggagttccagaccagcctggccaacatagtgaaaccccgtctctactaaaaatacaaaaattagccaggtatggttgcccatgcctgtaatcccagctactccgagggtgaggcaggagaatcgcttgaacccaggagggagaggttgcagtgagccgagatcgcgccactgcactccagcctgagtgacagagtgagaatccgttaaaacaaaaaaaaagagaagaaaaaagaaaaaaaaattagccgggcgtgccggtgcgcgactgtagttccagctactccggaggctgagacaggaggatcgcttgaactcgggaggtggaggctgcagtgagcagagatcgcgccactacaccccagcctgggcgacaaagcaatacaccatctccaaaaataaataaataaataaatataaaaataaaacatttaaaaaatgcaaatgcccccaagaggtaacacttcatgctactcaagagctgcaggaaacagctttcagagctgagggtcttaaggcttacccagggtctgggcgggtgagtgagcctgaggctaaagcaggttatcactgcatatgtcaatttaaaaagcactgcgggggagcctttgaaccgcggggtatctcgacccaggttgggacacccacacaaccgcaaggaagccgcttcactccaaccttgaactctacccaggagcccagtcacaagatccagctgtcgggggtggggcttgggggggacgcggccgtgcctgttctccaagctgattggctgacagttgtgccccctgctgcgacagaattcgagggggtggggctatgcccggacagaggatcgcctcgctggcctactctctcctcccgtacggcgccggaatcccagctccacttaccaggccgcggctaccccgccgtcccccccgactcccgccaccccgctctctcaggctcttcaggatccaagtccgtaggccctttaaggggtctagttgccgtttgcgaggccctgggactttggtcccagacagcggggatccggatggcttccgtgcggatccgagaggccaaggagggagactgtggagatatcctgaggctgattcgggtgaagactgcaggccggtaacccgggggtcagagtggcgcggccagagcggggtcgtaggaggcgggggcagggggaggggctcgccttgggaacctgctcggggagcagcggggcccttctgctctaatctagcttccgtacccacgccttaggagctagccgaattcgaaaaactctcggatcaggtgaagatcagtgaagaaggtgggggctcagcgcccaggttctggcggaggctggggaggaaatgagggatgggttccccaggcgacagctccaggctgggcatacacccacgtcctctttctctatctctttgtcacaactccaatctcggcagccctgagagcagatggctttggagacaatcctttctatcactgtttggtagcagagattcttccagcgcccgggaagctactgggtaagagcacctggcccttagaagtccacctctccagccggcctcagaggtctccccacaggcttccagaagccttactccccttttctctctctcagggccctgcgtggtgggctatgggatatactatttcatctacagtacatggaagggacgcaccatttatctggaggatatctatgtgatgccggaatatcggggtactgggcagaagctgaggctggggtgggagcaaagcaccccacagaccccactgttatcccctgtccccagagcccagccggtgtcattttctgatccccttcagctcaaacaatagctattttttgcctctttctctccacaacaggtcaagggattggttccaaaataatcaaaaaggtggctgaggtgaggagatgggtggggcgacaagtgaggacctgaagaagcaagggtatatggaggggggacccgggttgaaagagggagtgagaaaacctttttcttttttgaccccagaaaagttagtgttgtcttctcccacaggtggccttggataagggctgctcccaattccgcctggccgtcctggactggaaccagagggccatggacttgtacaaggccctaggagcccaagatctgacggaagctgagggctggcacttcttctgctttcaaggagaggcaacgagaaagttggcaggaaagtgacgccatccctaggaggatctctgtcttgagtttctccttccccatcagctgaagcactcttcagagactacgtccacagacactgatgctgaggcctccctggaggaaggagggttaggggtgcctatcctcaagtattggaagagcagaattgagggagagacctttcttccttgttgagggtgaaaaataaataagaattacatgtcctgatgtggtgttgggtctttcttttatttctttttttttttttttttgagacagagtctctgtcgcgcacgctggagtgcagtggtgcgaactccgctcactgcaacctctgcctcacgggttcaagcaattatcctgcctcagcctcccgagtagctgggactacgggtgcgcaccaccatgcccggctaatttttagtagagacggtgtttcaccatactggccaggctggtctccaactcctgatctcgtgatccgtccgcctcg

SEQ ID NO: 1244687 - DNA, 4001 bp, Homo sapiens
ctcccaaagtgctgggattacaggcctgagccaccgcgcccgtcctaatttttgtatttttagtagaaacagggtttcgccctgttgaggctggtgtcaaacttttgggctcaagtgatccaccgcctgagcctcctaaagtgctgggattacaggagtgagccacagcgcccgtctgaaactattcttaaagctttctttctattctttctttcttttttttttttttttgagactgagtcttgctctgtcgcccaggctggagtgcaatggtgcgatcttggctcactgcaacttctgcctcccaggttcaaggtagtctcctgcctcagcctcccgagtatctgggattacaggcgcgtgtcaccacgcccggctaatttttgtattttattagatgcggggtgggggggggggtgggtttcaccattttggccacgctggtctcgaacccctgacctcaggtgatccgaggacctcaggtgatccacctgcctcggcctcccagagcgctgggattacaggcgtgagccaccgcgcccggccaaaactttcattgtatcacaatctcttcaaggtaagagccatgactgttaaatctactacagtagagagttacagattcttaaaatatcggcgatgcatacgcgaagagggtaaagctcagcgcgtgcgcaccaagcacctttttccttgcggcgactcctcttcttttttttttctttttggagcgtgcgcaccaagaaagacaaaggtggggaaagtgaccaagcagtcgttcaggcgcatgcccatccctaacttgtccaagcccggtggggccagcggcggcggagtgggtgtggcctgagcgctgtgtgactgtgcggacgccgcccaatcggactgagcgagcccggcccctccctccccctgattggttggttctcagtgttgtggggcggggaaaggaagagacggggtggctgggcggtggagcggtgaagaaagaaggctaatcttgttctgcgcaagcgctagcaagcgaccaggagggggagtgagagagtgaaagggaatgtggaagccccgatgcgctagctggcgctagctggggctctaaccttgacgcctgcgcggtggccctcggggccccgcgcgcagcgggcgggtgcccggtgcgcctgcgcagtaggcggcggtggcagggggaggtggaggctgtggagcggcagcggcagcagcgggtcccgggactgaggcagcagcgggggcggcggcgggcggaagctgaggtgacgaaggcagcggcggcggcggccgtttccctcacggtggcggagaccaaggcggcggcggcggacggggagcggcccggccccggccccctgctcgttggctgtggcagggccgccgtggggccggcccggctcccgccccccgcggctccccctccggctcctcctccggggagacgccgggggcctggcccggcccgcactcagactgctgctgcagccgccgccgggggagtcggaggcggtggcggcgccatgggcggcctggcctctgggggggatgtggagccgggactgcccgtcgaggtgcgcggctccaacggggccttctacaaggtgagacggcgcgccgactggggacgccggtccttagccccctcccctggccggagcaggaacgcgtggggcgggatcgagcttctggagctgagtcctggcccttagaatcttggacccttgctccaacccgcagccttccctgggagaccgcttagagtgaaccctgttcctcttatttttgacccctctaaggcacctgcacctgcttctacccccatctccgggagaatgaacttcaggccattattgtccctggcttggcgctccccgctccgcaggagagacccctttacccagcttctaattgactgtgtccgttgtctggtggaagacataccttagaccttaatcacatcttccccacgatccaagcacatggagaattgtctttcttccacacggtccctttgggaaggccctctgtcccgtaaaagatcctttcatcttcctcagagaggcctctgcctactggctctggaacactcaccccactttcatcttatattccggttcccaagccaaggagaaatggtcagatccatttacgacgtttggcatctttgacctcaggaaccctgggttggatcagtcaagttgcttcccagccagccataaggtggcatctttcgcaagtctctctccccaccacaccttgatctcaagacccactgctctaccattctactcaggaatggatttgaggtctcacttagacctcagataccttcaggtcattcatatagtttcttcgtcttgaggcatgtaagcttcatagtcataatctctaaaaggatctctgaaaggaagcttatgaggttcccttctgtttatcttaagatttccacttcttgaagactcttggccaactatcccagttcgggaatctgacaaccttttttggaagacgggatcatctttcaaagacccttccttatttcacctccccctttgcccaggatttggttccttagaactccttataataccaccttccttatctgctctgaatctattttctaggacatttttttcccatttagattaagccagagagagccctttcttgcctcccaagagtttttctttgtgtgactgttggtattctgaacctcttggatttgatgcctggaattgtcctagagactctcctgatttctgtctcattctttgatttcaccctggggagctggggaagagataccttcccatggcatcacttgttaagagtggatcccccttccccctttccttcagttcccctcaggcctttttcccccactgtagtcctctctagtttctcatgcccttggaaatgtctttctttgactccttctctaagtcatatttttctataactgcagagggtcttgtaatttctcttgggtggtttctgcctgtacttcagttgctaagtgcattgtagtcattttttttttttttttttttttttttgagatggagtctcgccctgttgcccaggcttggagtgcagtggtgcgatcttggctcactgcaagctccgcctccctggttcgcgccattctcctgcctcagcctcccgagtagctgggactacaggtgcccaccaccatgcccggctatttttttgtatttttagtagagacggggtttcactgtgttagccaggatggtctcgatctcctgacctagtgatccacctgcttcggcctcccaaagtgctgggattacaggcgtgagccaccgcgcccggccattgtagtcattttttactcactcttcatacttacccatttttgccttacttccctcatcagatttatttctctgcggtgactgtgggtacccatgtctaacttaccttctcaattcaagtttttagctttttctcctaatatttctgtattcctgtgtaatccccaggaatcaccttattccctgtctagctgaaggaagctccctgctgatctctttttgtcattttgtgcatacttgcctaactcttgggactttttcttctagcctgcctccatagcatttctgttttctttggcaaaagtctctaattcctttctgcttttgatagagcacatttgtctctcatatccttttccccaaacttgcattacctttgttgaaatagcttcctaaagtggccctccctgtttaccttggtatcttttccttcatctgggtccttaccacccccaaattctgagttccaagaaaagtgattcttaagttgagtccaagatcaagatatgatgtttgctttgttctaggaagcgtaggagccctgcacagctgagaaagattggtatccagttcaaatgaactgtatgagatggctgggaagggacacgttttctgtcccacatataagtgtccagcagaaagtctctctga

SEQ ID NO: 1244688 - DNA, 4001 bp, Homo sapiens
ggaatcactccaattccagcacgcgagtttgaggtacccaccctttgtggatttgactcaataaaaccttccagggagtatcatttctctcaacacccacagtatcaagcagaaaaaaaaaatcagctcttttaacatgcctagaaatttctatctgcctttctctctcttcagcaaggcaggggtgattaatgtgcacagcagcgaggaaggcggttttcaggtggtaagaataacaagcaggacgcagagaagagctcaaggtgaatgggtcagtgtgggggcctgcaggactgactgacaagcagtggtctggggggtgctcatggtgactagggcagtgcccacaccatgcaacagaaatggaggcatctcccggggcagggtttgttccctgagaggactcttgcaccatgtccagccatccatcaacatgaggggacaggaagccgagctaactctgcatcctctgggtgtgtcattcctagagttctaaggggaggctgggtttctgtcatccccttggctttgacttccccaagggctcactggggggcaagatggtgcgtcggggcagcattcagcgtgcaaccagggactgccatagtttgagctcttggcgtaagttttggtaggaggcagctcccactgtctttcgaacgtaagcagtgaaagatgccccaccaggtttaacacaggcgagtactgttaactcagagttctgcctacagggtttcaaagaacgagtcctctagtctcagcaggaaagataaacatcccactccgcaggatgcaatgaggagacaccatctgtgcttggtcaacatggaatggagaaatctttatccctacttccggcaggaggcatcctttctataaaaccccaattcctaatgtacgagaacatctcagttgaccctaagccacttggtaccgctttcagtaaggttccaacattggtcagtttcctatattgaagatgacactctgatttgactcaaaaaactaaatgccattaagaacctacaccaaagtgccctcatgccaggaaagcagaaccctggatcctcatccacgattacagaatttgtaacattcttacacttggaacttcatgcactcaaccaattcttactctgccttgtaaatccccctaccaccaaagcatgcattcccggttctgaagaaatggaggagggggcacaagaagaccctgatttattgcatgcaaaaggagcgatggtggaaatgactagagggcctggggaggtgtgatgatgccgagagtgaagaggacaggggaagcaagctgagagggtgaggccgcggggagaccggggcgcgcggcacgcggcgctctcacctgtggatgttcatctcccgtggagggcggtgggccttgtcgtaggagaccttggcgaagacgccggccacgatgacgaaggcgatcaccccgcaggtgatgtagacggtgaagttggtcttgtccttctccgggtcgtacttgttctcgggccccggcgacaccaccttggtgctgggcgtctgtacccacaccgggctctggtagttggtgcactggcgctggtccagcttctcgtggcgcttcttgcagcagaagcggtagtagcaggtaccgcagcagtacaggtagccgctctcgctgttgttacactcgaactccttgtcgtactggccgctcacgtcgtagtagccccagcacgtctcgtaggtgacggccgcgctggccgccgccgccacagccgccgcgggctgcccccgccggcttcccgcctccgggattccgggcgcccgggcggtgccgttcagctcgcggccgccccgtgccagggcgcccccggccctccggcccccgacggcagcgccgcctgcactcagggtccggttggcggcgcggccgcgggctccgtggacgctgggcagcaggtccagggactccagcgagagcagcagcagcagcaggaggcgccgcagcgccatggcggggccgggcgggagggcgcggggaggcttccgcggcaggccgctcccccggcgggccgggctcggaggacccgccgcgcgggccgggctggaggcgctgagcggtcagcggctccggggcgatggcgccatcgaggcgcgggcggcagtggcggcggcggcgcgcggtgcgcacggaccggcccggcgcgggctgctcgggctctcaggctgcgcgccggctccgcgctccccctgcgggctcggcgcgcctcctgggcagccccatcccccgccggcggtgactgcggccccgcgcgcggctcggctcaggcaggacccgaagcgcggctccgggcggcggcggcggcggcggcggcgtggtcccgtccgggcgggtcctgcgggacaagacggggagccggtcacggggtggggcgactggcgctccgggagcaggaggagaaccgcgggcaggcgggcggggagggtgcgcgcagccctcgaggagagagactcggagccgggaggggcgtagagcccgctcccaagacggggtcccgcggccctgcgcgcctggaaccgagagcgcacgggccgcccctccaggcgcagctcggccgcccgggtcccccagccgcccggccccgcagcgcgctcccgccgcaggctggctccctgggacggagccggttgaggctggggtccggcggcgagccgggagagcgcgcggcggctggacctcactcactcaccatgcccggctgcgactgcagaggcggcggcggcggcggcggcggcggcggcggggcgaggcgggaacgcagctgccggagcgagcgagcggagagccgccggctcgccgcctgcactagtgccggaacgtgtgcgagagtgagcgagggagacacacgcactcacacacccgcacacacgggagcgccgcgaggggaggggggacaggggaggggagggcagccgctctccgccacccacgtttgcacgcccgggcgctcagggtgcggggcgggggggactccttttcgcttcttccggatcgcagcagttgaagctccgcgtcacgaaagctccggacagcagttattcgacacggcgaacccggcgggcgaagagggggccgggagcagggcggaacgtccgctctgcagccggcccgcggcagggactgacctcccctgccattgccttctctagccttcgcgaccagtccccaccctaccggagcccggggcagcgcgctgcctgagcgggagttggggtttctgcaagcctttgcctctccctagtggtgatactcgcagccaggagaagaggtcaaacccattgctacaggttcccaaactgagtccaggggtcaagtggcttgtctgaggctgttgggcgacccgtgagctgagcctacactctcttccccttggtcactctttccccaaccccgtacccactacgcataaaggcgctagacagccccaggactggatggcaactctttgctatacttttttttttccccgcggagcctcgaggccattagaaagctatctgaacctctgagactcagctttgtaacccctgtgttgaaatctctgtgctgcagctcctatgggaggtgaggaggatgggggtgcagggcgggggtgctttccggggtagttgcgtgtctgggtctgtggaaaggaggcctgagtctaactttcacagctacgaggccatcccaaaagagaatcatagtaccatccttggcgtgtgtccttggaggaggtagggggaactgagaacaaaaagcgatggccaaggccaagattctgcctgcgtgaccagcgtgctttggttgaaggcagggaactgaaggcagggaacaggctgtcagagcgagggcggtagagaattttccctgagactttctgttcagtcccactcatgtgtgacctaaacaagggatccctatccaggaacagaagagttcctcttttgggaaccgtggaatggatatatta

SEQ ID NO: 1244689 - DNA, 4001 bp, Homo sapiens
gatcacgaggtcaggagatcgagaccatcctggctaacatggtgaaaccccgtctctacaaaaataaaaaaaaattagctgggcgtggtggcggcgcctgtagtcccagctactcaggaggctgaggcaggagaatggcgtgaacccgggaggcggagcttgcagtgagccgagatcgcgccactgctctccggcctgggcaacagagtgagactccgtctcaaaaaaaaaaaaaaagaaaattgggaatcttagggacatcttcattaacattcagtaatacctggtaagtcccccagccaacacagctcactgcaacatcagtcattacaacattggatatttctgtagaggcactgttgctcatgtgtggcatgatcctcaacgtcagggaaaaagacctagtaagtgaagtcacctgcaaggtcaccagcctccccatgcctccaaatcttacctgggcctctgtcacataagaggatccagccaaggatctgctcagggaactaacttgttgcacatcttctatctcacacacattttgtgttctcttctttacagaagaggaaattgaggcccagggagctaacttgtctaaagccatataagagccagaatctgaacaatggtttctcttcagttccaaggccttgtcccaggacattgcactaaataaaaacacaattacccacttccgttccaagttcccccaagtaataaatttacgttatttcttttcttttttttcttttctttctctctctttctttcttttgagatagagtctcactctgtcactcaggctggagtgcagtggcgtgatctccgctcactgcaacctccacctcccgggttcaagcgattctcctgcctcagccttccgagtagctgggattataggtgtgtgccaccatgggcagccaggtttttttgtatttttagtacagacggggtttcaccatgttggccaggctggtctccaactactaacctcaagtgatccgcccacctcggcctcccaaaatgctgggattacaggcatgagccaccgcgcccggcctacaatgttatttctgcaagaacctaaactggtgtttccagtctattctctgggtaactgcccgattgaaggcccgcatctgtgctgacctcagctggaccaagggtcacttaactcccggaatctcgaagccaaggcaccgggccaagaacttcacagtgcaacatttgtctcctagaacagggggtggcagattgcgggcaacaggaagagctcattccccacagggatctggtggcacgggccaaaagtggagcgaccctgcgcgcagcctttaggggcgcaggctttgagaacccgggttctattccgggctctgccatttaagttgcctcctttctcagggccccaccaccttcctcacctgtaaaatgggggaaacagtagcacttgacttgcagctttgttgtgaaggagctaggattgtttaaatcgaaaatgctcaacgagaaaagtgttcagtggagagctactactcacatccccgataagccttcgcattcttgccaaaggccacgggccgccaccccatcataccgaatgtgcctggaactggggcgctgcggctggccgccgcccgatccccagcccaggcgcgacccaagcgctcccctcccgtcattgcggctgcagagggtggggtacggcgggggacagcgaggacgccgaagcaccccccgggctctgggacgccgcggccctcggacccgaagccgcccacctaccggaacacggcccgcgcacgtacctagcgacgcctccgtcctacgccgccgccggtgccaccagtcccagacccgctgacccaacgccccgcgcaccgccgcgggccagccacgtgaccagccgctccaaccccaaaccccgaacttggcgctggaccgctcgagctcaggaaggtgcactctgcgcgccaggcttgggcttggccccgcccccggaggcgcccaatcagagagcgcagccaagcatgggccgccaccaaacgcacccgcgctattggctgcggcgcagcggcgggcagggcctgtttctccggggcgggccggaggccgcgtagtgcagctgcgcacctggggcagggacctgcagaactgacccgctttggctgcagggctggtgtgtggaccaagatttccaggaagactacacagggccttcctcacttaagcctgtcgcttgggccgtgggattatgagtgaattttgttcatggtactacttttagtttgcagggtggtcatttaaagtaggacaaatgtgcgtccaaactgcaacattattactctgtaggtgtataatccaagagcagacactttattattattatttttgttattttttatttttatttttttgagacagggtctcactctgtcccccaggttgaagtagagatgggggtctaactatgttgcctcccaggaggcggaggttgcagtgagtcgagatcgcgccactgcactccagcctgggggacggagcgagacaacgtctcaagaagaataaaataagataaataaaatactgacacacaataaggactcaatgaacattacctattgttaagaatgataaaaaccggggccacatgtcaggaccacctgaggctgcgtcataaatttttttatttgtcaaatgataacaataattattataagaatgataaaaaccgggcgcagtggctcacccctgtaattccagcactttgggaggccgaggcagatggcttgagcctaggagttcaagaccagcctgggcaaaatggtgaaaccttgtctctacaaataattttaaaattagctgggtgtggtggcagtcgcctgtagtcccagctacttggggggctgaatgggaggatcacttgagcctgggaggcagaggttgcagtaagcaatgatcttgcctctgtactccagcctgggcaacagagtgagaccctcatcatctcgaaaaacaaacaaacaaaaaatacaaaaaaaacttttttttttttttgagacagagtcttgctctgtcgcccaggctggagtgcagtggcgcgatctcggctcactgcaagctccacctcccgggttcacgtcattctcctgcttcagcctcctgagtagctgggactacaggcctccgccaccacgcctggctaatttttttttatttttgagacggagtctccctctcttgcccaggctggagtgctgtggcgcgatctaggcccactgcgagctctgcctcctgggttcatgccattctcctgcctcagcctcccgagtagctgggactacaggagcccaccaccacgcctggctaattttttgtattttcagtagagacagggtttcaccatgttagccaggatggtcttgatctcctgaccttgtgatccacctgcctcagcctgccaaagtgctaggattacaggcgtgagccaccacacccggctaatttttgtatgtttagtagagatagggtttcaccatattggctaggctggtcttgaactcctgatctcaagtgatccatcctcctcggcctcccaaagtgctgggataacaggcaagagccactgcgcctggccaacatagtgagtgtttttgttttttgtttttgttttatttatttatttatttgagatggagtctcgctctgtcacccaggctggagtgcagtgatgcgatcttggctccctgcaacctctgcctctctggttcaagcaattctcctgcatcggcttcccgagtagctgggactacaggcgtgcaccaccatgcccagctaattgttctttttgtttgtttgtttgagacggagtctcgctctgtcgcccaggcatgagtgcagtggctcgatcttcgctcactgcaatctccacctcccaggttcacgccgttctcctgcctcagcctcccgagtagctgggactacaggcgcccgccaccatg

SEQ ID NO: 1244690 - DNA, 4001 bp, Homo sapiens
actttgggaaaccgaggcaggcagatcagttgaggtcaggagtttgagaccagccttgccaacatggtgaaaccccatctctaccaaaaatacaaaaaaattctccaagcatggtggcgcacacctgtaatcccagctactcgggaaactgaggcacgaaaatcacttgaacccgggaggcagaggtttcagtgagcagagattgcaccactgcactccagcctgggtgacagagcgagaccctgtctcaaaaaaaaaaaaaaaaaaaaaagaagtgctctatttcaggagaaactggcactttctgagcctactctcccctaatgccagctctcctgctcaccccaccagggtcagagccaactttgcctccaattcatagtcctttaagtaagaatccttttaatatgccctaatgtcccaaccaaactaatcttgaaagcttctatgtagatacaaagtgctcctgaaatccctatcctcagaaatgcttctgagccaaatgggctctgaaccctaaacaaccgtgtccatgtatgtggcaagagcttgtgaaaaacaaagctgggccaggcgcagtgactcacaactgtaatcctagcactttgggaggctgaagtgggcagatcacttgaggtcaggagttcaagaccagtctggcgaacatggcgaaaccctgtctctactaaaaatacaaaaagtagccgggcgcggtggctcacacctgtagtcccagctactcgggaggctgaagcaggagaatcacttgaatccagttggcggaggttgcagtgagcccagatcacgccactgtactccagcctgggcaacagagcgagacttggtaagaaagagaaagaaaggaaagaatgaaggaaggaaggaaggaaggaaggaaggaaggaaggaaggaaggaaggaagggaaggaagggaaggagtctcgctctgtcacccaggctggagtgcaacggagcgatctcgactcactgcaagctccgcctcccgggttcgcgccattctcctgcctcagcctcccgagtagctgggactacaggcgcccgccaccacgccccgctaattttttgtatttttagtacagacggggtttcaccgtgttagccaggatggtctcgatctcctgacctcgtgatccgcccgcctcggcctcccaaagcgctgggattacaggcgtgagccaccgcgcccggctgaccaaaggtttcttggtccgcattctgcttctgtggaatgagccaggagccagttaggcctgatttgacatctgatttccggaggaaaacccagactctgccctgggcaacaaactgaatcctgaacttgaggtcacagggcaggtgtgaggagcggagagcagcaagagtgaaagggaggcctgtggtcattccatacacacaagagatcagttcctccaaggtcaggggacagagagcacagggatccagcgccaagcgcaaggcccccagaagaagccagagagtcggggagggggcgggggggaatcggtcccagcaggtgggaaggattctgggaccagacctaagggatcatgagcacagctgctgcaggcagacgggcccctggagaagctggggacaagctggaatagagacttcattgcgggaagggctgtcagggaggcctcctggggtggaaaagggtggtcaggaggctcctggaggcggcgcggccccgggggtccaactcacctggggcccggccaccgcgctctcgaccgccgcctctgcccgcgcagcacgggcacagctcgccagcactgcgaacccggatgggtcgtcgggcgcggccctcagcagagctgccttcacagatgtggtgcccaggtcaatgccgagggtgatcggccgcgcagccattatctccctgacccgcgcagctccagtctgcagccagcggccccacaagtccgcgctcttcgcccaggggggcggggcaggggcggggagtcgcctgccaatctttcagccacacccaacatggaggcttctcgtcttcccactggccggggaaggcgagcttccacgcaacctctcggcgggccccggctataggcggagaggcggcggaaggcgggacctaaagggggccccgccccacgggctctgatttccgcccaatggagggcggtctgagcttcgctcacgaaaggagccgggaggcgctggcggctccaagagtctctgtgtccctggcagcggacctcatcttccctcacgccggagccccgatctctgcgccccggcccgacccagctgcgctctgtccgtctaagacgcgcggaaactacaactcccagagctcatctcgccgagatccggccccacgagtcaggtggcggaggtcaggtgacagcggacccgcctctcccaaagtctagccgggcaggggaacgcggtgcattcctgaccggcacctggcgaggctcatgcgtcccgtgagggcggttcctcgagcctgggggcgctcaggtgagagcggacgcggcctcccctgtttcccaggcggaccccttgaggcacagcaggtcagcggggcagcctgccgggggtccagcgccctcagccgcggcgggctcctttccccgccaccagtgctggcctcgcgacacgggacaacccccgggtggaagggcccgagcggtggtcagccgaggcaggggcagcgggctgccggggtgggtgccgttcccagccccttaccttctgctcagttgccgcctgggtctcggttggggaatttgcagattgctttggagacgctgagagaacctttgcgagagcgccggttgacgtgcggagtgcggggctccgggggactgagcagcacgagaccccatcctcccctccgggttttcacactgggcgaagggaggactcctgagctctgcctcttccagtaacattgaggattactgtgttttgtgagagctcgctaggcgccctaagcaacagaggtaaccactttatatccttgtttctcaacctcgttattcctacctacccccttcccataaaatttaataccactagtacgctgtgtatttgtttctgtggccacaaaccattgtaatagctagatttcttcactaccaccccaagccaattttttttttttttttgagatggagtctgcagcctctgtcacccaggctggagtgcagtggcgcgatctcggctcactgcaacctccgcctccggggttcaagcgattctcctacctcagccttccgagtagctgggactacaggcctgagccaccatgcccagctaatttttgtatttttagtagagatggggattcaccatgttggccaggctggtctcgaactcctgacctcaggtgatgcgctcacctcggcctcccaaagtgctgggatgacaggcgtgagccaccgcgcccagcctacccccagccaattttagtcccacttgacaatgcgtgctttacatctcctcatttaagtcctgtgaggtagttaccacctccttgtttggcaccacaaggtcgcataagtaataaataggtcaagcctgtctccagtgcacacagcccttgccactatttgtgtaccctctccaaaagcaggagacccagggagttccaggtcgtagaacagaggacaggaccaactcatacctggcagacaggagctgccacactagacccctagccccaggttgctcctgggaagggactgaatgggtgaggagccttcttgaaacatgtgacatctgaatgaggcctggacaatagttagaacttacataggaagggcacgccagacagagcccattgtcaggagatacttcatttctatcttgtagctttcacaagccactagttgtatgtaattatcaatctggttttttttttgttttttttttttaatttgagacggagtttcactcttatcactcaggctggagtgcaatggtgcaatctcggctcactgcaacctcc

SEQ ID NO: 1244691 - DNA, 4001 bp, Homo sapiens
aacttcccaggttttcaatcctgtgaaacaaactgaggcccacagagggcacacaagatatgccaggatcaaggtgtcttgtgttcccttttggggactcccgactcctgcttaaactcagaaaaatgcaccacccccccggacagtagttccgacagtcacattcaagacgggaacctcaaacactccgatgaaatccactagctgcatgtgcttttagttgccattggaagttccataacaggtcacgtgactgttacataattacatgactggacttttttttttttttttttttttgagagacggagtttagctctttcgcccaggctggaatgcagtggcatgatctcggctcactgcaacctccgccttccagtttcaagtgattctcctgcctcagcctctcgagtagctgggattgcaggtgcccgccaccatgcccgactaatttttgtatttttagtagagacagggtttcaccgtgttggccaggttgttcttgaactactgacctcatgatccgcccacctcggcctcccaaagtgctaggattataggcatgagccaccgcgcccagcatgactggacttttacatgtgacttgtggagggaggagactaaaccccagggctccgggtatttgagtcagtagtgaactccctttttgcattcttgctgctgagcctctgctgttctttgcttggagtgcctcattccaaccttctgtaaatctcacccatccttcaaggcccaatcaaggccacctcccacaaaaagccaacgcaggtgggtttcccaactccaagagcgcagagtgtgtgtctgagtttgctctagcgacccagcacagccagctttacagtatggttatttgttcacatgcctgatccttgtcacctaaaagcttcctgagaacagaaatcacctgggttcagatctgctaggccgacgcgtgcccaacaccccacacacacccatcaaattagatggacgaggtgccagctacactttcaaagctagtgatgtcccacagcccaggataacttgtcagtgaaacttctcaaaacacaatgcaattctctccttcacctggtgtattctggctcttactgtgtcactttctacttatcttccctcgacatggacagaacagagtggaaaatcacaactttgggcttagctctgtccacataacctgggggtgcctgcgagcagtcggctactacaccccattcgtatctctactccttgttttttttaactggctgtaacacagaggccaagcgtttaaaaagcgtttaccttaggtaagttttggtcatttcgtttctttaagagaaaaaaccttagagctgctttaaaggcgagtttttcgcgattactggagctcatactccgtcctggggtacgcctccgcctccctccctaccgtgctgattcccgcgcctgtgtagacgaccaagtatttggcgttccggacggcgctggccagctcccggaccttcccccgcagctcctccgggtcgtcgcacacctgccaagacgccagggtggtcaccgccccgggccgccccacccgggaccgcccgtcgccccagctgctcccgaaaccgggggcgcccgcgcgccgcacgcggaactcgcctcctcctgccgccgcttcaggccctcgcgccgccggctccggccctgcagctccgttaccaggtccgcgctctcggccagcagccggccctcctcggcgctgcgctccgccgccgccttcctcaggatgcgcgacacctgcgggcaggcggacggtgagcggcggcgcgggccgggcatggccgggccggggagcggcggcggcgtacctggcggaggcgctccctctgctgctcctcccgcaacctccggacccgctccgccgctttgcgctcggagcggctcagacccccggctgccatcgctcccctggagacctgctcttccgcttccgcctcacacggcaggccgcgctcagggcgcatgcgcaagatgggccccgcccccacccaccccttccggctccgcccgccgcgtcgccccaaagaagcacctgccagtctctttaaaaggtttattgatcatatacaaaataaagaaaaccttatatatcacaaacatacactatgtacagcaataaatacccggggggccaggcccagtgctgcccctcctggacaataatttagcaataaatactgcgcagggcaggggtagggcaccaaggccactgccctgcaagaggtcaggcccctgcccgccctacacgaagtgtgagcgctcgggcctcaccccgcatccaaaccccagcccctcctcacttagatctttaataacctccatcccaccccagcagatcccggggtcttctcccacacacacaacctcccctggctagacctaggcagggcaggcagggactgatcaactctgcttggacccacctctcagcgccaggagagcaacagggctggacacgcgggcagcccttgtcctgttgccaggagaaggctttctgtgcccactcccgtttggttaaaggcttcagggactagcagattgagggggtgggaagaagggcagggctgggacacaaggttgctggaggggccaaagcccaactggggtcaccaagaacagggaggtctcacagtttatcggggacacactctagctcagactcaagggacacccatggtatcaaagctgctgctccaggggcagggtggaaatgtgtgggactggcccagcaggtatggtacacacccaggacacaggccagaggcaggacaggcattagtctctcagacacgccctgcctctgtgtggcactgattatgtactctactctcccgacctgctccaaggccagacagccaacaggaaggcaaaaatacaccaaaaagaattattcagtggcttctgggggaaaaatcgttaatgtgttggttcctttcaccaaaccacagcctaaaaaagtaactcacaagatcccagagcggaaacggtgcagcaggctgcggctccgactttccagatgtggatgggcgctttggccaagtggccactccagagggaggcagcagggacaacatgggacctgaccatcgtcccaaagcaggctgcagccgctcagggccgtgggccgggccctgatcaccagtcagaagtgtacacacatatctgaaacatgcaccaagagctgagccagcaacaccagtgccaccccgagcagcagccaggggcctcactctcctggtgagagctgacctgtccctgctgggtattcctctgaaatctgagcgtccatgttaggataaaagaggagttggggcaaagttaaggtggaagggaagacatatatcatggtttacttggcggacaagtttgagagacctggccttggccaaagccctcgattcgctgtgtcagaaaaactgaggtgagaagagaccaccaccctctccaccaccctctcagtaggaaagcgggatcaacagagatcagaaggacagcacactcacacctgcacatgaacacaccatctatgtcaggaaatccaggggaaggggaagaggggtggagtggctccgcagggctgacctgacaggggacaggaacactcccctagacccagggaagtcgccccaaatccaaagctcttgaaaggaggtatggcctcgaaactccagaagcctcttctgccaacgcaccgaggacctgcacctcccattcagcacgcgtcgacccttacaccctcctcttccacactcccttcgcctccaggtctgcagcctggcagaggtgctcaaaatggatggccacccacagccaggacaaaagtgggggctgcacaaggacaaggagggcctgtttctccccactccgaggcagatcatgacgttttcttcatggatacttatgatatgattccaactaacgcctggattctacttagacaagatcagactgag

SEQ ID NO: 1244692 - DNA, 4001 bp, Homo sapiens
cacacactgcacaaagaaaatttaaacacaaaatgctaaaagtaattgaaagccttcaaattaaatttgtatatgagaggcactccaattcattagcacaacagaagaaaataagatatatcaaggcctcactttttctggggtgggaatggggggtgggtgaggtttcttccaggatcaccacccatcctttccaaggaagaagttagagacccaagattcagcttgaagaaagcagggcaggcacaaaggatacctaagcagtaatgccagggaatggcgtgggaaggagggacggattacaaacgaagaaagaagtcttttacttttttaaaacttaatcttttttttttttgagacgttgtctctgtcgcaaggccggagtacagtgacgcgatctcggctcactgcaacctccgtctcccaggttgaagcgatcctcctgcctcagcctcccgagtagctgggactacaggcgcgtgccatcacacccggctaatttttttatttttagtatagacggagtttcaccatgttggccagggtagtctcaatgtcttgacctcttgatccgcccgcctcggcctcccaaagtgccgggattacaggcgtgagccaccgcgcccggccaatcgtatttaacagacaagcaaacaaacaaaaaaagacaggagctcagtggcaggcgcttcctccaaagtccaggtttttaaggaaagcagcccaacctgggaaaaaaaaaaaaaaagaaaagaaaagaaaaaaaagataatgctgaacgaaaagggctgaagacagaacaaggacactaagaggaaaaaagcgcgggcgatcaagctggtaatctaaggatgggagggagggaataaagagaacaagtgagggacggatccttaaagaaaactaggacagccccccagctgggcgccccccgagcaggccaaacacgccagcaacaacgggagtgctttccaattcttcgcccccgttttctactttcacagatgaatgaaagtgcacaactccagagcaggatgcctttcctgtctcaatcccgcccgcgctccgggagcggagctcgtggttacgatccccttcgctcacacctcttccctcacccacggtttgccacctccggatcaaacagaaacgggttccttggccgttaggaagttgtgcatacaagtctagcatcctttctcagactttctcggcccgccttttagaacgtgagcgggttggccctacagggatttctcctcgcccccgtcagtttattccccaccccaccctccgttcccctttcttggagtgtgaaccacctctcccttcttgggacgcttagggaccgttccattcacatcttttttggtacaaacacagaatgcggtctgcacccggcgcagtttcgtaaggggtgtaaaggtgagggcaaggaacaaggaattccaaaggccccgcaccctcagcatctcccgccatttccctgacgagtttcccggatgtaaccccttacccgaggcggtttagacaccagacggtggcggctccctttggtgcaggaggagggaactcgactctggtccagcctccgccgcccggagtttccggcgactccaaattgtgccccacctccgaggccatgggggaaaaataaactacccagtagatctccttcactttgcactcaccatcagttccagcttatcgacctccgcctccatgttgaatagttgacattccgcagaccgcggcggcgcttaagccgcaagccgtactagcacggagggcctccattggacagctgtcactcaacatctcgcactcattggctcctccgttccaccggctcccgcccattggagactgggtaacgcccctctgcatgagacacattttcctgttgggcaaaggcacaaaacgccgcaggaggattggctgctgtgcaaatttttttttccattggctgccccctcctctctactttcaattttgtagttagggctctgcagagaagagcttgagattggtgcaattggaagaagagccaaccaatcacaccagagcttccaccgacagcagaggggacgtaacacaccttctttcccctccggctttccttccccttctctcccgccttctccttattcataccagaagcgcctcagctctgattggctggagctctgtgctatctcagccaatcacaagccgggctgtgctcctacaccatccgaagagcgaatcgtgcagagaccgtgtctacgattggcctctccctgacaaggatttaattttgaatttttctttatggcgtgggagaggccacagcccggactccatcgactcccccggctcttagactagtaagtgcaggaacgattatttctttgttatctgagctcgcgtcttgagtagctgggcctgttgctgcttgtgtttttatggtttagggaggtggggactttggctggacacgaaggggaaatggaaaggaggaaggggaggtttggggctggggaagaagtgctcggcctggcttcatcttaaccatacttctatttaattaacacttcgcaagatacgttttggagcaaagcatctgccttccttttgaacatttctttacatatttgctgctcaatgcaagtccacagatcagcggcatccgcatctcttgtttgcttgttacaaatgcaaattatcggactccacccaaatttactaaatcagaatatacattttaacaagatttccctgagtgatttctatgcacattaaagtttaagttggtacatttcttgactgggaatattactatgttactcgatattgtctggcatgctgttagagtgtcaattttaaatgcgtgtcctgtttactgagtgcctaatactgtgcgggatgagactttagggagctgcagtctctttggaaaaacaagacagaacaaaaacagcaatgcttaaaaaaaaaaaagcataaaacataaaatttaaaaaaagcaagtacccagaaatagtgctatgggtgttcaagaagaatcaattggactgctaatggaaattaagtaattgaaggctatttgtggaggagcgcaagagacttccataaaaatgtgttttaggaagatggcaatgaaatgcaacagtcatttccgttgctgctacagctttgaaagtaccccagaacaaagaacttttcttctctttctttcttttttttttttttctttttttgtgacggagtctcgctctgtcgcctaggctggagtacagtggcacaatctcggcccactacaacctcagcctcctgagtagctgggagtacaggcgcacgccagcacgcccggctaatttttgtatttttagtagagacggggtttcaccctcttggccaggatggtctcgatttcctgacctcgtgatccaccagcctcagcctcccaaagtgctgggattacaggcgtgagccaccacgctcggccgcaaagaacttttcatatcattgggtggagttttcacagaagcagcagcgccaactcctgcaaaagactgtaattcttactgtattatttattgcatcttcctattggaaaatagctttagacccatcttttagccatatgaagatgtggtatgatatgaagaagtaaaaacctccctaaccaagagaatttgacaatattagaatatattccttaactaaaataacacttgctagctaacacttagcaggaatgcttcttttcattctttattgaatgaaacattatttagctcctgctgtattctagatgctgggaaaacaaagatgaatgaaatttgtcacacccttgaaaagctcacagtccagcaggatgacaaacatacaagcaaaaattacaatgaaatgtaatacattttataataaagatgtgtataaagtgctatagaagtgcaaaagagatgacatttcagccagtataaattctgtaaggaggctgggcatggtgcctcaca

SEQ ID NO: 1244693 - DNA, 4001 bp, Homo sapiens
ttataatttggtttcagactcctccatatattttaaagacctgagcaccaacagagattgttaagatacagcaagcttgatacagaagtatgcgacatgcaattaatctccattcataccccgctctacttgtcagcaaacaaaggttctgctttagaaggagatctgaagacttcaattaaaaacagtcagctaacaagaaaataatctaagctaaaggaaggtggcaggtgcagaaatgagttgtttaccaaagtgtcagttttgaacaatgaagaactgcacatcaaaaatgctgaaggaatggatttcattgcaagcctctgaaaataaaaaggaattttctaccaagcctagacacaaaactgaagtatagtttaataagcttataaaataggtttcctctcatcaaatgacagataccaataaaaagaatcagtttatatatttcaatgcaagggcagagttaaactttttgccacagtcccttctttcctagaaaccaaagacaattacagccttccttcacaagcctaatattaaaccaacaacagagggaaaggctggattgtttcttcttagacacccagataattctcttttaccctgcaaatagttttctacccccaaaatttagatttattctgatcgtaagtaaaacggattttggaaacctcacctcaaaagaaatatctagctgacagcttttacatagaagcaatccagaatggaaatagtgctacagacagagaccaaaaggacttgccaaatatttgattaggaggcatttataccgagataacaaggtaatggagatataaaaccaattaaattgagagaaactgaaaaaaaatactgcttgccaaaaatatgacctgcccaaagcaggccgtctgttaaatatgtgtcaactatgtcaacttagatgccaaaaggcttaattctgaatagtttcctcctgggagccttatgcgactgcagattccaggcctctgtcctccctggaaggttagttacaggaaagcaagtaaaagtgacttccaccacgaaacccagcagatgaaactgcccgttagcaacgtctctttgtgacatctctttggagtgttggcagtgtgtgttgagtgttgacggggatggccggaactctttaaaccaccgcttagacactgtagttggaaggtgaacacaccacaatgggagttggaaggtgaacacaccacaatgggggcacttctagaaaaggaggaaatcccatactgagaatgagcctgccttggggtgggtgagacccctagacgtctgcagggtgataaagggagggctggggttttcgcactgacaaaaactcacgtcaaccacctggccttggcccatggggatcccatgagcccctcgcagccccctggagagcctcggggacctctaagcaggaaggtttggggtcttctgtgagaggtgaggaagtcgtggctggggaaggagggggacgggaaaccctacagatgtagggcagtcctttggagaaagggacaggtcggagaccaggcaaggtggcatgggggaccaagaacctggcctgaggactttagaagccggggaggtgaagtggaggcgtggaggtgcctcaaggcaaaagaagatgtgggactccagggagtgaaaggggccctgaggtgagaggatggaaagctggctctagggagttgagggctctagaagccttaaggttctagaaggaggtgagtgacgaagccgtaaagaaagcctggccgtgggaggcctggtgtcccctttcggccttcggctcagcactggagggggcctgcgccagggcgttaccttccaggagccaacggatctcctcagggagggcggcggcctgcatttggctgggcgggagagaggcgggacggggcgcgggccctggtcgggaggcggacgggctggaaggcgacccggctgcaccgcgaggcacctgtacctcagccgcggtcgccgcccgcccagcccggccgcggggcggggccgtgggtccccgggcgcgtcaggaagtggcgcgggcggcaggcggggaccggaacggggcgcggggcgtgggtgcacgtggcgctcacgccggagccccacggtagaaggattgggggtgccggaagcaccgcaccgtgcgaggccaaaggtgcgcccctccagcacccaccaaaacaaaagacttcacaaggctcaaaggacccacggctttggacactccatcctaagcaccgaacagttgacctcacggtggcagatttgaaagaccacggggtgcctgaagtagggtgcagggaggcagaatccaaggaagagatccccgtcaagcatagcacccctcaattgccggtccagttcacatctccatccccagaaaagagggcaaaacttcgctctttgggaagccacaatgttgaaaggaaatgattaattcccaataagcaatataaggacaccaacatttgggagaatcgcggcagcgtggcagcaagggacacaggaaaccaaactgtgctgttctccctcaggatggaaaggccctgaggaaaggaaggggtaacacagggagaaagctgagggagaggagaacagagccctttccctccaggagctgcggaagggaggaaagtgaaggacaaaatcacacggtctcattcaagggacagttggtgtcagtgtcctggttgtgacatggtactgtaatagtgccagatgttacccttgggggaaactgggtaaaggtagacagagttcctctattatttctgaaactctctgtgaatctataattctcaaaataaagaggttttttaagtacaataggtcaactgccatgaaaaaagtataaagtgctatggttgataaaagaagggagctgaataccagaaaaggagggaagaggccaggcattgtggctcacacctgtaatcacagcactttgggaggctgaagcaggaggatcacttgagcccaggaatctgaggttacagccaactatgatcaccccagtgtaccccagcctgggcaacagagcaagaccctgtctcttaaaaaagaaagaaaataaaaagaagtgccagtgtgcatgtgagtgtttaaaggtgcatgtggtgtttgagatgggctctgaaaaacacaccagactttgaaggggcagaggactttccaggtggaaggaccagagtaaagaaagatggaagagccctcaccagcttgaggaatagttagtagccctcttttactggatgttgtagaaagactatggttgtcaagataaactgcagctctactgtgaagggacttgaaagtcagaataggaatgttgaacttaattgagagggcactggggagccattgacaatttttgagattgggaatgacctaaccagagctccggggtggtatgtggcctcacacatctccacctctgcctttttccttctttgtaaaaaatggcatttctattctcagactcaacctacagaatatgtagaaaagattaggagtggtgggaaaagacacagggggaagtgggtaaaatggtttttacaacagccataaggggaataatgatggactcaatctagcagacggggcaagagcagtaagaagaaaccatcgagaaggatgagtgtgataaaagtgcctgcctccttgtactgtttcccatccagagatacagcctcaaagatgagggtgtgatcctttaaggagtacagtgcatcctgccatctgaaaagcagtggtgcattggtttcagtgtcacatgacccacctacaagctgcagtaaattggggtgaggggacagaggctggcatgagcctctctggggtatctggctcctgctcatcctccttcctgccctgagaaagtatagtaatgggtggctgggcacagtggctcacgcctataatcccagcactttgggaggccaaggcaggcggatcacgaggtcaggagtttgaggtca

SEQ ID NO: 1244694 - DNA, 4001 bp, Homo sapiens
gatgggatctgagtcttggagatgggagctgacaaaagagaaagtgcgcttgtggtgtagacagtgtcttgagacttcctgttatgagagagagcagagaaagaggcactatcctggaaggagcgtggccttgaaagagagctcttgtttgtttaagatgagagatattacagcacctccgtatgtggatgggggagatcaggcagagaggaaatatttatcttgtaggagagtgagaggacaattgcaggagcaaagtccttgagaggggctggcctctcctagacaggaccagagtcaggatggggctggcagcatctgtgagccagaggcaggtagcagggccagatacggtgcacagaagacaggggctcctaacacatcccagtctcaccaacaggcatggcttctagcactgactcaggatttcctgtgtgacctgggcaagttactgaatctttctgtgctgtgcttccccaggtcgaggggaattgggaagaaatcaaaatccctgtctggcttccctcctggggttaacacacttgccccagcctgtcggaaaacccatctgatgggtccctagcactgagatgccaccggctttggcctgagatgaaggtcatctcaaaggtcagctgggccttgttactgaccaggtgtcaggggcccaggggctgtgccactatcacccccagtctctcacccctttgggataccatgaacaaaaaagtctgactcaatttctctatctatgacaaaaggaagaaaatggcttgatgggcagttctgggggtgtggggtggggcaggaggcagcagggtggagagaagacatgctttggcaccagatcacacccccagctctgaacctcccagctgtgtgatttgccagaggccgactgactgaagattgaacttcaaggccttccccctggacccttcccaaagccccaaactaatttcagattaatacttttgtgtcctttttcttacagagtggggcccaaaagtgtataatatccaagttccatgaaacttggatctgccctgggactttgactaagtgacttaacctcaccttccccatttgtcaaatgggacagtcaggcctgacctcttaagatggtggaaaaggttactgggtgcctagggcagggcaggcattggcggcttgatttaatgagagatgaagttatgacttctgctgggggcggaggaggaggcagtgacgcctggttgtgcccagctccccctccatccagggcacagtttttgtgctgtctacctgcagcggtcccctcttccaactcccacccctcctcctccacagacttagcccttgaatccacaggtgaactctttctcttcctgtttatgctcttaaagatgcagaccgcctgcagccagctttctcctattctccttccaaccctcttcactctgctgctgcttacccagccgtcccctccccacagccagcccatctcagccgccatggagcccagtccagggctaggtgggcacacagtaggtagatcagctccatctgccccccttgcatcttgttgatggaactggtttcctgtttcctagggcagtaggttgcaaacccacctaagtaattcacgctgggctcctacaactgggtgccaagcaaaagcccctttgacctcctagccctcagtcctcaggaggagcagggggcgatagcctcacttccagggcaggggcagtgaggaagttatgctggatcctaaggatgcccaaccccggcccagacagtccctcctctgccccctggagttatctgtgctcagaacaccaagtccttaccttactggggacgaggatgggcagaggcagcaggagaatgggcacgaagaacacgatcaggtaggagcgataggcccacagggcctgccagcaggtggccatggtgtggagcagcaagggctgctacagccactgcctccaggagctgggtaacagaaggaccaaagatgcagccaagcaggcaggtggcaggcttatataaagccagttgagtgttaaccattgacccagtctggcaatcagagtgtttttggagttggggaggtgagagtaaggaggagggacccacaggcggagtaaagatcaggaagggagagggagaaggaaggaggaaagaacaaggattaaaaaacttcaggttccttcaagaagttaatcccagcgttaactccttctgttcttggaggctgctgagggtggtgctggaggagctggagaaggaaggagagtcccccagccaccctccacaggcagcccccaagccacctccgctggcccggcctttcctttctgctgttctccaaagctaggttctcagctgagcactttatgtgacagcctgggtggggtggccctgccctgcccacagagatgccctaggaattttcagtctaagattgacagtagctaaggcctggagcaagtcctcctcctcctccttccaggtatcgaggaccatcaaagtccctggtcctgactacatcttgtgtgacactgatccaccgacttaacctctcagaattagccacttccttattctgcagtaatatcttgctattgtgaggctcaaattagacaacttatatatgttgagctttgatgcatggcaggtgtacgatgaaggttagtttctttcaggctcttcctagccccctcgccccccagcaaagattgtctcttattttggaaacatactagatctctcatttatccatcatccatccatccatccatccatccatccaaccatccatccatccatccctccaccaagcaagtatttagtaccaattatgtattcagccctgtgctcagtgctaaagatacagagattaaaatgctgctgctgctgctggtggtaaagactgacatttgctcagcacttagtacaagtcagttactgtacttcatcaactcggtaactacaccatgggttaggtgttactattccatttaacagatgggggaactgaggccaaaggacatggagccagccagaattcacacatgcattatgggtatcctgagggaggtccaaaccagggcagaagctctgggtgaaaggcaccaggcaagggctcctggaagagatggcatctgagcgaaggcttgagagctcagtcttacttggcacgaggtgataggggaaggggcacaaggagagggaagagtgaacgaaggcctggagggtggcaagtgcatgcgtgtgtgtgtgtatgtatgttgaacggagcaagttgtagtttggaagaaattgtgggtcttatctctggccagaccctcagtctcctggcgccctcacccctcctcaccctgactgcacgcagttgaaggtcaatgcatgtttctgaggttatcagagtatgatgatccgtgtgtgctaggataaggaggcggggtatcagggagaatgtttcaggcagcgaagacagtctgggaagagatgcagaagcgtggggacgtttagagaacagaaggttctgcgtggttggaatgtggatttgcgggggacaggattaagagctgataactatagttttaggtgtaccatagcatggcctgggctgttatgccaccgagacactcctggagccagtggatcttttagagaaaggcccctggtgctttctgcagggcggtcctagaggtcagagggatccagttcgagggctcctggagcgaggccaggctggtgggatgctacagtaacagagtacaggctagccaccccagccccccttcaggcatggctccttcactcccacacagtggcctgccacctgcccagggcaaagtaagcaagagccaggaaggacagggagagacaaagggtttcagacactcaggacaatgccccgattctatctcaccttggtggaagcctctcccatggcctgaggcttttaaggagccacaaaaaaaaaaaaaaaaaaaaaaaccaggcccagc

SEQ ID NO: 1244695 - DNA, 4001 bp, Homo sapiens
ctctcttacacacacacacatacacacacatacacacacactgagttagggtttccagttcagggtgtgtgtgtgtgtgtgtgtgtatgtgtatgtgtgtgtttgtgttttttgtgtgttttgtgtgtgtgtttgtgtgtgtgtttgtgtgtctgtgtttgtgtgtttgggtgtgtgtttgtgcgtgtgtttttgtgtgtgtttgtgtttgtgcgtgtgttttgtgtgtgtctgtgtgtttgtgtgtgtgtctgtgtgtgtttgtgagtgtgtgtgtgtgagagagagagtgtgtatgtgtgtgtgtgtgagtggggtctcctgtggcaggaaggtcagccaagctactataatcattccagggaacatcactccctaccagcagagctgaaatcgcagctctcctgcctggctacttcccctggacaataacaaccccagacttcttgctacagaggaagtgtggctgcccacagttggtgtggcaactgcacagcctccacagttggatctgctgtccttgacccatccagggcctgtgctaggcccacccaagggctcctcccagtctccccctcccccatcctaggaactaacgttaatcccttttgattcccaaagccttaaagtgtcagaaccaaaccacctagccccattgtacagatgagaacaccaaggcccagagagcacaggcacttggctaaagtcacacagatgacagaatggtggaagtccagttctcttgcaggttggcttcctgacaccccagtgcactcccttcctctagagctcccccccagagcatcccctgaagagctcctctgtttcccaaacctgcctggggaggggaggtggggagctggaggtttcctgtctgggctgagagtgaaagggctgaaagaaggaacgaggaaggagcagccagcagccacaaaaggcttcaaagggcttgggcctccgccaaactggctgtgcacagcccagtggagcctgcgcccaccctgcggccaaggccattcattctctctctccctcacagaagcattaggagactagggcctgggaggaagcttccctgcaactccaggtcctgccacccaaggcgcgagctctgggaatgtgtcccgcctcctgctacagccccagcaggcaggaggcaaagcaggccaaccccaacctgcctgcagcctggagcaggattatgaatcagatgtggctctccaggttggaaggaatgtggatcatagatagagacactaaggcccaaggaagggccagagagtggcaaagacagcgcaggatccacgtgggtgatgatttttttcctgtaggtccctcctgacggcagaagccacctacagcttgaagtcttctttggcgaagggaaaagacaggagagagagagggaaaggcaagctcccaggttccctgttggcgcaggtggcattttggggggaaacagggttatgcactgtgggagattcgattcggagccaggggctgagcctaaggctgggatctgtgtggctgagatctgtgctcacttcgaggtttccgtgcttgcctggacggctcttgcgccctgggatctgtaaaccccaagggtggtgcgccctggggtcgccatgcccctcagattctttacagggcacctcccatccggcacctggagctcctgagtgcgcgcgccccgggagagctgtgctccccgcgaaatccgtgcgctccagctcagggctcccgggatcggtgcccgttagtgggcacaggacgccgggtgtccgaagggctgcctggagatgcaactgaccttggcgggcatcagaatgacgagtggcagcagcaggagcggggtgacgaacaagatcacgaaggacttgaacttggagacatagctcagcgccgaggccatcgcgcgggagggagactggcgggcgagacgagtgaggggcagctagaggcgccgcgggcttaagaaggggccacagtccccggggattggggagggggcggtgacaactccgccccgcacgggggcgcctccccgcggccctggggcggggccacccctcggggtctgtgggacgcgcctgcccccaattctgccacccggcggcggtgggaggcgtctttggactccaacgcttcgggccagccctctaggggcagcctgggccctagcatctcgcgctgtccaagcctctcctgcgctgccgaggcagaggtgcgtcccggggctgccaagcggggcgtgttttggtcactggtgctgcccgctttggcgtaaggcgccctcccgcgtccgcatctgctctttcctgggctctgaagggtcccggatgaaactctctgcaggcctctgggtctctcaggtctatctccccgatctccctctcctttccatctccttacttccgcccctccggtgtctctccgagaggtgtccccccacgccccgcgccctccgcaccgcgggcctcgcttcccggtcccccctggcttcctcgccacgtccgccccactctaggtgcaggaccccttttccccgctcgcactctccggcccggagctcctgggcgatcgcacagggaagcgaggccactgtcctcctctgtcccaggggctgtcgcgctccagtggacgctgcaccccgcagacgcccggcgggcagatgcggacacgcgtcttggaggggccccaccgagcctcagcagccgcagctgcccgcccgacccaggtcagagggaaacggagctctagagaggaagggacacaactaaggcgacactgagacagtcgcccatgtattcattcagcccgccaggcaacagacaggtgccgagcacctcttctccgcgaggccctgttttgggcactggagacacacggatgcaaagacatccccacctctgtgattttcttctttcctctcctctgcctgcctctcattctgcagcttccttttggggagtctcatccatgctggtggcctaaccacagccggctccttagtgattaccatcctctgccttcaacccagccatgatgccagagtcccagatgtccagccttccgcagactggacgtgtctcggcccgaaaattcaacacatcctgaatcaagctcatgagttccttcctgtgacctgcacccaaggacatgcattctcccaagcccctcctgcaattgcctccctcctgtccttttccctttgtaactctcatgcatatagccctgggttttcccgcctttcctgtgtccccagggcacttagcacaatttgtacctcttatatttattggtgtaatttttactttttacttttttattttttaagtgttatttcatttttaattgacaaatcattgtctatatttacggggtaccatgtgatttttcaatgtgtgtataattgtggtgtgttcaaatcaggctaatgagcatatttatcactcgaatatttatcatttctcttgtttttgttttttgtttgtttgtttgagacagagttgtgctcctgtcacccaggctggagtgcagtggcacgatctcggctcactgcaacctctgccacctaggttcaagcaaatctcctgcttcagcctcccaagtagctgggattacaggtgtgcaccaccacgcccggctaattttttgcatttttagtagaaatggggtttcaccatgttagccaggctggtctcgaactcctgacctcaggtgatccgcccacctcggtctcccaaagtgctgggattacaggcgtgagccaccgcgtctggcccaaatatttgtcatttctttgtggtgagaacatttaaaatatcttgtagctattttaaaatatatgacacattattatgatgtaatttctatttactgtctgttttattcatcaccacctgtccagctagtgcctttctcagtgcctaatccaggatgtgcactcaaacctttttctccgggatgcatgaatgagagcaagtaaacaacttcagttc

SEQ ID NO: 1244696 - DNA, 4001 bp, Homo sapiens
agggcatttagaagcctcgaaccccaggggcagaggatagttgtaggcagatctgtgagctcaggtccttacctgacaggggagggcccaggagccccccgaggctcatcagcatcatcaccagccctgtggcctgcaccacacctccgacgcccaccagcccggggagtacaccgaaaaccagcggggcgtaactccccgcgctcagcccataggccacagccgcggccagcaggggacccccccagctctcttcgccgcccaccacgggcaccagccccaccacccacagccccagcccagtcagagccccgaatacggccagcagccgcgggaggggcacccagccttggtctgccagccacccgcagaccagccgggcgcccgcatcccccatcgcagccacggccaccaccagcgctgctccgtatccccccaggccccggtctaaagcgtggggagccaagtgcacgtaaggaacgaagtacccgcccccaaccagggctgtgcctagagcaaagattgagaaggcccggcgtgtgaacagactcaggccgagggcagctaggggactacgcggtggggctggggggtctccaggaaggaccaggggtagcagcagggcgccacagggggtgaggtggagggtgatcgcgccgaggaggagcagagcgccccgccagccgaaagtatcgagaagaagctgcaaggcgggcgccaggagcagcgaggaggccccgttgccggtgagcgccagccccaccgccaagactcgacggcgggagaagtaacgcgagagggtgcctagggcgggggcgaacaccagggcccaaccaaagcctgcgaatgaataggaggggatgggggccggcactggggacgcccgccccagcattcccagcccggctctccgcaccaggcccccgcctcgttcgctaccccagatcccaacaagctcctgtcacctccttcaccctgaatgacccgggcatcccacttccctcaccagcgaggaggcccaggccgaggtagagatgcagcagatcgctggcgaaagccgagaagacgaagcccagcgaggcgaggacgcccccaaccatcaccacggggcgggccccccagcgcgtgctcagggcgctgcccacggggcctgaaagggggcggagtcaacggaagacacgcccccgggcccccaaactctctccaacacttctcattggctgtttgcctccctcgaactaatggttcttctccttgacctcaagatgcactcttttctagagccggttgccctttctcaggttgtcgggtaatcaggtgggtctcccatccctccactcacggctcctcctccccgttcctgtctcccgcctcagggcccccctcactggctgcctgctgcacggccagggccagggcgctgatccacgcagtgtcctgggcgcttcggtcaaagtgctcggcaaggtcagggaaggcaaggcccagcgagcgcagcagcccgtaggacagcccgtttatcgcgaaggctgcggccgccaccacccagccccagcccccatccgggggtccggcgggctggggggtcatcgccgtctgcggggtggggaaacatctgtgagagaagcctccacgcctgtgcttccgctggggagctggcatccctgagatccagcctctggctgctcgcccggggtgggcccgtcactccgagcgcgatggcgcggggcggagggagccggagcctggcctagggctggaactcccgggtccgcgcgaggtacggggacggggacagccagatccccaggcccgaggttccccgtcccacgcacactccttcccccttacccgacctctccgggcggtgcggggaggggaagggtgaggaagggctgggcccggctttctctctgcttcccaggcgggcgggggccccgaaggggagcgagggcagcgatggagcccaacttggacgggctctctcggtaaacagagatcaccacaggggcctgagccacctgggacgcggggtgtacggagggcgggggcgagctgaaacagccaatccggcaagccgcgcgtgaggccagacgccagtcccacggggattgaattatgtacacacacaacccccaggcccgggggaggggggagcggcgagaaatgaatgcagaggggccctgccctactcacacgcatgcacctgccgcctgctgcgcgcaggggagacacgtggattgcaaaccccagcgagcccagggtccaccgccaacgcgtggaaatagggatggtccccaaaacctgaggggatgagtagttttgttctcaggaacgttgccgaggaccaggtaaatctcggatatcaatcagatcacagacctccaccaagtgccagctctgtgcttagaataacagacccccaggccgggcgcggtgcaagcctgtaatcccagcactttgggaggccgatgtgggtgaatcacctgacgtcaggagttcgaggccagcctgaccaacatggcgaaacaccatatctactaaaaatacaaaaaaaattagccgggtgtggtggcgggcgcctgtagtcccagctacttgggaggctgaggcggggaatcgcttgaacccgggaggcagaagttgcagtgagccaagatcatgccactgcactccagcctgggtgacagagaaagactctgtctcaaaaataaataaataaacaaaaataaaataaataaaataaaataacaggtcctcaaggacagagggatgaaacacgactccctcaatgtgaagacctgcagtgtaccaggcaccgtttacacatgctatcacttcatcttatgataaccctatgaagaaggtgtcgcttttctttttttttttttttagatggagtttcactctgtagcccaggctggagtacagtggcgagatctcggctcattgcaacctctgcctcctaagttcaagccattctcctgcctcagcctcctgagtagctgggattacgggcgcctgccaccactcccagctaatttttgtattttttagtagagatggggtttcgccatgttggccaggctggtctggaactcctgacctcagatgatccgcccacctcggcctcccaaagtgctgggattacaggagtgagccaacgcgcctggccgatgtcgtgcctcttttatagatgcagtaactgaagctctcagggaaaaaatggtatggatatttgaatttaggtctgtccaactgtggacctacaaggagaacaatcccaggactgaaacaaaatctggcacagttaagggaaagatcctggatacagcttgaagcaaactgccctggaaagggtggaaccattgcagggacagaaaacttatgagtctaaaataaggggtcactgggaatagaaaggattcttgagatcagaatctctaaacacttaggttagaattttattttttattatgtatgtatgtatgtatgtatgtatgtatgtatgtatgtatgtgtgtgtgtatttatttatagagacagggtcttgtccaggctgaagtgtagtactgccattatggctcactgcagcctccacctcccaggctcaagcaatactccacctcagcctcccgagtagcgaggactacaggctccacaccaccatgcctggctaaatttgttcattttttttgtagagagggggtcacagcatgttgcacaggctggtctcaagctcctggacttaagcaatccttccacctcggactcccaaagtgctgggattacagtctaccatgcctggccaggttacaattttaaaagcaaagtaaaaaatcaggtcattgaagccaggtattgattttttgaaaaactttatagaaaatgtccttttttgataggttgacattctttacctcagctctttgaattcagagatgtgttctttggtttaattattaaacaatatgatagaacattcagcaacttaagtttgg

SEQ ID NO: 1244697 - DNA, 4001 bp, Homo sapiens
gcagaatgtagcacttgcttcggagtcccacagacctgggatacaatcttggcttggatacttcatagctgtgtaaccttgtgtgttttacttaacacccccagcctcaaccttctcaactgcaaaatgtaataatacactttttgggattgtggaagattagagacaaagtttgtaaggtaactagcacagaactttggagttagacctgggctctaccatttctagctgtgtgaccttcatttgccaagttgtataagctttaaagcttttccccagctgtaaatccaataatgatatcgatttcacagtcacagtacctagcacctttttttttcttttttttttttgagacggagtctcgctctgtcgcccaggctggagtgcagtggtgcaatctcggctcactgcaagctctgcttcccgggttcacaccattctcctgcctcagcctcccgagtagctgggactacagtcacctgccaccacgcccagctaattttttgtgtttttagtagagacgtgatttcaccgtgttagccaggatggtcttgatctcctgacctcgtgatccgcccgcctcggcctcccaaagtgctgggattacaggcgtgagccaccgtgcctggcccctagcaccattttatagtaattcttccttttacactccagtcccattagccctgggcttctgggcttgtatacttggtttcatcttttttttttttttttttgagacagaatcttgctctgtcgcccaggctggagtgcagtggtgcgatcttggctcactgcaacctccgcctcccgggttcaagcgattctcctgcctcagcctcccgagtaactgggattagcgccaccaggcccggctaatttttgtatttttgtagagacggggtttcaccatgttggccaggctggtctcaaactcctgacctcgtgatccacccgcctcggcttcccaaagtgctgggattacaggcgtgagccaccgtgcccggccaggtttcatcatccttgaatttcctaattcctcaccatgtttgtcgctttagtcattcctattaagaattcccttctgggtacaggtgctagctaaactttccctcagcttctccccgaaccctttggaaggagcaggaaggaggtgaacatccaacgatctaagcatttgactctcctgcccttgtgcaggctctcacctgacagcaacccaatactcaggtataggtgggtcaaggaagtagcaaaagaggcgagcagcatccccagcgcagccaagatgcctccagtcatcaccacgggcctgggcccgaacttcgtgctcagggcactgcctaccgggcctgaggaagtggaaggggcgctgcgagaagatctcaggggtctcccccccagcatctcccgcccctcgcccttccacttcccagtcgccgcattccctctcccttccgagggtcgcagtccgccagatccaggcgccgcactcactcccaaactgctgcaccgcgattcctatggaggcgatccaggagacgcgcgctgcctgctcctcaaacgccgccacaaactccacgaagaagaccccaaaggagcggagcaccccaaacacaagcgccgactggaagaacgctgagagcaccaccacccatccccagcccccgtcggggggctctgtcctgcgcgccatctaagcggtaacagggctgctgccacccagagcctctgcaggagccgggttctggacgccgcacctctgcacacccacccccgctgccgggtggctcggggccgagaggggttggagaggcaggtagagaggaagggcccgacgaggcggcgagaggcccctgcaccttttcccaaggcggggcgatataggactgaagacctggcccgcgctggccgggccagagtctcccgggggcgtggttccgcgagctcggagctgagctagttcaagccggggccggatcggtcccggttcggtgttcggctgggagccagagggtggaactgagtttgggccccacccctggagcgcgccagtttccgtgtagatgatctattttatcactggggtgtccgggccgggccaccctggagctcgccaatgaggacgcggggctcccgggcaggggcggaacgagaagggcagggcgggatttaggcattgttggggaccagcagtgaatgggcgcatgcgtaaggaggggcgttaggaggctgactaggtagggccccacgtgacgcggggactgccaggaagcttccgtctcctcttcacctagcgggccaagtcatccccgtttcagcacccagagccacacggaagggttagtggtgggtaaactgggtctggagaggagaggactctcttgctttaatgaggggtccaggaattgcaaggccctgttgggggtaggggaggggttaggagatgagactcaaacgaagtgtttggcgcagcgcctgaagccactaacacgcagccctaggcacgcagacctagaagcctggatccctgagaagttcaacggctaagggaagagagaaggggaatgagttggactcctggcgttcatttctgtagtgggaactcgttcctgtcacttctgttcccactaacaggaaacctacaggtcacagagaccaaaaataactgaggagaggaagggcggctgtaagctcacacagggccccaccaacaccacctacctcttcctcactggggctggaaccttttcctctgccctctagtaacaaccacttcctaaccaccttttttgatctgatggtggggtagactaaagagacaaactatgaccctggccactggagcagtcagccccctcttacccaagtagtcctcaggcccctagcaaacactccccagtccttcccagtctccataacaccaatggcttggatttcctgttccttcattataagccatacttcccaggaccctgaccttgaaaccgtggactcaatgttcactcccagattactggggaaagcagcaaacaagaagtggaggcagggagggaggtgtgtagtcttaaaagacatattgagccttaaataattttatatgtgggaaataaaagtaatcatcaataatacacatatatactttctaagagtcaaaatgtcggctggtggggaatatgccaaagatacagaaattgctgtggctgtattacatagtgattaagaactcgggtctttagaatcagatcacagttccagtcttttatttatttatttatttatttatttatttatttatttatttattttgagatggagtcttgctctgtggcccaggctggagtgcagtggcatgatcttggctcactgcaacctccacctcccgggttcaagtgattctcctgcctcagtctcctgagtttctgggattacaggctcccaccacaacgcccagttaattttggtatttttagtagagacgaggtctcaccatgttggccacgctggtctcgaactcctgacctcaagtgatccaccagccttggcctcccaaagttctgggattacaggcgtgagccaccgtgcctggcccagttccaatcttgactttattacttaactcgatcaagatgctgaatctctcagttggtttccccatctgtaaactggggataatagtacctactattaagcgttgcccaaggggttcagttagaaaatccatgcactaaaaatgcttagtttatgtgctgacatgcagcaggagccaagtaatattagcttagctggtcttattggtgttattttcaacaggggataagctgctgtagtgggaagtgaaggaaggttttagtttagtgtttttttttttgttttttgttttttgttttgagatggagttttgctcttgtctcccaggctggagtgcaatggcatgatctcggctcactgcgacctccacctcctgggttcaagtgattctcctgcctcagtctcccgaatag

SEQ ID NO: 1244698 - DNA, 4001 bp, Homo sapiens
tggggtcgttaccaagcctgccttgagaccaggcctccaggtgcccaccccagactctgtccacaccatggggccctgggggacagacgctgcacgtgccacggcagagcccccatgcactcaaagcctctctgggggcagacacccccccacggcctcctagcacctcctcagttccttccctccatgagggagtcgagcccagccgcctccacaccacgctggcggaatagaccctccttcagcagggtcaggccagcacccacctgacttccaggcctgtgcagtgaagctgggaccttggactccccggccccaacagacacaagacctcccacccttgtgctcagcatggacaagcccctgggccttggggtgggccaactgccatttcccgcccagcaggcctgactctggccatcaccaggagagggaccctttcagcccatgcctctgggacagagaggaggacagccgcccctcggctccccccatcgtccctcaccgactccagccacccctggaggccccggccagagctaagggcttcccttccactctgcggctcctgtctcttgactggcccaacacccagggaggctcctgaccaacccacttttcgtatagggaaactgaggcgtgggttaggaagtgggaggctaccaaaggctgcgcctggttttcccacgagctgggggccaggggtggaggtagggcgaacccagggagcccagcctggctctggagagggtcccccacttccctgcacggtctcgggctgttagtcattgcccaagggcgggtgtgggtcggggagtgttcagggtgttgcgaacaggggaaagcgccacggcccgagcgcaagtgctccccactccctcggggaggccacccatacagggagggctgcagcagccccaccaaatatagcccgcgccccccgccaccgcggaccgagctatttatacccggaccgggcttggccgccggcgcagccatctcctggcccgagcccagcccctgagggcagcccgacgggtgggcgccgggccggaccgggggagacgagactgggcagccaggtatgcgagggcgcggaggggcgcggctggctctcgggagccctcggtggggcccgctcggggtcgagaaggctagtccatgccccgggcgcccccggacctgatggacaaagtgggcggggtgggggtgagagcgcggaccccgaggtcgcccccttgcccggcacgggggagctcctgggccccggcccgcgcgcgagcatcgcggccgcgcctacctgccgccgctgggccgcctcagcccgcctctcgccgcctctcgccgcctctgcccgcctctgccggtccgctccgcgccgggggcgactttaagtgctcgggtcgctggcgcggcacgtcccccgcgcacgtcaccgcctggcgccgcccctgcgcgccccgcccggaccccgcgccgcctccggacgggctcccgggccgcagctccccgacggcgcgtcccgcaaccccgccgggcccagggacccccccaaccggaaccggccccgtcggcgcccccggcccggagctggcccgccccctctgctcctcgggactgggtcttcccggcctcgcctcccccggagtccaggctcgcttcgcccctccgccccgccgtccctccgtttccccgcctcggagcgcagcgcggcaggtcccaacgtcctccagggcagcgacccctcgccccccaacgccggggcccctttggtggggaggtgcgcgcgggtcccgtggggttccggccgcctggctcagctccggggcccacatcctccctctctgaggccacgtccgacctgtcccccttcagacctccgcttcctctccggtcccggtgcggacggcggctcttcctggctaggggagcggcccgcggcctgcgctgcctggatgtggggcacggcctcgccctccctgaacttccgtttccccaggtggctccgcgccctgcggggccctacaaagccaccgactccagccctgcgcccctgccccgcccctctcgcggcccagaacccgacgcggaggccggggcggctcccaccttcggggaggcgagggctgcccacccgctggacctcgtgaggtgcttctcccagcctgttttctctcatttgcaacatggaaataacgggccgctttgggtgctgaggtttgaggtggctccagggagtaaggcctttgttggcctggaccaaggagtctagttgtcagggccaccctgccagggccacaggaatgctttaactggcccctcccggacccgggggcttcggggaccgaggcactggtaagcccgtgccttcacacacaaaggaggcagggggtatcaatggaggacccctccagagggcaaggggaggccacccctgacagtgaggccgtgtgggccttggctctccatctgcagcccagccttgcgggacatcaggtccagtaaggccgcctgttctttctatgtaatgttacaagcccaccctcccgctggcattcacagaggctgggtctggccctcacccctacctggggcccaaccacccccatccccaaacatcaagatgagggcacgtgcctgtgagcagaacacaggcctgtggcaagtggtgagggggcctccaacttcacagatgaagactctacttagttggcccgtgctgctcccgcccagggcaggtggtgctcccgcccagggcaggtggtgctcccgcccagggcaggtggtgctcccgcccagggcaggtggtgctcccgcccagggcaggtggtgctcccatcttcctgcaccaggcgattcatcagtttctgaggagggagagcagcagaggggtgcgaggcaccgtggacagctgcgggaatgggtcccctatggggtattgcctgccggggaggcgagggtaccgtgctccccatcccagattgttgagtcaccaggcctgccagctgggcttggggcccccactgaagccaccgagacaccttccacatctgcctacagcttggccctgatccctgaaccctgaacccccaccgtagagcagcaacagggggagggagacagagccagagagcctgggacctcactgccccctcctgcctcctgaaggacaaaggggcgcccctgccagggccaggttttctcccagctgggaagacgcccagtcatccctccaggggtcccagggagcacctgtggtttggttctgacccccaggcctggccccctcttaggcatggcttcccctgggtgtgggccccaggactgtccacccagagctggggtggagcctccctgccctcagaggggaggggagcaggcaggccagtcagcactggctcccagcagagaggtcaagtctgtgggctttgactggggggactggaagaccacagagtggtcacagtgatgtgatggctgctgggggctggggctgggggcctgccaggttgttacccagaggaaacaggcagcgcagctatcaagcaggccacttgggacagctcacccggagcctggacagaacaggacgctgtggggtggggccagagcctccgagaccctgggcccctctccgaggattctggcactccggtagcatgaggtacccctgacctccaagtgctcagcttttagaaaggcccagcagttggtggcggggggcattccaggcctggcaccagggcccaggtggccaggctccatctgacacagggctccaggggcacctgggcacggaataccactttggtttcgggtaagatgccttctgggggtcatgcccctccctcaacaaccctggatgtgtcagagacagcgatggtgcaggggagaggcacttctggccatggtgcgatcccctggcccgctgggggtctggagctgcgggaaggggtgggaaaggccacgtgtgtccgcatctctgcaccccactctgggtg

SEQ ID NO: 1244699 - DNA, 4001 bp, Homo sapiens
gtaggtcccgctcatactggtattgtttaaaaggtccctaagatgacagtatacagcagggtaactacaagatattaaaaatatatgcactgaggccgggcgcggtggctcacgcctgtaatcccagcactttggggggccaaggcgggcggatcacgaggtcaggagatcgagaccatcctggctaacacggtgaaaccccgtctctactaaaaataaaaaaaattagctgggcgcagtggcaggcgcctgtagtcccagctactcgggaggctgaggcaggagaatggcgtgaacccaggaggcagagcttgcagtgagccgagatcgcgcgactgcgctccaacctgggccacagagcgagactctgtctcaaaaaaaaaataaaaaaataaaaatatatgcacttgaggaatgaaactgggaacaggacgcagactgcgggtcacaggggagactggaggggttgacggcctcagggccccagcttgtttggggttgcaagtttgcacttttaaaaataaacaggccatgcaaggccaaggaaggaaatgtgtatacaacaaacaggaatagacacattttgcataccccaggttccccctgcaaaacacaaagaggtaccaaggcctctgagtctccctggctgcaccagcgggggtgggagacgcaggcagacccagggtttgaagcccgccagggtcctcaggagacagacgagggcgtgtggggaggcaggggacagtggccaccctcaggagacgcggcgcccctgaattagtgtcaaggagggctggcagagggttggggcagtgccaggactcactgaccaggagagcacagcatgttctgagacctgaggtgcttgtggcttccacgtgacgctcatgtggggagggccatcttctgtgtcaagatgaggcatttggacaagcccccagaccacaacctggcaccatcgtctgtcctcacccagcctgtggtgccagccatgctgaaatggctccaggagttcccactccagcctggtgtccaggggctgacttggagccagctgtctgcccacatggcttggggcaagggattccacaggaggtagagtacggggaaggggcacaaaataatggcccacactccccatcttccaggataaccccggcaccgtgatgggccaaggtacagactgcccggtgttccagggacaaccctggggctgtcctgcctggagcacacgccacagccaccaagcattggcctctccgtgggcacacgccacaggctggccttcccctgacatttaccaaccccccccccgccgccccccaggaagcatgccaacccacccagaaataacctggcctctgggatgagaaagctgatctcccaggtgggggctgcccggagagcaggtcccccaaaggctctacgaccccaggctgctggaagctgagcgggaggcctggggcaggggtgggtgggaaagtcccttgcaggagaccctgcgtcccacagccatgcgccctcccaagccaggggctcctgcaggcagttccctcgagggtgcagggcgcagggctctgcaaggacccctggctttagaccaggattcgaccatgaagtcctcaggacctgggtgcctgccagttcggacccctgcactgccccgtcacaggcctggaacgccatgccaggtggctcgaaatgccgtcctgcagagtcaacctggactcatgcacagagggtcctgaacctgacccctgctgcccaagcccgctcctccgggacctctccagaaacctcgcccaccaccttggggggcactgggcaccctggcatgcttcccctcaggcgtctggacctgcagacccctcacccgcctaggtcctcaggtttgtgcgcagcgccgccgcctcgctgaggcctctgctggactgtcagcccgttccctgggtccgtgcagtggcctgagcccggggcccgtggcctgttacctaactgactccagcccttgaaggatgggctttggccctgcctttgtggcccaggcaggaggcggggcaggaaaagggtaattcgtttccttcctggatcccatgagctgcctgaggaccaaggaagcggcctctgtggccagcgcctggctgccgaggggtgccgagggcgggagggcgctgcaccgggggaggggcctccctcagttcccttcttcccccgcagcccctgttgtgcaaacaaggaaggagcagtgagcaactcccggcagccccgccccaggcgcctgcaaaggtgtcggggccgagcttgcagggggtggacgctgcgcaaggggctgccccaggcctgggccctgcgccccacctctgacccccgcagacccctcgcgcagcccgtgccctgccgctctgtgtccgcttacatcacgacggcaggggccggcggggcagacacacaggcctcatttgcggattggccactcccacccagggccagggccaggagcccccactggtgccccaagtggggctgggcgcaagtcccctttgggaaaggaaggctgcatgtgccgccgcaggcttcaatcctgagctggcactgcggggtctcagagctttgaagaccccttctccgcaaggctgtcaccgccctggggccgggaggtggtgggggccggagctggtccagagccgccgtcccccacctccgaggcctcctggaccccgcaaggccgcccctccaccctaaagccagtgcctgaaggccaaggctggaaggggagtcgggtcaggaggcgccccctaccccaccgccgcccagcgggcgtcgtggggacccgggggggaaggtgaagaccgggaggaggcaggaaggcgggaggtgcggggcgaaggggggaacccaaaactccaccctcgccaggagaggcccctcctcggcgcaatccccgcccgggccggagggacggctggagggcgcctgcgggttccggcttcccggctctgcgggcgggggtcggcgcgggtggtcgaggctgggcggggcccacccgggggagggggagggaaggatgctccgcccggccccgccccgccagccgcgggacgtgggggacgtgaccgcgccatgggaggagcccccgtattgcccgcagtaggcgccctactggacgctaccgtaattgccggcgcgcgggtccaccggggtcagcggagcccgggagccgcgccaggcgtcggggcctcgaagccacagggcggggccgactccacttgctgcagaggtgggaccagtgggcgcggctcgggactcgggggcgtcgactcgtgaactgcgggtctcggagcaggagcccggcggttcggttccgttgcgtgcggctgcccggcgtggcccatttcacagatgggcctgactcgggcaggtgacgctaggaggacgccctgagctctgtctgctcccgccccgcccctgccccagggcccgggcacctccaatggctctgcgccactgcccggaaggcccccgctggggcccagagtgtggcccacatttggcacctcactggagggagcggcacaggcccttctgtcccacgtggccaggtcaccccaggacccaccgctgagccagccgagcctggcataagggtcactgcaggccagtaggggggacccgtccggcctgacggctgggctgggatccatagagccctctggtagctgcccctccaaagtaaagtgccccgctccagtcagtggggtctggcctgatcgtgcaggccacatggctttctgggtggcctggatggcgggccctgcccaaggtcacatggggtcgttaccaagcctgccttgagaccaggcctccaggtgcccaccccagactctgtccacaccatggggccctgggggacagacgctgcacgtgccacggcagagcccccatgcactcaaagcctctctgggggcagacacccccccacggcctcctagcacctcctcagt

SEQ ID NO: 1244700 - DNA, 4001 bp, Homo sapiens
tgcggcccaccggccggccccactcacccgtgatgaccccagtggtgaggtagacctggatgatgctccggcaaaaggacgcagccaccatgcccagcgacgcaaagagaccccccacaagcatgacgggccggcagccaaagcggttcacgcacacactgcagagcggacctggagagggcagcagctgagaggggccgggcctgcagccagctctacccccgccagccgactgagctcacagcctggagccggcctccccttcccacaccacccctccccccgcggggcaccaggggcaccccgtgggcaggctccccgagcgcaggccatgatgacacgtgagcgccgcctgctgggccccttgggtccctgcagctcaggaacagccaccttttcaggaacggctctcaggagcctgtcctctgagacggtctataaatacagccgacccgtttggacaggggccaggatggacttcgcgccctgcctgggttggccccgtggagagcatgttgctgcccagcaggatcctggccccaagggcttccctccagggttccctggggagcaggcggaaggccctgttgctgagcccagctacacgcgcccagcaggatccgccagcagagccccggacagggggcccggtgtgaggccaccctcacctgtcccgtagagcatggccagcaggatggaggagatccaggctgtgtcgctgtagccgatcccaaactcctgtatgagctccttgaagaagacactgacggccttggggaaggcgtaggagaagccagtgatgacgaaacagccgaagagcacggcccagccccagccgccgtcaggggccttgacgcctgtggggccctcgtccaccacggcccctcccatggccaggagggttggttccgcctcacctgagagagaaagcaggctgactcaggctgcccgggtgaccatcccagctgcagcctggcaggggagggacacgagctgggtggcccggcagctcagctgaggggcagctgcccggcacccacacttgtggccccctgacctggtgtctggtggaggcaggagggtttggagggaggctagcagctgtgggtcccactccctctgcactgcctcctgcaccctcacagctggctctaaagggcagtggcttttttgggctcggccaggactcagattacctcctgggacaagcagcccccgacaggaacatcgacctggccgtcatttctgccctggctcgctctggctgacccgtgctgggcagggaccacgcacaccatgattctggcagcagacggcacctccggtccccagcactgagctcgccccaggacctctggggttggcatcctccaggtctctcccggtctaaatctaggtggagcgtgccttgctctggctctcctgcccccaagggcccactttggcttcagtggagcccaccaggagcttgcccaagaggaggcgggcagtctctggcggtgaggggctgggccccaggctggagggggcagttggaagcacaggggctgcagtattagagtgggtggggtggggaagtgggggcagagctggccccttgtccctggatgcccccttgcctcccaccggccctcttgctcagtgactcctccagtgagatcttgactcaccccacctgtgcctggagtgacccataggctgcagcctgaaatcaggaggggctagggaggctcccatccagcccacgagagcaaaccatgccagcccccacgatgtctgaagctggtgtccctttctaaactccaggagctcagctcgtttgagtcaagttggaacccgaggtcagacttccatcttcatgccccaccccacccagaagtcaccttgtcctctcctcaccagggagctgcaacctgagaccttgggtggtctagtccaaccggctcagcctctccctgctgggaccgtgctgtgaaccagcgccctgggaggcagcagcaggcctgctgtgcaagctccacgcccacccacgacgcaatctgtggggctccacccccaccccctttccttgggttcctcctgcaagcgtgtccgcagacccctgacccggtgggtcccccgtgacggctcgtctttgcctctaaggcagacatgtaactaaaggcatgcacaagggccaggacctttgctgggagagtctgagcagttccgtgcgtggctcctcactcctcctcccgggccctccccgcatccagcctgcctgcctgtccccaccacaggtgctgtgccccctggagtccctgcctcagaggtccgaggatggtttttaagggcttcctaagtgttccacgaagtcactgttactgggaaatgctgcttgacgaggggacccaggagccagctgtggctgtctggatgatgacaaggcagacacggcccactggagcagaacagacccccccacagagccagaggtccaccccccaacctgcactggctctctgggacccaggcctcggaaccatttctgggaaacccgggagcagcttttgcctctgcacctggacaccggatgcccccaccacagtgcctgggacaggacagagtgtcgcacgcctcaggacacaccaccttaggacacactgcctggggtcactgagcagcagggtaggtcccgctcatactggtattgtttaaaaggtccctaagatgacagtatacagcagggtaactacaagatattaaaaatatatgcactgaggccgggcgcggtggctcacgcctgtaatcccagcactttggggggccaaggcgggcggatcacgaggtcaggagatcgagaccatcctggctaacacggtgaaaccccgtctctactaaaaataaaaaaaattagctgggcgcagtggcaggcgcctgtagtcccagctactcgggaggctgaggcaggagaatggcgtgaacccaggaggcagagcttgcagtgagccgagatcgcgcgactgcgctccaacctgggccacagagcgagactctgtctcaaaaaaaaaataaaaaaataaaaatatatgcacttgaggaatgaaactgggaacaggacgcagactgcgggtcacaggggagactggaggggttgacggcctcagggccccagcttgtttggggttgcaagtttgcacttttaaaaataaacaggccatgcaaggccaaggaaggaaatgtgtatacaacaaacaggaatagacacattttgcataccccaggttccccctgcaaaacacaaagaggtaccaaggcctctgagtctccctggctgcaccagcgggggtgggagacgcaggcagacccagggtttgaagcccgccagggtcctcaggagacagacgagggcgtgtggggaggcaggggacagtggccaccctcaggagacgcggcgcccctgaattagtgtcaaggagggctggcagagggttggggcagtgccaggactcactgaccaggagagcacagcatgttctgagacctgaggtgcttgtggcttccacgtgacgctcatgtggggagggccatcttctgtgtcaagatgaggcatttggacaagcccccagaccacaacctggcaccatcgtctgtcctcacccagcctgtggtgccagccatgctgaaatggctccaggagttcccactccagcctggtgtccaggggctgacttggagccagctgtctgcccacatggcttggggcaagggattccacaggaggtagagtacggggaaggggcacaaaataatggcccacactccccatcttccaggataaccccggcaccgtgatgggccaaggtacagactgcccggtgttccagggacaaccctggggctgtcctgcctggagcacacgccacagccaccaagcattggcctctccgtgggcacacgccacaggctggccttcccctgacatttaccaaccccccccccgccgccccccaggaagcatg

SEQ ID NO: 1244701 - DNA, 4001 bp, Homo sapiens
accatgccgtaggagatgccaaagaagatgcagaagaccacgaggccgccgtagtcgcccgccgtagaacccgccaggtccgcgaggccgttgaagaacatggagaagctgaagaggtagacggagtagggccgcaccttcccaagccccgccacgaagcccgcggccggccgcgcgaagatgtcaatgaagcccaggatggtgagcaggaaggcggccttggtgtcgggcacgcccaggtccttggcgtagctcaccacgaacacgggcgggacgaagagccccagcaccatgaccgaggcggccacggcgtaaagcacaaagccgcggtcccggaagacgctcaggtctagcaggcgccgggagggtcgcggcggccccgagcccggctgggccgtgaccaccaggggcctcatgagtgcggcacacacgcagcagttgagcagcaggccgcccaggatgaggaagccgccccgccagccgtagcggtcctgcagcagctgccccagcgggctcagggcacacaggaagacagggctacctgctgccgccagcccgttggccatggggcgccgcttgctgaagtagcggttcagcatgatgagcgagggctggaagttgagtgccaaacccaaccctggaggaaagggaatgtggtgagagccccccaaggctgccccaaagcccgagaccctcatctctgcccccaggttcccacaggctcaggctcccagggtgcagagcccctgccacccacccactcgagagggggacaacgaggtggggccgggacaccccgcagccacccgccctgctgtcctccagaggcctggacccaggagcagaagtgcacggcccctgcccctcctggcacgtgcggcccaccggccggccccactcacccgtgatgaccccagtggtgaggtagacctggatgatgctccggcaaaaggacgcagccaccatgcccagcgacgcaaagagaccccccacaagcatgacgggccggcagccaaagcggttcacgcacacactgcagagcggacctggagagggcagcagctgagaggggccgggcctgcagccagctctacccccgccagccgactgagctcacagcctggagccggcctccccttcccacaccacccctccccccgcggggcaccaggggcaccccgtgggcaggctccccgagcgcaggccatgatgacacgtgagcgccgcctgctgggccccttgggtccctgcagctcaggaacagccaccttttcaggaacggctctcaggagcctgtcctctgagacggtctataaatacagccgacccgtttggacaggggccaggatggacttcgcgccctgcctgggttggccccgtggagagcatgttgctgcccagcaggatcctggccccaagggcttccctccagggttccctggggagcaggcggaaggccctgttgctgagcccagctacacgcgcccagcaggatccgccagcagagccccggacagggggcccggtgtgaggccaccctcacctgtcccgtagagcatggccagcaggatggaggagatccaggctgtgtcgctgtagccgatcccaaactcctgtatgagctccttgaagaagacactgacggccttggggaaggcgtaggagaagccagtgatgacgaaacagccgaagagcacggcccagccccagccgccgtcaggggccttgacgcctgtggggccctcgtccaccacggcccctcccatggccaggagggttggttccgcctcacctgagagagaaagcaggctgactcaggctgcccgggtgaccatcccagctgcagcctggcaggggagggacacgagctgggtggcccggcagctcagctgaggggcagctgcccggcacccacacttgtggccccctgacctggtgtctggtggaggcaggagggtttggagggaggctagcagctgtgggtcccactccctctgcactgcctcctgcaccctcacagctggctctaaagggcagtggcttttttgggctcggccaggactcagattacctcctgggacaagcagcccccgacaggaacatcgacctggccgtcatttctgccctggctcgctctggctgacccgtgctgggcagggaccacgcacaccatgattctggcagcagacggcacctccggtccccagcactgagctcgccccaggacctctggggttggcatcctccaggtctctcccggtctaaatctaggtggagcgtgccttgctctggctctcctgcccccaagggcccactttggcttcagtggagcccaccaggagcttgcccaagaggaggcgggcagtctctggcggtgaggggctgggccccaggctggagggggcagttggaagcacaggggctgcagtattagagtgggtggggtggggaagtgggggcagagctggccccttgtccctggatgcccccttgcctcccaccggccctcttgctcagtgactcctccagtgagatcttgactcaccccacctgtgcctggagtgacccataggctgcagcctgaaatcaggaggggctagggaggctcccatccagcccacgagagcaaaccatgccagcccccacgatgtctgaagctggtgtccctttctaaactccaggagctcagctcgtttgagtcaagttggaacccgaggtcagacttccatcttcatgccccaccccacccagaagtcaccttgtcctctcctcaccagggagctgcaacctgagaccttgggtggtctagtccaaccggctcagcctctccctgctgggaccgtgctgtgaaccagcgccctgggaggcagcagcaggcctgctgtgcaagctccacgcccacccacgacgcaatctgtggggctccacccccaccccctttccttgggttcctcctgcaagcgtgtccgcagacccctgacccggtgggtcccccgtgacggctcgtctttgcctctaaggcagacatgtaactaaaggcatgcacaagggccaggacctttgctgggagagtctgagcagttccgtgcgtggctcctcactcctcctcccgggccctccccgcatccagcctgcctgcctgtccccaccacaggtgctgtgccccctggagtccctgcctcagaggtccgaggatggtttttaagggcttcctaagtgttccacgaagtcactgttactgggaaatgctgcttgacgaggggacccaggagccagctgtggctgtctggatgatgacaaggcagacacggcccactggagcagaacagacccccccacagagccagaggtccaccccccaacctgcactggctctctgggacccaggcctcggaaccatttctgggaaacccgggagcagcttttgcctctgcacctggacaccggatgcccccaccacagtgcctgggacaggacagagtgtcgcacgcctcaggacacaccaccttaggacacactgcctggggtcactgagcagcagggtaggtcccgctcatactggtattgtttaaaaggtccctaagatgacagtatacagcagggtaactacaagatattaaaaatatatgcactgaggccgggcgcggtggctcacgcctgtaatcccagcactttggggggccaaggcgggcggatcacgaggtcaggagatcgagaccatcctggctaacacggtgaaaccccgtctctactaaaaataaaaaaaattagctgggcgcagtggcaggcgcctgtagtcccagctactcgggaggctgaggcaggagaatggcgtgaacccaggaggcagagcttgcagtgagccgagatcgcgcgactgcgctccaacctgggccacagagcgagactctgtctcaaaaaaaaaataaaaaaataaaaatatatgcacttgaggaatgaaactgggaacaggacgcagactgcgggtcacaggggagact

SEQ ID NO: 1244702 - DNA, 4001 bp, Homo sapiens
gccaggcgtcggggcctcgaagccacagggcggggccgactccacttgctgcagaggtgggaccagtgggcgcggctcgggactcgggggcgtcgactcgtgaactgcgggtctcggagcaggagcccggcggttcggttccgttgcgtgcggctgcccggcgtggcccatttcacagatgggcctgactcgggcaggtgacgctaggaggacgccctgagctctgtctgctcccgccccgcccctgccccagggcccgggcacctccaatggctctgcgccactgcccggaaggcccccgctggggcccagagtgtggcccacatttggcacctcactggagggagcggcacaggcccttctgtcccacgtggccaggtcaccccaggacccaccgctgagccagccgagcctggcataagggtcactgcaggccagtaggggggacccgtccggcctgacggctgggctgggatccatagagccctctggtagctgcccctccaaagtaaagtgccccgctccagtcagtggggtctggcctgatcgtgcaggccacatggctttctgggtggcctggatggcgggccctgcccaaggtcacatggggtcgttaccaagcctgccttgagaccaggcctccaggtgcccaccccagactctgtccacaccatggggccctgggggacagacgctgcacgtgccacggcagagcccccatgcactcaaagcctctctgggggcagacacccccccacggcctcctagcacctcctcagttccttccctccatgagggagtcgagcccagccgcctccacaccacgctggcggaatagaccctccttcagcagggtcaggccagcacccacctgacttccaggcctgtgcagtgaagctgggaccttggactccccggccccaacagacacaagacctcccacccttgtgctcagcatggacaagcccctgggccttggggtgggccaactgccatttcccgcccagcaggcctgactctggccatcaccaggagagggaccctttcagcccatgcctctgggacagagaggaggacagccgcccctcggctccccccatcgtccctcaccgactccagccacccctggaggccccggccagagctaagggcttcccttccactctgcggctcctgtctcttgactggcccaacacccagggaggctcctgaccaacccacttttcgtatagggaaactgaggcgtgggttaggaagtgggaggctaccaaaggctgcgcctggttttcccacgagctgggggccaggggtggaggtagggcgaacccagggagcccagcctggctctggagagggtcccccacttccctgcacggtctcgggctgttagtcattgcccaagggcgggtgtgggtcggggagtgttcagggtgttgcgaacaggggaaagcgccacggcccgagcgcaagtgctccccactccctcggggaggccacccatacagggagggctgcagcagccccaccaaatatagcccgcgccccccgccaccgcggaccgagctatttatacccggaccgggcttggccgccggcgcagccatctcctggcccgagcccagcccctgagggcagcccgacgggtgggcgccgggccggaccgggggagacgagactgggcagccaggtatgcgagggcgcggaggggcgcggctggctctcgggagccctcggtggggcccgctcggggtcgagaaggctagtccatgccccgggcgcccccggacctgatggacaaagtgggcggggtgggggtgagagcgcggaccccgaggtcgcccccttgcccggcacgggggagctcctgggccccggcccgcgcgcgagcatcgcggccgcgcctacctgccgccgctgggccgcctcagcccgcctctcgccgcctctcgccgcctctgcccgcctctgccggtccgctccgcgccgggggcgactttaagtgctcgggtcgctggcgcggcacgtcccccgcgcacgtcaccgcctggcgccgcccctgcgcgccccgcccggaccccgcgccgcctccggacgggctcccgggccgcagctccccgacggcgcgtcccgcaaccccgccgggcccagggacccccccaaccggaaccggccccgtcggcgcccccggcccggagctggcccgccccctctgctcctcgggactgggtcttcccggcctcgcctcccccggagtccaggctcgcttcgcccctccgccccgccgtccctccgtttccccgcctcggagcgcagcgcggcaggtcccaacgtcctccagggcagcgacccctcgccccccaacgccggggcccctttggtggggaggtgcgcgcgggtcccgtggggttccggccgcctggctcagctccggggcccacatcctccctctctgaggccacgtccgacctgtcccccttcagacctccgcttcctctccggtcccggtgcggacggcggctcttcctggctaggggagcggcccgcggcctgcgctgcctggatgtggggcacggcctcgccctccctgaacttccgtttccccaggtggctccgcgccctgcggggccctacaaagccaccgactccagccctgcgcccctgccccgcccctctcgcggcccagaacccgacgcggaggccggggcggctcccaccttcggggaggcgagggctgcccacccgctggacctcgtgaggtgcttctcccagcctgttttctctcatttgcaacatggaaataacgggccgctttgggtgctgaggtttgaggtggctccagggagtaaggcctttgttggcctggaccaaggagtctagttgtcagggccaccctgccagggccacaggaatgctttaactggcccctcccggacccgggggcttcggggaccgaggcactggtaagcccgtgccttcacacacaaaggaggcagggggtatcaatggaggacccctccagagggcaaggggaggccacccctgacagtgaggccgtgtgggccttggctctccatctgcagcccagccttgcgggacatcaggtccagtaaggccgcctgttctttctatgtaatgttacaagcccaccctcccgctggcattcacagaggctgggtctggccctcacccctacctggggcccaaccacccccatccccaaacatcaagatgagggcacgtgcctgtgagcagaacacaggcctgtggcaagtggtgagggggcctccaacttcacagatgaagactctacttagttggcccgtgctgctcccgcccagggcaggtggtgctcccgcccagggcaggtggtgctcccgcccagggcaggtggtgctcccgcccagggcaggtggtgctcccgcccagggcaggtggtgctcccatcttcctgcaccaggcgattcatcagtttctgaggagggagagcagcagaggggtgcgaggcaccgtggacagctgcgggaatgggtcccctatggggtattgcctgccggggaggcgagggtaccgtgctccccatcccagattgttgagtcaccaggcctgccagctgggcttggggcccccactgaagccaccgagacaccttccacatctgcctacagcttggccctgatccctgaaccctgaacccccaccgtagagcagcaacagggggagggagacagagccagagagcctgggacctcactgccccctcctgcctcctgaaggacaaaggggcgcccctgccagggccaggttttctcccagctgggaagacgcccagtcatccctccaggggtcccagggagcacctgtggtttggttctgacccccaggcctggccccctcttaggcatggcttcccctgggtgtgggccccaggactgtccacccagagctggggtggagcctccctgccctcagaggggaggggagcaggcaggccagtcagcact

SEQ ID NO: 1244703 - DNA, 4001 bp, Homo sapiens
ggctagagtgcagtggtacaatctcagctcactgcaatctctgcctcccgggttcaagcaattctcctgcctcagcctccgaagtagctgggattacaggcacacgccactatgcctggctaatttttgtatttttagtagagacggggtttcaccatatcggccaggtggtcttgaactcttgacctcaagtgatccgcctgcctcagcctcccaaagtgctgggattacaggtgtgagacaccgcacctggcctgttttctcaccttaatagtggtcctcacaccacactggagtggatcacccccttctttattgtcaccccccaccctgctaccccttccacactataagcaagaacctgttcatgaaccctcacccagcctctggctgagcacaaaagaggagatgaatgtgacccacctgtgttccccagggggcaggcaggcccaggaccaagggcaatgcagcttccaggcagggaggtccattccagactcaagcagggcagagaggtgatggggccagggctctggcttggcctctgccccagcagggaagtgctcttttctttgtactgggaaccatgagtcatggtcactgcctggtgtgtgctttgggcaaggaggtagacagggcaagatgcttcgctctcacttgctgggactaggggtgaggttgggccccaggggctgccaagctcagctctcaaagacccctaggcccaatgagaccagctttgtagcacagtgccatgaagctggatgtgtgggcagggagaagtttagacgatacttctggtctttctcccatctcacacaagcccagcctatgttttcagggcgcctcatctgataacaggggcctcactaggccctgggaatcctttccctgcccctggagctcgaacgcctggtcacgggagagcggatgctctcatccaggggtctcgtgttaggggcctggtgtccagagtcgagggggcctcctcttcttcttcccagctcttctcccatggtgggagagccccgggctggaaatgaggcaggccctggggacccctccctccttcccatatcaagtaggctcctgggctggagccctggacccaggcaggcagcagaagggctcccgtccagcagagagcagcaagggcaggcttgagcttggggctgaggaaccctcaaccctgtggttggcctagggaggagggaggcagccccagaggtggggtggctggggcaaatcactctctcccttccccttatccccccatattcactgcaaaaccagcaagggtttgggacaggcaactgggacctcatgccgtactctcgccctgcccatccccgcagtgctgccccggaatctggtttccactccgctgtccctccctccccggggcagagctcctccgagttggggctgctgggatcccgggctgtgtccgccctggaatttcgggccaggagtccgagcgcccttgggcttgcgggtcatcaccccaggccccggggcagcccagaaccaggacaggaagacttttctagatcctcaccgccactgagcccgcccaggcgggaggagacctggggccctggcaggaggtctgcgacagcgctagaggggactgggcgaggaggggacgcgtccgaggcagtggggcccggggggcccgctcacccgctcgcacgggcctggcggagaggtggctcagctcccccgagcgcggcgtcctgcggcccgggccggtcgcgacgaggaccgcgggactgggccaagcgccgcggccaggcagggcgggcccagggcggtgtgggcggggacccaccttccagcctccccgggattccgtcgggtggggaaggggccaggatgcgggaggggcggcgggcgtggccggggacagtccagcagcagggccgggctccggacgcaggcgccacgggatatccgtgtgtctgaaatttgcacaacccggatgccctctttctagcttctggttttcccggctcagggtctagggccccgggcttggggcggagataacatgccataaagagaccacacctcccaggaagtggggtggggaaggcgcagagcccgaggttgaggatcccttctttctgcgttttccctgcccaggagcccttccaatgaaagcctcgagctttgagggctgcgcctgccggtgggagtccaggcagtcccttgtaggggagcaggcagacccctcagccctgggagcaggtgagaggacacccaccacttctgcatgtggccctcagaactacaggcccttttcaggtttttccctcttcccctacctgggtagtccttgatgtgcattagttgaaatgtactcagttggccgggagtctcgctctgttgcccacgctggagtgcagcggcgcgacctcagctcactgcagcctccgccttctgggttcaagcaattctcctgcctcagcctcctgagtagctaggattgcaagtgcacgccacggcacccgggtaatttttgtatttttagtagagatggggtttcaccatgttggccaggctggtcttgaactcctgacctcaggtgatccacccgcctcggcttctcaaagtgctgggattacaggcatgagcaccgcacccggccttgtttatttttgatctgtggacgatggagtttcacagcctcagaccttcaccctccctcttctcactccacatggtgactccaaccacaccctgtatactcaggatccggtgccttttatgtccagtccagatattcaacctggaacctatccttgtgtgcctcaaaggcctttaaaactcaacactgaccggaacttgccattgacactgtcctctgccgccccctgctaaacctgggataccttatgtgctccatgcttgagcaaattacagcaccacatctacttaggtgcctgggccaaatcccatgagtctctttgacctttgcctctttcacaaccaatccacaacgacgtcccactcactttacccccttactgtttctcaaacctgaccatttaccctcatctccatccccacaccatccaccgccacccgttgtccagctcagacctcagattccttttcaacactgtaggtgactgatctttcggatccattaagcctgatcttgccctactgccaaccctgcttaaaaccctgcaggccttggccaggcgcggtggctcatgcctgtaatctcagcactttgggaggctgaggcgggaggggcgtctgaggtcagaagttcgagaccagcctggctaacatggtgaaactcggtctctaccaaaaatacaaaaattagccgggtgtggtggcgcatgcctgtaatcccagctacttgggagactgaggcaagagaatcacttgaacccaggaggtggaggttgcagtgagctgagatcgtgccattgcactccagcctgggtgatgagagtgaaacttggtctcaaaaaaaaaacaacaaaaaaacaaaaaactgaaaccctgcaggccttggagatgaaggtgagcccctggggtggctacagggcccttccaagcctggcgcttacccacctttctggcctcaaatcattcttcctcactcactgacctcagccactgtaaccacccagtgggttcaccttgcccgctgcctagacaaacccgatttatcaaaacgggggattgcaatagagaaagactaattcatgcagagctggctgcgtggaagacgggagttttattactactcaaatcagtctccctgagtatttggggatcagagtttttaaagataatttggtgggtaggtgctggggaagtggggagtgctgattggtcaggttggagatggactcataaggggttgaagtgaggttttcttgctgtcctctgttcctgggttggatggcagaagtggctgagtcagattaccagtctgggtggtgtcagctgatccatggagttcagagtctacaaaa

SEQ ID NO: 1244704 - DNA, 4001 bp, Homo sapiens
attgttcacaggcaggtacagatcgatctccttgttctactctttccctccttcttactaccgctcctgagtagtcttaaaagaagattcagccctagcagcatcctgggagctaacctgactcccaccccaggctgggctgcacctccttcctgttttctcgcctttttttttttttttttttttctgagatgaagtttcgctctgtctcccaggctagagtgcagtggtacaatctcagctcactgcaatctctgcctcccgggttcaagcaattctcctgcctcagcctccgaagtagctgggattacaggcacacgccactatgcctggctaatttttgtatttttagtagagacggggtttcaccatatcggccaggtggtcttgaactcttgacctcaagtgatccgcctgcctcagcctcccaaagtgctgggattacaggtgtgagacaccgcacctggcctgttttctcaccttaatagtggtcctcacaccacactggagtggatcacccccttctttattgtcaccccccaccctgctaccccttccacactataagcaagaacctgttcatgaaccctcacccagcctctggctgagcacaaaagaggagatgaatgtgacccacctgtgttccccagggggcaggcaggcccaggaccaagggcaatgcagcttccaggcagggaggtccattccagactcaagcagggcagagaggtgatggggccagggctctggcttggcctctgccccagcagggaagtgctcttttctttgtactgggaaccatgagtcatggtcactgcctggtgtgtgctttgggcaaggaggtagacagggcaagatgcttcgctctcacttgctgggactaggggtgaggttgggccccaggggctgccaagctcagctctcaaagacccctaggcccaatgagaccagctttgtagcacagtgccatgaagctggatgtgtgggcagggagaagtttagacgatacttctggtctttctcccatctcacacaagcccagcctatgttttcagggcgcctcatctgataacaggggcctcactaggccctgggaatcctttccctgcccctggagctcgaacgcctggtcacgggagagcggatgctctcatccaggggtctcgtgttaggggcctggtgtccagagtcgagggggcctcctcttcttcttcccagctcttctcccatggtgggagagccccgggctggaaatgaggcaggccctggggacccctccctccttcccatatcaagtaggctcctgggctggagccctggacccaggcaggcagcagaagggctcccgtccagcagagagcagcaagggcaggcttgagcttggggctgaggaaccctcaaccctgtggttggcctagggaggagggaggcagccccagaggtggggtggctggggcaaatcactctctcccttccccttatccccccatattcactgcaaaaccagcaagggtttgggacaggcaactgggacctcatgccgtactctcgccctgcccatccccgcagtgctgccccggaatctggtttccactccgctgtccctccctccccggggcagagctcctccgagttggggctgctgggatcccgggctgtgtccgccctggaatttcgggccaggagtccgagcgcccttgggcttgcgggtcatcaccccaggccccggggcagcccagaaccaggacaggaagacttttctagatcctcaccgccactgagcccgcccaggcgggaggagacctggggccctggcaggaggtctgcgacagcgctagaggggactgggcgaggaggggacgcgtccgaggcagtggggcccggggggcccgctcacccgctcgcacgggcctggcggagaggtggctcagctcccccgagcgcggcgtcctgcggcccgggccggtcgcgacgaggaccgcgggactgggccaagcgccgcggccaggcagggcgggcccagggcggtgtgggcggggacccaccttccagcctccccgggattccgtcgggtggggaaggggccaggatgcgggaggggcggcgggcgtggccggggacagtccagcagcagggccgggctccggacgcaggcgccacgggatatccgtgtgtctgaaatttgcacaacccggatgccctctttctagcttctggttttcccggctcagggtctagggccccgggcttggggcggagataacatgccataaagagaccacacctcccaggaagtggggtggggaaggcgcagagcccgaggttgaggatcccttctttctgcgttttccctgcccaggagcccttccaatgaaagcctcgagctttgagggctgcgcctgccggtgggagtccaggcagtcccttgtaggggagcaggcagacccctcagccctgggagcaggtgagaggacacccaccacttctgcatgtggccctcagaactacaggcccttttcaggtttttccctcttcccctacctgggtagtccttgatgtgcattagttgaaatgtactcagttggccgggagtctcgctctgttgcccacgctggagtgcagcggcgcgacctcagctcactgcagcctccgccttctgggttcaagcaattctcctgcctcagcctcctgagtagctaggattgcaagtgcacgccacggcacccgggtaatttttgtatttttagtagagatggggtttcaccatgttggccaggctggtcttgaactcctgacctcaggtgatccacccgcctcggcttctcaaagtgctgggattacaggcatgagcaccgcacccggccttgtttatttttgatctgtggacgatggagtttcacagcctcagaccttcaccctccctcttctcactccacatggtgactccaaccacaccctgtatactcaggatccggtgccttttatgtccagtccagatattcaacctggaacctatccttgtgtgcctcaaaggcctttaaaactcaacactgaccggaacttgccattgacactgtcctctgccgccccctgctaaacctgggataccttatgtgctccatgcttgagcaaattacagcaccacatctacttaggtgcctgggccaaatcccatgagtctctttgacctttgcctctttcacaaccaatccacaacgacgtcccactcactttacccccttactgtttctcaaacctgaccatttaccctcatctccatccccacaccatccaccgccacccgttgtccagctcagacctcagattccttttcaacactgtaggtgactgatctttcggatccattaagcctgatcttgccctactgccaaccctgcttaaaaccctgcaggccttggccaggcgcggtggctcatgcctgtaatctcagcactttgggaggctgaggcgggaggggcgtctgaggtcagaagttcgagaccagcctggctaacatggtgaaactcggtctctaccaaaaatacaaaaattagccgggtgtggtggcgcatgcctgtaatcccagctacttgggagactgaggcaagagaatcacttgaacccaggaggtggaggttgcagtgagctgagatcgtgccattgcactccagcctgggtgatgagagtgaaacttggtctcaaaaaaaaaacaacaaaaaaacaaaaaactgaaaccctgcaggccttggagatgaaggtgagcccctggggtggctacagggcccttccaagcctggcgcttacccacctttctggcctcaaatcattcttcctcactcactgacctcagccactgtaaccacccagtgggttcaccttgcccgctgcctagacaaacccgatttatcaaaacgggggattgcaatagagaaagactaattcatgcagagctggctgcgtggaagacgggagttttattactactcaaatcagtctccctg

SEQ ID NO: 1244705 - DNA, 4001 bp, Homo sapiens
tcccatgatgggagtgagaccctgcctctaaacaaataaataagtaggtatcttgccaaaggcttggaaatccgctatccttgggagtttcactgtgatttaatttgtcgagagaagatttggcccgagggcatgaaaaaaattgtattattgtagaccatcagagtgttattccagggtcagctaagagcaagtttcaaaacgcaggctctggatggaaatggggtggctactgttgtaggcagacctcgagcaaaagcactgcggatttctcttcttcttaaaggcgtagcccggagaacagctttgacaagttgtttctggcccaagttgtcaaaaccagtctgtatttggctaaagttcatctgcattctctatttaaaaaaaatttccaaacctaacctggatagctgcctcacgatgttgaatcactggctacaaccgagtcaccattttacaagactatggtgttgaaacctgagcccctaatttaagtgtcctcctcaggagttccactgaggaaagtcctttttcggaaaccacagaaggaaaactcagggttagtggtactcattacactggaaggagcttttccacttggctgcattgtttatttacacactgtaagttcctattttggacactcttcccttaattatgagaagaggggtttctattatatcatctggccggatgtattgttgaccccaaaaatgccacataacggtgcttgggacatggggagatgcatggtttagagatttcagcataagcacttggcatcttttttacaagcaagacacctatcttaccatgatttgcaaaaacaatcagatcactgagaaatctcattcccggggtagaaaccatctcctgcgagaaggagctggcacggagtgtctaaccgtgcaaacaaaaccggcttccaggttgacaagttgtaattgctcttccccagttggctccggggagctttttctaagactgacgccccccatgtttggtgacattttatatacgccacctaacaaacttctatgacctgtcttgctagggtggggggaataaaaagaaaagacgacaacaacctagaaggaaataacccatttcctctgcaaaaccatcttcccttgctacggaactgcttggcgacaccagcgctttcctgcggttggcagcccgggaaccttgaagttgcgcgggaccggccgtcagccgctgacagttctgacagtccaggtggaggacccgcgctctgccgggaaatccccggcttcccgctggggacaaacggtggccgccgcagggagtgctgtgtttgggggtcgggggaggcagggagccccactttccctcgcgctgcctcagtgcccggcctgcgtgcgcgcgccagcctggggtaggaaggtacctctgacatttcgctcctgcgacgcgcaggcaacttcatgcggaaaatccgcggaggggctgagcctggagcccccgactcttccgacgtcccggagcccccaacccggggcagggggcactcaaaggccaggcgtgcctttaggtatcttccgggacccaactgtaccagggtcacggacattcaactctcagctacccacaccggcgcgagcgcgtcatcccggtggccctgggcattcctaactgtcagagcgaatatttttgggaataacctctccaaaatgtgaagatgttcagtggtctcctccgcctcccatcacaaaaaaaggccccaacacatattttttaaaaaacaacccacatcccacaatcaaacttttaaacatgtaaaataataaaccaactcaccaagttagaagggaagagaataaacccccaaaggctcccaataaggcggaggcttggcctccccctccttataagccgctcggtaacatgagaaaaggattaaccccttagggggcgggcccgactctagcgcaagttggctcgggctggtgaggcccgagcgcccgggccctccacccactcccgcgactcgggcacccgagccacaccctccccccgccccccaccccggccgcctgcgacccgggccgtgcgtgctgccgcccgcgccccggccccgcgtcgctgcctagctcttatcctataccggctgcagccggtctccgccggcctcgggggcgcgccgccgccgaccatgtgctgcgagcgctgagcgcagccaaggagggggcctgcctggcgcgcgcgcgccgtcccacgtggacctgagccgcgccggtcgcgcgcccgccagcctgccgcctgggctgggggtcacgaaaggtaaccgcgtcgcggtccggggccgggccgcccccgccagcgccgccggggtccttggcacaacgccccgatctcccaacccgggtgcgcctctgcgcgcgtgacccgcccagaccccggagctttgctgcaacgctagtaggagcgcgagcgtgcagggtgttgggggtgcctgcatcctgtctcggagcacctcggccaggcgcgagcgcgcgggtccccgtccccacccccgggcgccttcccggcgcgcccaccgcccagtcccgcccgcgccctgaggatttagggatttagcggcgagggggaacacgcgcgcgccggggctgatcccgcgcggcgctcgcggctgcggcggcttcgcgcccgccccgggcagaacaggttccttccagtttgggtgtgagctgcgcgcgcggcgcctgagttcctcctgcagcgcccacttcccccagtttcgtcaactcgcgcacccccacagttccccttccggcagtggggagggagtgtcgcagtgggccccagggagcgagcggccgggccgctgcgggtgccttgcttcccccactttgctgcaccggcagcagcggcagcaacagcatccgcgttgcgcgaaaggaatgtgagcagccgggctgagtcagcatccccggcccggggcgcgcgcgcaccctccaggcagtggcggcgtcggcacaggtgcatggctcccatacccgcggggagccctctgtaagggacctggaggtttagacagtccgtgcccctcatcccgtagtccccgaccccaaggtcaccgtgaactaagcggatgatgcacgcgaaatctcaggagctcctcatggggacaaagcatgtgtcagatcctagacatttcagagcctgcgggggcgcaaacttagcttcttggtctctacctcacatcccgagggcaaatttggaaactgctcggaagcaaaggccatgttatttgcattcgtatgcagactttggcgccggctgctgccttcattggggttcggagaatgtggttctgatgtcagaaactcaagagagcctagtttgggagtgcatgcacggagggtcgccaccgggaggagtcggcgatctgaattttaataaaaatccttccttgctcgctgagttctctcaccattttgggataggctctcctgagttaaatgccatcctttgccgttgacaagttctggttgtgtaagtggggagaagattcgttggtacagggtgccttgtatggccagtagtgtacagccaaggggccgctgagcagctttgcaaccttgtaggcgtaatttaacctcgtagagcgttaatttctccagatctgtaaaatggggatggaggtggtattcccagaattggagggtttaatttatggtacttgtaaagtgcggatcgcagtgactggcatttggtaaggcctcagtacccattagctcttgctgctgttacgatttatgctttaccaaggccaattaattgctgactccaacacactccctgtgagagagagcccttttttgagttgttcttcaaaggatccatatataatgatatttagaaactgatttgaacacttcatgctaatgcagggctgcctgtaagataatctttgatatttaggatcttacactttaatacttaggacctgttactgtactctatatggaaatatc

SEQ ID NO: 1244706 - DNA, 4001 bp, Homo sapiens
ggcccaggatcccagctcctgggtcccacccccagcactgaccccaaagaagtccttccgccgctcagtgtgacctgcacgtgcgcggccccgtaacgcacgcccaggggtcggcaaagatgggtggggacagagaggggcctcccattgtgcgagcccagcagaacagagggactgggccacacaggtagcagcccccgtcccggccagatgcgacggtagggactgtagggacatgggacaaagtgctcaagaagctttaaaagatctttccgacggccaggcagagaggcctggtgagcagtcctcaggagcacaccctgaccacagcgccatatgctgccagcagctggctcctcccgccctcccaggccagagggcagtcccgcctcccccaggcggtgttctgcagccagagagcgcctggttggggagggccaaggggcagtggggctcagaccccggacaagggacagcagcacgcaggtcccgccttcaacacccagatgaacgtgggagaggccctgggggaggggcacctgtgcggcgcccaggaggaaaggaagagcccgatgccaaggaggggctcgcttcttctgcccatgccagcgccttcctgtcgctgtggctgcatctcactggccgtggctgcctgtggcctgggagctctgaaggcctctcccaggaccagtgaggtctcaggtgccccaagacgcccacatctgctcacctggccttcacgcagcgaccagcattgttgctcattagtaaagccagtcccctcaaaggctgctggaatacaagtcccctggacaggctgctaaaataaaggtcccctagacaggcggctgcccagtgaccacagccaggttcacagggcagggcctgctgggcagactgtgcaaagcctcaggccctttcttctttgttctctgtggcaagacacggtcagaaaacaacgccccttggctgtccctgggaaacaaggagagctctgtcttattttgccccataagcattaaaaaaaaaaaaaaagtaaaaaaacggtggctgcttctcgtgctgagaaacgcccgctttcatagggccaggaccacacgcgtgcagggtctcctggcatctctcctgggggtgtgctggtcctaacatcgcttccagtgcccacgcagctctccgaaggaagcagcccaaagccggggcatcgggtcaccccacttgcccagggacacgtccggcggtgtgctaaacacccctgggtggggggcggcttggcccacaccctgggtatgctacagccagcacgtctctagatgccaacacctgtgcacctcacagaactccccccacaacttctaactaggcggaaggagcgttcttgaatgtatgggggtgggtggctcagagaggccaagtgactcccccaaggtcaccaggtattaaagtgtagagctggggctggatcgccacctgccgagaactgggaagccggctgggaagctggggagcgcggctgcgccctgcaggcctcgagctcggcggccaccactggagggccacccgggatcggccatccgggcgtcgggggcctcctcgcgctctccaggagggagccccgggcgcggcgatccccgggtgcgtggggccgggctgctgcctttgcaggcgtctcggcggcgccagggtcccatccgccccgcgtcccgggccccggcctcaccttgagcaggtccagcgggtgcgtgcagcaggcggccccgcaggaggccagccccccgaagtaccagcgcgacacgcgcgcctcggctgccatggcccaggagagcccaatcccggcccgaccacaacccgaccccggccctaccccggcgtgtaccggccgcagcgccccgcgccccgcgccccgcgcccggttcaaagcgccgcccgcgcgcccgcaccccgcacagccaatgcgcgcgcgcgccccgggggcgggaccgctaggccacgccccctgcgattgaggcgggcccggcgccttaaagcggccgcgaggggcgccgagcgcggtgggcccggcctgcggacgcgcgggtgctccggggctgctgcgtggccgcctccactcccccgggcccctggcgtcctcccttctccaggccggagcgcagggccgaaggccaccgcccggggaccggccccaggcacatgggaccgcggcgggcgccctgccaatccccaggaggcccggcccctggccctgaacctgcacccggtggccaccccgccgcgcaggcgctggctcgtgagtcacctggcgggggccacgtgtgtgcggcgtgggccctgcgtccacaggtctgcaacccctgcccccaccgagggctcagccccggcccagctgcaagagaacagaaaaccggcttcgggagccgggcgcggtggctcacgcctgtaatcccagttactcaggaagctgaggcagtagaatcgcttgaatccgggaggcagaggttgcagtgagctgagatcgcgccactgcactccagcctgggcgacagagcgagactccatctcaaaaaaaaaaaaaaaaaaaagaaaaagaaaagaaaaaaagaacctgcttggggccagactgaatgaaaactgggaaaaaaggcggttaggaaggacttgcctctcccttcccacacacagatgcccggaagctcctgctcagttctggtctggctctgaccagacgccccaggcaaccaccctggaagtggggccccggggtggattctggggctcttgttcccaggagatgcctgcctgcatctgggcccctgcttggattccacttccctgcgaagaacaaggaggcgctggtgtgttcctggcccaggtgcacctgctgggcaaaatgaaatttaagtccccaaggctgctttagggctgggccacagggatgaagacctgcagctccagcttggtcactgctgtccggcctcccccaccctccagggcgaagggtgaggagcaccggaaaaacaactcgtggtccctggaacccctcaagcaccagaatgtgtccagccctgcctctgcgcatccagcgatgccctggctgtgtcggaagcgcaagacgcacacttaggattttcagcttggctgtgggtttattgggccgtaaccccaacgtaggcaggtagccaactggaggagactgttttctagacccttaggtggcctctgaccccagaagtcatcagcggaagatttgggctggggagtgagcagctaaccagaggcggtacccctgcccggaagtgtgtcctggaccttggtttggttgggtccctcaggtgttgcccacacagaccgtaactacctggcaatcgagaagggtgccagatggacactgggggtgaaaacacagccacgcctggtggggaagcgggtggaggtgctcaggaggcaaccaggagagtgcagtgcagcactgcccgcaccaagcctgggctggggctcaacaggaagcgtggagatggcgcaaatgcaccgcagggactcagagggatcacgctgggcttaaaaggcccagagcaaacagactcaaccgttaggaagcaggggaagtggcccgatcttaacggaaatttcccagcaagaggacaggcttccttgtccggggccatccaggctcacacctgactgagtcccgcagacttggctgtgcccacagcgcctgtctcactcagtgtaaaccgagatgagttgcatccatcggctcccgattaccaagaatcaagaggcgatggatggaaaccttgggggaagcagggcctggagggccagtgtcccctgagtctgtgagacactccaggaaggaggggggcgggcctgggctgcaacctgtccctccgaaggccacctgcaagacagggctgaaactggctgctggcagagaccccccaacccacagaacactggctccctgctgaaggaagaactgctccaaagcagaaagagcagggccc

SEQ ID NO: 1244707 - DNA, 4001 bp, Homo sapiens
gtccacaggcatggaggcagcagtggtgacaagaccgctgatcatgctggcacagaagtggcacaagatgttgtcagagaagtagcctgggggaggtgaggcgggggtggcagtcagctcagaggtggctcaggccaggctgggaactaagggcccagctctggatctcacctgagtccagtaagaactgcttggattgggagtaggaggcgagctgggcagcattgacgacgacggcccgagccatggtagggatgcagccctggagggaggggagcggggaagagtcagaaacccctaaaaccagacctcacagcccccaagtctccagcccctccactcacccgccacagtgtgaggacaccctcttcccgggtgattcgaatcagggcgttaaacacatttttgtagccacggcgctggtcagctggaagcctggtgggaaggcagaaagaggtcaagatcaggattgcccacaggtgcaaagaaaggaaggccagaacaggtaaacactctgctccagatccgggataaaaaactggtcctttcattctagattcgagggaatggggctggggttaggttcagacttggaactcaccggccatcggcagtcatgcggataagagccacttcggctggtgttcccacaaaggcaccagtggcacctgcggtcatgccaatcacagccttcagcagaaagccagggggagtaccatcagccccagtcaggcgctcaaacagcacggtatagatgccaaggcgggtagtggtgtaggtggcctgacgcagcaggccagccgacagcctgaggagcagaggggtcagcatatcaggccaaggtctagagctgccaacccacagtctaccctccatcctgaggccccaatacccagtgtaaatgcccctcaggccttctgccttcaggatactggtgagggcatggaagctggttttgtactctcgagtcttggccccttccccgctcaactgcatccggttcttcaccaggtccaggggctggacaaaaactgtagctcccatcctgggggaagacagaggtggagtgaagggccaggcattccagatctaccagtgcccactggagcctggcagcaagaggttacaaaggtcagggcctgccatgcgattcaagaatcaggatgctggtgagcatgtgtataagagtctatatgtacaccaagtgcaacgggtctgaaaagtctagttgtccagtaggggccatgcaatgaaagtgctccaagcagcttcatgacagtcaagcagtgacctggggctgcacgcagtccgacacagggaggggaggaaggggcatccaagatttaggactccaggtagtcctgcaggagccatttaatggcctggaaccccctgccgcccggccgagcttagcaatgcgctgggaaactcagctggcccggcgggggttgtgcaacgaccctgcatgcagtccataagggtcctgcaatggggccctagcagcccatcggggaactcgcaatacgctggagatcgcgctgaccccgtgccggcacagttcactgcaacagacccagagatgaaccgggcccggttccttttgcccttcccttcctcctcttttcccatccctggggcctgagcttacccggccaggcccccaaacaggaacttgacggacttaggggaggtacggggcttcccgtctatcccgccggccccggcactcgccgtcgccgccatcgccactcaatggccctcggctccgggtcccgtgcgcgcgcggccccgctcgcgcccaaggtgacaccgcgcgcgcaacagagcgagggcgcgcgcacgcccctccagctctcaggtccgacacccgctggaagccggcgcgggcgcaggcgcgcagcgcaaaggcggccgggagtaaggcggagctgaaggaggagcttgatggaagcgtgcgagaaggggcgtaactgatttggaaaccagaggaaaggcgctgttttcaccgaattagaatcgcgggaaaatagagaagagtttgtttgaaggtctcgcgagatcgagtgagtacggctcgccaagttggagcgctctcgcgatagacacagcaactattcagctgcgaggggacgggagaggtggtgagcactctcgcgagatttgaaggagcggcggaggccagagggaggagaggtttgtaaactaggaggctccgggtttccgggcacttttattaggtcgtcttctgggccaccagtgccccttccatctccacaggcagtccctccatcgctaacctttttttaaccggccttttaggaccggaagtccttcatctcaagcatccaatgctgaaagcggcctgattttctctaccggaagcccttttccagaggctgggaacacggcccacctagcaggaagtcccacctccttgagctccgccacccttcccgaagtttttctgtcacctgtgttaggctccgtcccctttccgcgttttatccccgtaccagaaaaggatacatttagtgcctcccacccagctccactaaacgggttggatatctcattctttgagttggtgttccttccccggcgcccccatgtagctgggaagtgggacctgggggtggttggacccctgggatcctaaaggaggggcagggagggcgcagaactccgcttctgctccttgctaccaggacgcgcggcctcctcagcctctttcctcccgctgccatgcaccctgcagccttcccgcttcctgtggttgtggccgctgtgctgtggggagcggccccgacccgggggctcattcgagcggtgagtctgagggacggatggggaaagggcgctgaaaggaagggttgcaggctgaaggggaacatcgccttttttgtccgcagacctcggaccacaatgccagcatggactttgcagaccttccagctctgtttggggctaccttgagccaggagggcctccaggtgattttctttcttttcttttcctccttccctcccttccttccttttctgtcttttttctttttttagtatttcgcaagatcctccatcctaggctggggttggggaggtttgtcctgggtgaaactggaggtaggaaaatgaagttaggaactgagcacgtctagtgtagaacccagaatctagagggagaagacagagtgtccacccctggaactccgaggttatcagggagactgaaagtggacgaagacagaaggcaggatcaacggtccttatcaggaaggtctcaggtgctagttattgcttatatgactttgggcaagttaatctctctgagccttagtttgttttactgtaaaatgggatattagaagttttcctagggttattgtgaagatcaaagtagatacgcaattttggtagtatttcatcccaaagactgccacatagcaagaactcagttgggccttagtagcagtcgagttgtttgtgagatgggtaattagaaaattgaagaggccgggcgcggtggctcacatctgtaatcccagttcaagaccagcctggccaacatggagaaaccctatctctactaaaatggcaaaaattagctgggcgtgatggtgcacgcatgtagtcccaactacttgggaggctgaggcaggagaatcacttgaaaccggaaggtggaggttgcagtgagccgagatcgcgccactgcactccagcctgggtgacaaaacgagactccatctcaaaaaaaagaaaaacaaaaagaaaactgaagggaggggagtgtgtctgtatgagtatgtgctggagaggggactgtgaaacagaacttgagagaaagtgacatgggtggtttgagaattgaattacaattggaatattagaaggcaaaaataattgcattagcttgcagtatagggtacagattagcccatctgggacagcgagagggatgatgggagagtttggtgaagggatgttttatgtcattgcctt

SEQ ID NO: 1244708 - DNA, 4001 bp, Homo sapiens
ctgactagaatgtaagcccgtggaaacacgaccttggtctcatttgttcactcgtaaatttccggttcctggaatagagcccatcatggtaagtgcttaataatatttgagaatcgaatgaacaggcttgataggcaattgttggtcccagagatcaactggttttccaagacatctggcaactttatagcaaactcctgctcactgagtgagcccactcaagtgtaacgctgagggactgaaggacgtgcagggctggagaacagggattgggattctttaacaatcccccactgtccaaaggaagagccctgaggccctgagccccttcacctttccctttcccctcctgcacacacctcagaccaccccggcacagtggggccatgctacgctagcaaatgatgctcctggccaggcaccgtggctcacgcctgtaatcccagcactttgggaggccgaggcgggtggatcgcctgaggtcaggagttcaagaccagtctggccaacatggtgaaaccctgtctctaataaaaatacaaaaattatctgggtgtcgtggtgggcgcctgtaatcccagttacttgggaggctgaggagggagaatcacgtgagcctgggaggcagaggttgcagtgagctgaaatcacgccattgcactccagcctgggctacagagtgagactccgtctcaaaaacaaaaaaacaaaacaaaacaaaaaagaaaatgacgctcctgggctcccctgactcagacctactgacctcttcagcctcactctggaccactcttccccttccctcatttaaccagagtggtctgactgcttctgcccagttcctggaaaactcggggagcactcctatcaattgccttgcctctactcctccagttccctacgtctgaaatacagccccactctcagcccctactcactttttcaaggctagctcctctcatccaccagagctcagctaaaaagcatcccttccaggagatgtacttttttccttttttgtaaaaacaaaaaacaaaaacagtaatacctacatacggtctgtagagttgtacaaagcatagaaagaagtctgtaaccacacacatcaacaggtagttggtaactgatcacagggagaagggctgagaagggaaaaaggaaggtagacctgtcgataattctatactgtttgaatttgttatggcaaaaaaaaaaaaaaaaaatccctaaaactagccttcagaattaccctagttcttgaatacttgtagtagtgggggtgggggtgggggaggaggggagatactacctacaggatggcagcctccaccccagacatcaattccttttctcctctcacccaccctggaactcctccccaggcgcccatgaggaagtttaaacacgcggcaagcgactgagaggcaaaacctctccaggggttacccagggaccgctcaggtcacactgagcagcgtgtttcccgcccatctgggcagaaaggaggagcaagcccgagtggcaggtgtcctggatcgctgtcaggagaccggagcataccaggctcttcctggtgttcgggtgcccatgtgcccaagggctcagctgagcaaatctgcagaggtccccgtgtgggtacctaggtgtccacgtgtgcctcggggtgtgttttttctccttgagtccgaggggacgccctggagctcaggtgctcaagggcgtgcgcggggctcggccgccggtgtccctggagatgcttctctggtctggtgtgacacgtgtgtacacagtccccgccctctcgtgagcgcccgggtgcgtgtgctccctcccgaccaccctgaggagcgagggtgctggtccccgagagggcggcgagaaggacggaggtagaggttactcacacggctcggcgggtgcggcccggctcagcgctctccgctctctctagctcctcgcgcagtcttaacagcaaaactctactgagctcggacgaaactggcgggctcctgggccaatcaccgtgcagctccccgccagacgctggaccaatggttgtgcgcttgaggtctggcaaccgcctcccgcaagatatcaccgggtaatgtagtccttcgcgaccaagggcaggacagctggacggcgcacagcttcctgggagatgtagtccggctgctcgcgggcgcgcgagttcgaccgacgcgttagaaggaggtgccttgcgaagccgggctgcgaccttaggggtcgccgtgctctggcgtgtgactcgaaagtcagcctgcaggcggggtccaaggttagggcgcggtagacttgacccgctttcctcaaactctgttaatgccagaacccggataatctcaacttggtaaagatggcaggaagcctagcaaaaagctggaggacgtcgggaagagaatagatgagaacagtcccctcggggacggggaaggcaaaaacacgagtgtccccccctctcaccccgagttttagtatttctcattataaaagtaatattaaaagtatatagacagaaaatatagaaaggaaggaggaaatgactcatcctaccgcccgcacacaactagcgtcacggttttgcgcgacagtattgcctcctgactttttaattgcatttttatattcgtgttatcattttgacgcacaattttaagacatttttattgtagaaaatttcaagatacacagaagtggaataacccgatgaagccgcgtagagtcgctctccgacctcagcagttacgcgactcatggggcaatcttgtttcctctatttctgcacctacctcgcacgcgctgcccagcgttattctgaagtaaataccatcacgtgttttcaccagtaaatatttcagtatgtgtctttaaaggacaagcattccctttttaatacgtatacattatgcttcacacacacacaaaactgtcactccgaccccccaaaaaaacttttaatatcaaatatgaattagtgtttacacttttctgaaagaaagaaatgttcttctttttttttttttttttttttttttttttttttttttttttttgagacagttttgctcttgtcgcccaggctggagtgcaatggtgctatttcagctcactgcaacctttgcctctggggttcacacgattctcctgcctcagcctcccgagtagctgggattacacgcgtgcaccactatgcccagctaattttttgtatctttagtagagatggggttttgccatgttggtcagtctggtctcaaactttttttttttttttgagacaagagtctcactctgtcacccaggctggaatgcagtggcacgatctcggctcggtgcaacctccacctcccgggttcaggtgattctcctgcttcagcctcctgagtagctgggactacaggcctgcaccaccatacccagctaatttttgtagttttagtagaaacggggtttcaccatgttggccaggctagttttgaactcctgacctcaagtgatccacccagctcggcctcccaaggttctgggattacaggtgtgagccaccgtgcctggctgaaatgtccttcttaaaacaagttgtttgcttttctttcttttttttttgagacggagtctagctctgtcccccaggctggagtgcagtggcgcgatcttggctcactgcaagctccgcctcccgggttcacgccattctcctgcctcagcctctccaagtagctgggactacaggcgcccgccaccacgcccggctaattttttgtatttttagtagagatggggtttcaccgtggtctcgatctcctgacctcgtgatctgcccgcctcggcctcccaaagtgctgggattacaagcgtcagccaccatacccagccacaagtttgcttttctaagtgacagagctcagaaaacaaacaaaaatgtttgtctgaattgagatcttggttgggtgcagtggctcacacctgtaatcccagca

SEQ ID NO: 1244709 - DNA, 4001 bp, Homo sapiens
gagtggttggagaatggcaatatttcctaaggctgttcatgttaggcaagacctggtgtcccgcctctcatgctagctcccattcccagactggatctccagccaccacttctatcaggctccccatcagactctgggcaaaacttgctctctagcccccaacccccacagaggtatcgagctgactttggggagaccactgtccctgaaactcacaccttgaaatgagaccagactgcctctgctacaggacatactacttccccgtctcttttgctcttgggagcactaagcagggcctagtcctagcaataaacagctgtgtgaccttgagtgggtcacttcccctttctgggcctcaggctcttgacccttcacctataccagataactcaaaggggcagatgttgagattgttaattctgtgatgcccagggccttcctgatccctagactctctgacgtatgttaaattccttatcctccccttcacaaatccaacctcaatatcaacacataataataaaaacaaatgctaccaaatgcttactgtctgccaggattcgcactaatgctttcatgtctaccgcatttgtctccctcgatcctcccaataatcacacagaaagggcactataattatcaccattttacagatgtggcaactgaagctcaacaactagtaattttctttcttttctttttttttttttttttgagacggagtctctctctctggcccaggctggagtgcagtggccggatctcagctcactgcaagctccgcctcctgggtttaggccattctcctgcctcagcctccggagtagctgggactacaggcgcccaccaccacgcccggctaattttttgtatttttagtagagacggggtttcaccgtgttagccaggatggtctccatctcctgacctcgtgatccgcccgcctcggcctcccaaagtgctgggattactggcgtgagccaccgcgcccggccaacaactagtaattttcaaagccaggattttagttccagaaagtctgattccaaagcccataatcttttttttttttttttgtgagacgtagccttgctctgtggcccaggctggagtgcagtgaccggatctcggctcactgcaagctccgcctcccgggttcatgccattctcctgcctcagcctcccgagtagctgggactacaggcgcccaccaccgcacccggctaattttttgtatttttagtagagacggggtttcactgtgttagccaggatggtctccatctcctgacctcgtgatccgcccgccttggcctcccaaagtgctgggattacaggtgtgaaccactgcacccggccccaaagcccataatcttaatcaatacattcaatcgtgtccatcagatgggtgtgtatagggcagatcagaagactccgaagcctaccagcactttcctgatgcctttccctgcttgcagtggggcagcactctgccacctatgcccttgggaaagaacagctcctatcctacaacgaggatctgccctgaaggtcccaggcaagagccctcttcttaccatgtagatggggctccccaagtaggctcccatgaccccagccatggccccagctgctgcgctgcgggcaggactgtgggtgccttcggctgtgtgcaggtagcccccagcctcagccagcccataggtgcccagtcggatgccattcatcaggaactggtacaagagggcgggggccaggcctttctgcagggcagcaaggccatccaccttgccgatggtgatgaaggcatggaagacatttcggtagtgccgctggtatgtgccaggggcctgcagttctccttgcaactgcatcctggtcttcaccacctccaggggattggtgaatacacaggccccgcaggctgccaggccactcatcaagaagtccatggtgggatagctgtagcaggaactgacccaagagtaagaaagtaaaaatgggtgtcagaaagcggggttggaagacagggggaaggcctgtttcagcagtacaggttgcagaagataagaatttagatttgcagtcaagggtgtcagggtcaaatgtcaagtggtcaaacgtcagctggaatttgggagtcaagagctggcaagcagggaagagatagaaatctaggagattctggtgagaagcttaaggcaggaccctctgaggtcaaggaggggcaaaagacagaaggttgcaggtgggatggctcaggatggcgggcgacgggagcacgggagtagaggagggaatcgcggggttgggagatggaagccagggaggcaggaagaagaaagccagcaagtgagagaagaaaaggatccgggagaagagccggtgatttcctcgagccagcaacgagatctcgatccgagaaagaagtcaggactctggccaggaatgagcgtccctgagcgtccccaggcagccaccggagctcgcagtagcttcaaccccgggtagcctgcggaggccgggccgccacactcctgccactggagcgcggggccaatggggagccttcaagagccacaaccgaggccctcagccaatcagcgccgagccggctccgcggccaaagggaggagctctcggcgctcctgtccccggaatcacccggaggcggttggaattaactgtccaggctccgccaccagcgctcggccgccgactccggctccggaagggaggcccgggacgcggcggttttgttattggcagggaagagacctgggttcccgatcgaacacagaggccgagcgcagcagtcccccactggggtgctgggaccgcccctcgggtgggcggacggctttagcttcctaccccgggttgtgaccgggtggggtcacataagttcaggtccacgccctgctcggtgccggcgccaggagagccaggaagacgcggcccggcttgcggggggtagagggacacacttgcgctgcgggaccagtctcctgaggctgcacgggttggtgcttggttaattaaatccttagtccttaggctctttatttttattttttattttttttgagacggagtctcgctctgtcgcccaggctggagtgcagtggcgcgatcttagctcactgagagctccgcctcccgggttcacgccattctcctgcctcagcctcccaagtagctgggactacaggtgcccgccaccacgcccggcttattttttgtatttttaatagagaccaccgtgttagccaggatggtctcgatctcctgacctcgtgatccacccgcctcagcctcccaaagtgctgggattacaggcgtgagccaccatccctggcctggagttctttcatatgagatatttgtctctactcctccattatttattcaaccatttatttaatcagtatggactcatggacatttatactttgggttataatccaatatacttcatatttattttctagctaatttcgttctagctttggcctttgagagctgtttccgttggctcctgtgtctctttagcatacccccatccatttttttttgcacacaaaagtttttagtttataaatcttgtgaaaaatccacagtggccacagatgttactgtagcatctttactcctttggctttttgccacaccaacactgtcctttgcagtccccctttcttcattctggtcttgtgttcctttcattgctttcttgagttcttttcttctcatccaggccatgtcttggaagtcagcatttgggtttatttttctttgcataatccagtgaatcataaatcatgccaaagccagttgtcttgccaccaccaaaatgagttctgaatccaaatacaaagatgaggccaggcgtggtggctcacgcctgtaatcccagcactttgggaggcagaggcaggcagatcacatgaggtcaggagtttgagaccagcctggccaacattgtgaaaccctgtctc

SEQ ID NO: 1244710 - DNA, 4001 bp, Homo sapiens
gctctaaaatacaaggcagcccctcaagtcaggagagcccccacccgccctagggaccccatctctgggagatctttttattttattttttgagatggagtcttgctctgtcgcccaccctggagcatagtggcacaatctcagctcactgcaacctccaccttcccggttcaagcgattctcctgcctcagcctcccaggtagctgggactacaggcgcatgccaccaagcccggctaatttttgtagttttagtagtgagagagtttcaccacgttggccaggctggccttgaactcctgatctcaggtgatccacccacctcagcctcccaaagcgctgggattacaggtatgagaaaccacggccagcctctgggagatctttcttttgcccaggcaccacccctcactagttccaggtcaggtactcaccgctggccatggagggccgctgagactgcaggcgaaccttcaccacgtccaggggtgtcactgggggaggaagcgggtctgaaggctcctttcaggaccccacccctaggactcctcccccaggaccacacagcctccaatctccggtctgccccatccccacccgcccccaccccacctcccctaggtcttactgaagagagaggtaaccacagccccggtgcctgaggccaccatttgctggagggggctgatgcccgcagggtcctggtcagccatcttgaagcttcagtcctgaaaaccaaacctcaaacagaccacaactccagggatggcaggaaaggaggctgggccactgtgagacttttgttttgagacggcgtctcgctctgcgcactgttgccaggctggagtgcagtggcaccatcttggctcactgcaacatccacccccgttcaagcggttctcttgcttcagcctcccaagtagctgggactacaggcgcgcaccaccacgcctagttaatttttgcatttttagtagagacagggtttcaccatgttggccaagatgatctcgatctcctgacctcgtgatccgcccgcctcagcctcccaaagcactgggattacaggcgtgagccaccgcacccggcccactgtgagactttaacccaaccctcatccaccgccctcgaaacatctgttgcctcaacaaccctggcaatgacctctaaagcagggactgtccgcccccctccgccggggaaaactaaggctcggggagacgaggtggcctgcccaaggtcactcaggagtggttccgaaggaagctagggtgccagacctatcgctcgaatgcagtaggagccagggtccttccctcgtccacctcgcacgtgtccactgcgcacctcctacgtgcaggcgcggatttggccctcgtggccccaaaatcagagtacctgtgctgcccccacagcccccactccagcaccaaggccccgggcaggcacctgagagcccaagttactgggcgtggagggacggccgggcatcgagggtgacgtgtaaacagatccggtgaccaagaagggcccgtcgcctcctcaggactgcgggctgggatgcccggccctccccgcccggccggacgggccagacccggggcccggagagaaagagcagtctctgggttcccgccccaaaatgcaggcccggggcgcagccgggagagcgggaagtaggaacgtaggaccaggacgtctccccgaccctcggcgacactcccggccccgaacggcggagagccgccaggtgagggggaccacgccagctcgacggccccagcacctgccctggctcgcacggccgcccggagacccccgcttccgtctccgcccccagccccggcccagtgccgcctacctggctctaggctggtgctcgtgcggcgcggcgcccagggtcaggcgggcccataccggctccgccgcctgtgcgcggtccgcgcgcgctcgcagcgcacctaggccgacgccgaaagcagccaagggggccccgcccctacaccgcgccacgaggccccgcccgccgcgggccgaccagccgcaagcccggagtgtccccggctccgcccactcgcgtctccgcccggacctgcgacggtcccgcccccttgacggggccgcgcgggcgagttccatgcctgtccagcgctgagagctgccggccaacttcgcggtctccacgtcgcgcttaacgtggcagcagcacgcacttccagcatctttttttagacagcatctttttcagcctcgctctgtcgccgaggctggagggcagtggcgcgatctaggctcactgcagccttgacctcccgggttcaagcgatcctcctgcctcagcctccggagtagctgggaccacaggcgcgcgccgccacgcccggctggtttgttacttttatttttgtctccctattttgcccaggctagtctggaactcctgggctcaagcgatccgcccacctcggtcttcgaaagtgctgggattccaggcgtgagccgccgcgccggccttaacagcgcattttcaccagccccgccccggccgcgcgcggcactggaaaccccagcgccttctggacggcgagggtgacgcactggccctcttcctcggtgtcctcaggtgcgtggcggcggcagtgagaatgagttcttcgagatcgccgggagaccacacaataacgacgaagttacttgccgggctacccgccgagacttgaaaacttcgcggcgacttctctcgccggccttagcatcgcccccatttttcaggttacaggacaggcctgcaactgcaaaacgctttgtaaaccacagggccccgcgcgggtgtgcgccactgggttagctgagctgcagcccgggccgggcgggctgggacgtgagcaagccgggggagacgggagagccatggggagccagatcccaccttcgcgtgaccttgggcaaatcacaacctcgcctaaggcccggaatgactctgcgcggagaggaagagcactgagtgcgggagggcatcgacgttttggtgttggttgctctcgtatcgtgatttcttctgagtctcaaaactctttgcagtaggttattgttgaaatagattaccacaggccgggcgcggtggctcacgcctgtaatccagcactttaggaggccgaggcgggcggatcacttgaagtcaggagttcgagaccagcctggccaacatggtgaaaccccgtctctactaaaaatacaaaagtagccgggcatgatggctggcgcctgtaatcccagctactcgggaggctgaggcaggagaatcgcttgaacccggccggcggaggttgcagtgagccgagatcgcaccactgcattccagcctgggcaacagagtaacactccgtctcaaaaaaaaaggccgggcgcagtggcttacgcctgtaatcccagcctttttggaggccgaggcgggcggatcaccagaggtcaggagttcgagagcagcctgaccaacatggtgaaacctcgtctctactaaaaatacaaaaaattagccgggcgtggtggcgcatgccagtaatcccagccactcgagaggctgaggcaggagaatcgcttaaacccggaaggcggaggttgcggtgagccgagactgcgccattgcactccagcctgggcaacaagagcgaaactccgtctgaaaaagaaatagattaccccgttttacagaaagtgaaactgaggctcgacgtgaagagccggagattcgaaccggccgggtgcttttcccagggctccacactgcctccccgggagacaggaaggcttaagtccagcgctgccctctccgatcccgcttgtcagggagacactttatttcccggggcagccccgtaccccaggccccaccacccacttcgcgtttagaacttctgtgctatcttgcttatttgtcctaacagagaaaccagcacgcgcgggcggtggcggaggggggcgggcgggcgggtggaggcggg

SEQ ID NO: 1244711 - DNA, 4001 bp, Homo sapiens
aggaagcattctttttttttttttttgagatggagtctcgctctgtcgcccaggctggagggcagtggcacagtctcggctcactgcaagctccgcctcccgggttcacgccattctcctgcctcagcctcccaggtagctgggactacaggcacccgccaccacacctggctaattttttgtatttttagtagagacggggtttcaccctgttagccaggatggtctccatctcctgaccttgcgatccgcctgcctcggcctcccaaagtgctgggattacaggcttgagccaccgcacccagcctaatttttgtatttttagtggagacggggtttcaccattttggtcgggctggtcttgaactcctgaggcctccatgagtcatctcgctggcccctccataaccagctcagtgtctgtgtgtgccaaacaggcataggagcctgggtcggcccagagacaatctgcgtcacacactgtaaaccaaaggttccttggggcccaggggctggaaacctggaatcgctgatggtgtctgggattgatactgtgtattctgcactgtttctgagatatggctggcagcagggtcagacgcctcacctggggcgggagtccagccacttcagcataggccagcgcctggggaatggcagtgaggccaactgagaggccggcgacgaaatccatcttcagccactgcagggagtagctgggcagccacgccaggatgggcagcctcctctgcagggccgcaggggagcagcagcaggcgctcggggccatcccggggccagaggacctggcctgacccagcgccgtcaccgaagaaggcatctctacggtggggctggggggtgcaggtgacacagaccagcagtcagagcgtggcctttgaagaacccggcaacactggtcagggtcggcgggtgtcaggagaggtcactatgggtctcccctccccaggggggcgaacggctctaagaggaagccaacaatgtgtgcaagatggggactgggccaagactggaaggcccaccccgtccctcatcaccctctctccctgaatcccccccgtgcaaatcctgggtgccttctgtccctccatcctcaactctcccagataagaaactgataagcgattcctcattgagaagtctgaagactaattaggctcaacacttctggcccctggagaaccgacttcctttgcctttttttccgtctccccagggaatttaacggggagcagcgcagagagaagctgggcccgcgggcgcaccgtaggctggcggggggtgcgggtggcagccaggagatccagcggggctccgaggttttccaactgcgcaccaaggcgggctccacccgctacggtggactgcggcgctcgagggagagtgggggggtcctccgctcctgaggccacgcctcgctcagcccccacctgtggctttcacagccctggagttctagttgcttctgggaggacatcagaggcgcccggttaattcaggtgcgcagcatcttccagggccccggcgcccgcgcgcagagccgccaccctcacccccagccccccacgcccccggccgctccgctccgggcaaaatccactccccggcccccggccccgcccacaaggccgctggctccggatcctggggtctccggaggagaccctgcgccacctgaccgtccgcggtcccttggccccgagcaaggccgagggccgcggggacccgggtagggacgcggcgggggagtggtccccacgggaggcccccgcacttcaggactccgcgctggcccccgcgtcggctgcccccggcgaccccggccactgtccgctccccctgcccctggtccccgctcgccgccctcgcgggccacggactcacccactcggcgatgcagcttggggtctcctggcgtcgccgcagctgggtccgcaggaatcgccggggacaggccggggcggggtctggcgcgcacgtgaccggggtcggggcagggggcggggccgagcgggagaccagagagccggagccggatcccgatcccgagtccgagccgccgccgccatgagctgccccgtgcccgcctgctgcgcgctgctgctagtcctggggctctgccgggcgcgtccccggaacgcactgctgctcctcggtgagtgccggcgccgcccccccacgcccacctgcggtggcccggggaagtggccactggcctcctccccacccgtggtcaatgctgaccctagtgtgccctgcccttgtatcccccgctgccattccctctcgtcctcctctctgtgccgcccccagactcttcacgggtgtctccccagagagggcagcaaaggctggaggagtgagccccagcatccagcacccctacacttacctcgtgccgcctgtcccaccctcctctgaccctgcccagccagggctcaggggtccacggatctcaaatccctcttgggaggggatcccagaggaggggctggtgctccggtccccagagactgcagacagggtgccctcctggctctcatttccgaccccagagcctgtgtctcagctgtcttttcccttatcccaagggcacagccctccaccacccacccaccaccgtctcccccaaccccagtccctctcagaaaccccaggttcctccagagcaagcaccgtgctgctcacaagacttccggtttaggtaatcaaggctctggctcatgacaagtgacaaggccaaacccaaggcctgcgattctttccccttctgaggtctggcgccctgccagttgccctctttctgattaattttgtggtctctgggcgggggttcggctcactgtaacataaacagctctcctgccaactcctcgcctcccagaaacacagcagagaatctgcatggaccctcacctgcggatcagaattcctacaggaggctgtcagagtccaggctatgcggcccctgggctagggcctttcttagcacggactgccatggatcggcttaaacagaaatgtatttctcacagttctgtgggctgaaaatccaaggtcagggtgccagcttggttgggttccagtgagggtccactttcggcttacaggtggtcaccctctcactgtttcctcacatgacaagcggatgggggtggtctcacttccttttcctttctttttcctttctttcctttttttttttttttttttttttttgtgagacagggtctcactctgtcacccaggctggagcacagtagcacaatcacagctcactgcagcctcaatctcccaggctcaagcgatcctcctgcctcagcctcccaagtagctgggacctcaagtgcacatcaccatgcctggctaatttttgtattttttgtagagacaaggtctcactgtgttgcccagactggtctcgaactcctgggctcaagcaatcttcctgccttggcctcccgggtgctgggcttacgggcatgaaacactgcacccggccctctctttcttttcctttaagtccacagtcctgtcagatcaggatctcatccttatgattcatttacccttaattaaggaccctgtctccagatacagtgatgttgacgttagggcttcagcatatgaattctgggaggacacagttcagaccatagcaggcccacagccaagtgccgagacactctgggtttggagaagggcagctttcttcctggcctgcgggtacggagcacagcccatcccgctctccctccaggtttacgtggctgccatgtgctcacacctgtgggtactgtggggtggaggatggaagcccaactggaaggtgcccagcctcctctgtccatccatggaccacattgcctctgagggagctggggaaagtgttggtctgggggttcccaccagcctctcctgtggtgcccccagtgtcctctactccagagcagggggaagaagcttggtgtggttgtagg

SEQ ID NO: 1244712 - DNA, 4001 bp, Homo sapiens
ggcaggcagacagagtgaggctgtgagggtgagggcacccagcagtggctcccttcctgtttcccccacccctgccctccagctgcgaaccttccaagccactgagagatgataccaatgaggaaggaggaaatcatgccgcccacggaaaagatggccacggagagggcccagagggtggtgagggtgcctggagggatggagctgggtccctcaggcccctgcctccccagccacgtctcattgtagctctgttcaatcacctgggggacagcagaggacagatttcctgcagaccgtcccctttccaccacccccgagacacctgtcctcctcgtttgggtacccccaccctgccagctgcaggccctcaccttctgaggggcattgatgaccccaatgttgtacccaaactgcagggagccaagcaccgcagagaacacagcaaggaccagggtcccagtcactcgctgctgagggggttccccatcctgaacaggcagacacaaagacacagcatgtcacatggaaccatgatttttttccttccgctaggggcccgggcccagctggagcctgaagatactgggctccacccaacatgttgggtgagggaaactgggccatattaggaattgcacaaagatctcaatgtaaacaggagctgaactgcaacctgggcataaaggagaaactggatgtttgggtccataaggcagagaaatgtttgagaacttgtctcaaaattcttctgtgaccttgagacaggcttggccttaagagctcagatttgtgtgaccttggccaagtcacttccctgccccgaacctgagtgtcctctgtgagatgggggtgatgttgcctgccttgcctacctatctgtgagagtgttgtgaaaatcaacatcacatgttaacaatatccttgacagtgctggtttcataaattaacacgtgcattattatcatcagccactgtcctcttccctcccctctgggggttctgtcagccagctccaggaggcccccaacaggaccaagaagtgctgttccagaaaggacatcccggtcatctaggggtggccttctctatctacgtcgtggcctgccctccccctctaacctccgtgcagggagggccgtccaggggttctgcctgggagagccatgcccaggggaggagggcaggaaggtagtgtgaggggcggtggcagtggtggccgctcgctggcggcacagactgtctccaagcggaaacctgagctggaggagggggggctgacagtcccctctgcccctccaccaaccatggggccaagggaaagttcagcgtcctggagggcggccaggagtgggggtgggggcccacggagagcctccggtcctcgaaacactgcccgtgagcgaagacggacggacagctcccggagggcaagacccgcctggatctgctttcccgagtcggatcgagggcagggtgtccccgattccggagcgccgcgccgcctactaggcaagggggtgaaccctggctcgcagaatccacttgctgcctgtgccccgaaaggccctccagacccactctgccttttggtaggattggaatctcacagtcacgggttgtccaggccgggtataaatagccagccccctaccttcaccccctgcgcctgcgcaggaaccacccccagctgaccccaaccgcgaccccagcccaagaaaagcgggacccgtgcccccccgccccgccccctcatgatgaatcctacttcggagcctatctgttggaagcccgacggcatctcgtcttagaagagctggacgcgcaggggcggcgaagatgaaagaaccgatcctggagtctctgactccggcctggagcgcagaacctgcggaggccgcgggggtcccggagtgacgtgcgagggcgggcccgatgggacccacagccacaagccaaggacccggagagcagtggggctcccgcggatctggtggagcggggctgggggaaaagacgcgagaagcccccgccacctcgctcctgcccccgcgggccacgcccttcacagcacccattggccaggagcccgcacaccccagaaggccacgccccctccgcctggggtttagagtttggctggagttggtggggcgggccaatgaggccacgcccctccgcgtggctggcgagacacgcctctcgggttcccgccagcctccgactgggaagttttgagaaaagagtccctggaacaaaaggccccgcccacccacgtgttaggactccgcccaccagctaggatcccgggctgcagaagcatcttaaactctgcgggtctggacagtggggtctgagaggagaggacgggccaggtgtacttgccccggggaaactccagcggcctgagacggctcgcgagccggcgcgcgggttgggagaggagcaatgccccaaagtaacccggggctgctatttttagctcccacgttgggagcctccaaatgtcaggtcccgggcgtcccggcctgtcccaggcgggggcggagagacagggagatgacgccttaaagagtccgcgacatgcttcccacgcgagtgtggccctgggggccaggaaattccgttcccacaacgggtctggtggccgggctgcttggtcctgtctttcagcgcctccctgctccgggcactgtctatcccgcccttcccctacacacattccccaggttggttcctggagccggtccgagggacaagtggtcacaaccgaccacaccaccagccctgaggtctctgagcctctgaggtctctgagcatatgctggccgcgtgaacgacacgctctctggaggctgctccgggtttggatcctcggccaaattctgccaggcagaaagtgcgcgacctagggtcggcgtgtggggagagagaagccgaaatacccagagcgtggagagtgtctggctcagaaaacgggcttcggaagcgcagggttgtgctgccacctggagggcgagcgaggagccgcagtggattgcacttggaatctcaacccactatttctcgcctttccgccaccatagggcttcagtgacatctgacccaggcccttctctggagctgcagatccaggtgttcgttaccgcccggatgtggcagctctagtgatcagcatgtccaaacctgctcctcctcctaacttccttatttcaatgaattacccgcccagtcacccctatggtagaagtcaggctcgattcctcctgtcctgcgccgctctcctcgtttatccagttagtttccaacattggtgctttgacctccaaaactctctcacattcatccgatattctccgtggcggctgccacttcagtccagatcaccatcaccctcactggtcttcgtgctcctcttatttcctttatgacgagggcagagaacaattttcgaaggtccaatctcatctctcaagcaagaagtcactgtctctgttgccccaattgccaagttcaaatcccttttcagagtgaacaaaacctcctgcctctcttatccgatctctggccttacctatctctcctgcctctccttctatctccttcgcctcctgttctgggcaatgcctaagtccttattgtacccagaacacactgtgcctttacatcccttcttgattcctttgctgcactaatcccctgaaaaatctggaatgccggcccggcctggtggctcatgcctgtaatcccagcactttaggaggccaaggcaggtggatcgactgaggtcaggagtttgaaaccagcctggccaacatagagaaaccccatgtctgctaaagatacaaaaattagccgggcgtggttatgcacacctgtaatcccagctactcgggaggctgaggcaggaaaatggcttgaacccaggaggtggaggttgtagtgagccaagatcgtgcccttgcactccagcctggcgacagagtgactccgtctcaaga

SEQ ID NO: 1244713 - DNA, 4001 bp, Homo sapiens
gctaggtaccgcactgattaagatgagtaagcacagggcctgcaccagagacctcagcctcagaaagcagccctatcatggcccaacccaccaccactaaacgtaagttctatggttctatacactcccaatgtcttacaggaccgttatcttttttttttttttttttttaactcacagacctgagggaagaactcttagtccttttcaaatgatatctgagccaaccatcatcccaccctgaggtttcacctgagttgggtagttgacaaactgtagtgctgaattgctggagaccatggcacccagataggagatagaacaggcagcatagagccagctccgggtacgatccaccctggcagtgtcaaaaaactggatcactgggagaagacaaaaaaaaaaaaaaaaaaagaaaagaaaagaaaaaaaaaaaaaaacaagagaaacctggtggggctaggatggaccactaagcaaagctgaagccacatgaaaggaacttgtctgtcaaacaagacacaagctatttctgtcctgttacactgggaaatctctgaaaattattcatctttccaattctacctaagcccaacaaaagaccacatgcagggtggaggtgggggcctcattcagttcaagggaccagtcagctctgctgctagtccccagggaacaaagagagaatgctcaaagcatgcttgaagctgacacacaaaagaaactcaaagggaaagaaaaaaatgttttaagtattttcaatggggatttggaatatagaagacccattctctgaacatttctaactcagaagctgataaaaattggggaaataatattttactccacttcaaagtcattagttttacagacttcacagagaggctgtgtaagtacaaaatggggtggagatcatgagttagcctttaaggttgaatcaatgcttaatgcccagcatactgagggaacttggggtggtggggtacccaacaaattactatctgggtactcacagatcttggcaaacacagcattgatcacacattgaatgaagaccaaagttaaggcaaaggtgaacgtctcctgcttggctccttccccatactttcctcttgttctagaaatgaaatgcatgagaaaagagggagaaattagtgtatttcactcactgtcatctaatatatcccgagccactgaaaactttaaaattatcttgcctctctggatgtaggcagagtttgttaaggaccactaggctcatttgcaaaaggggctgattttactggatctagaaactagacatcccagcctactgattccaaagcctaagaaaagaatacccgaaaaagacggagaggaaacatgcagaacgagatagtgaaatcaggtaccccaggcaggaggagacggtatttcggctatggcaccaaggccgaggacgaataggttgtttgcaagcatctgggagtaccaaaagggggccgactcgggtcctgtttgaggaatagaagtctcagcctgtaaaacgcaggcccttagaaccaagcggggaaaaacagctaagaaaagaaaataaccaagtccgaagaatccagaaaataatcctggagttctggaattctgggtaggctcagccatagctgcaaaagtagtagggtgctaagagggcgacagccgggcaggaggacaagaggaaagcccgggtccagaggcagaaggcccgggatccctgtcacaggctggggagagactgtcggcccgcccccggggtcgctcacatcttttcctgcaggatcccatagtaaaaatagcagacaaagacacccaggaagcagagcggcaggcgcagccggtcgggcaccagggagctgctagaggccatgagacgcccagaggagccgactggagacccgctcacaaccggcaccggcagcagcggcggcggaggcgacagctccagccggacatcgccgaccggcggcaggggcctcataggagctgcatgcgaccgctgtccagcagggcccagcagtcactaccagaactgccggctcatggctgccaagggggaaactcctcagaacccagcaaccacttcctaggaaagaaaacccgccctgggaccttggctccatccctgagggccaggggaaccggcagcctcgagactgatccctcgccctggagatttttccaatcaggcaactctgaggacaactgcgacccagagcaccacagggtgtcctagagccacctgggcgtagaataatgacgtataaggatgtggaggccaccaattggctgcgctgtgcgaagacggacaggtaggcggggcgggaggaggtgtggtcggcagagcaaatccaatagtcttttccgcggcgggcggccaggcttctgctgggtcctaatgccaaattccttactggagcttcagcgccgtctagctgctgcccagcgtcagcgactttacctgctcattacctaggcacatcactaggcttccaagggggagagcggcacagtaagtctcggcttggtcacttaaaggcggggtaacctacccgtgtcacccaagttctgagccagagttttccaggtctggaaactagggataattagtaatagccaccttgtcgcctcttggctgttgtgaggatcaaataagagtgttttgtaaactgtaaagtatgctgtgcaagcttaaggtattattagtcatcactgtttgtcagccctgatcttatttcctcacatcgaggggtggaaatggaagcttactgaagtcagttttcttccaagtcttaacaactcaccaacaatggcgcaaacccttcggccgcgctcctgaatatttcccattaatgagctcctcgttggatcccttcctcatgcaagtgttgggtcttcacttgctggcacgaattgccagggcaagactgacctcaggtcttcctactactacctccaaccccctacttaattggcccaaatctccggccacctggtggactctgggctgctctctaggtcgaggctcctcttctagcagcctgctcttttggcacagcctcaggcaaaggaaggaaatactgggcagcaccacacccatcgctccgggcctgactcaataaggctttgcgggggagccagaagtcttttagagggaggagtaagggatagaagatagggtgtccccagcccactgtctcctcgatattagtggcatgggaaagccccatacatttgctctcttgctcactagcttactctactggctcagcccgcgatgccagggcaccaaatagctgggaagagagacctgccagctctacttctttaccagctgggacctcaaacaattcgcttgtcctgagtcgagtttcctcacgtgaaattaatgggaatataataacaagcaggagagcgctgtggttagaaacatgggcactggattcaaatgatcaggtttccaatcctagctctcccacttcatatctgtgtcttttggggaaagttattcgatctatttgtcctttcctgattatacagtgggacttaccatatttctcttactgggtggttgtcatatttcaataacactttatgtaaagcacttaacatggtagctggttcttaccagcccaatgaatggtggttgggatagcctggtttaggagtttgttgtcaggtcttatgaggcagatacaattgtacttattatgactgcccttggggtagtcaactgttcacccatacaatggggatgtgtcttttgtgaaaatgcttcggaaattccaaagcatcattgaaatattgagatggttattcccattttccccaaaagcctaagagctcttacaggtgcagcattataaaggctgcgaaaggataagagtagtgtctttgtatagtttctttgttccctttaaggctgcacactatgttgtgggtactccctgagatgaaccaaagcttccccaaaactgtcaagagatcca

SEQ ID NO: 1244714 - DNA, 4001 bp, Homo sapiens
gacagtgacttcattttttttttttttttttgctgctaactcccaagcacaacacagtgacttatgtttttaatttttttaagaggcaaagcctacctctgaagctccttttttttttcttttcctacttcaataagctggtctacattcttactcttctctatgcaaccactttcttctagattaacagtgctagtacagatgatttgatttatacattgatttcagcattttcttttcatgtactcaggtgaggaaaatcactcttttatatccaatgactttacaaaaaatcatttacaaagaagtgactgcatatgataaaatatttgtgccaaaataaattcatggcttttaaaatgtcatagaaatgtctattcaggtatctttttttttttttttcacattcactgtaatccttgtttgatgtcaatgtcacgtcaccaccccaagcggggggcacaagcacgaggaaaggaaaccttccccgtgaggggaggggtggggaggcacgcttccctcccccagcgcagctgctggctctgtctttgccggaacactccagccccaatgctcttctctttgctgctgagtgaagtcctccccatggcccacggcctccctgcctcagccctttggatctgctcctcagactttaccccttagttatgccctgattctaggacccagcctggactccacatcccttggtcccaggctggccccaggtcttccacgtagtccctctccaccaagtccccaagtcacccttgactctgagaggtatccctctcccacaccagttcttttccagtcacttctcctcccatgtttgtcttcagtctttgcctttatttatccctgtccctcccaacccccgggctcccaagttctatctcactcctccaccctccctgtcctctcacagctgaggttctgggctgtaatgatggcaatgctgcccagcacaacccctgccgccacgatgtcagaaggtgccacagtctcatggagcatataatactgcagtataagggccacaaccacctcggaatgtaggacagcgcacaccagggcagggtgggccttggtgaccgcatagcccacacatgtgaaggagaccaaggcgaggatccccactgcccccacacaactccaactcaggaggtcactgggcaacacgggggcctgcagcacaaagaggcctggcacagagcccagcagccccaccaagccagataggaaggccactgttgggaggcaggggggaaagtgcagagaacgatagaccagaagcctcagggacagcgccaggcctcccaggaaagcctccacatagcccagggcggtgtagacacccgtggtcccctcctgtagtgtccagagtccaggtcccacaatgatgattagtcctaggatgcagcccaacagtccacaccagtcgtagccactgagaccctggctctcaaggcagagagtgaggacggcggagcagacggtggaagaacctttgcgaacagtggcagcgttgccagcgggcaccacctgaaccgcactgtaggcacatccaatgctgaggatgttgagcagggcacagaagaaggcccggcttcggatgtcaggagttcccagaagggggtcgccacgcagtttaagtagcagggcaatagggaggtggaagaggcatcgccagatgagcagctccagcgagggcaggttggaagcctggtaagccatacgagaaagggggcccacgaagccagcaggcaggcccccacccagcagggccaccagcaggccactggtggcatcagagggctggcagcgctggtaccagcggaggctgggtggagcggagggcggcgatgggtgtgtggagtcaggctggttgaaataggggtgactgccagccatctttccttggactttctcctctcctcctggctcagggagcctgggcccctcagagctccagccattgtgacctcattggagtgggggtgggattcttccctggaactctcctgaggtggtagcacgcctattttcccactgagtccaactctgcttcttttctttctttttttgttttttgtttttttttattgatcattcttgggtgtttctcgcagagggggatttggcagggtcataggacaatagtggagggaaggtcagcagataaacaagtgaacaaaggtctctggttttcctaggcagaggaccctgcggccttctgcagtgtttgtgtccctgggtacttgagattagggagtggtgatgactcttaacgagcatgctgccttcaagcatctgtttaacaaagcacatcttgcaccgcccttaatccatttaaccctgagtggacacagcacatgccccagagagcacagggctgggggcaaggtcacagatcaacagcatcccaaggcagaagaacccttcccagtacagaacaaaatgaagtctcccatgtctacttctttctacacagacacagcaacaatctgatttctctatcttttccccacctttcccccttttctattccacaaaaccaccaccgtcatcatggcccgttctcaatgagctgttgggtacacctcccagacggggtggtggccgggcagaggggctcctcacttcccagaaggggcggccgggcagcggtgccccccacctcccggacggggcagcggccgggcgggggctgaccccccacctccctcccagacggggcagcttgcccggcgggggctgccccccacctccctcctggacggggcggctgccgggcagagaagctcctcacttcccagacggggcggctgccgggtggaggggctcctcacttctcagacggggcggctgccgggcggaggggctcctcacttctcagatggggcagctgcggggcggaggggctcctcacttctcagatggggcggccgggcagagacgctcctcacctcccagatggggtcgcggccaggcagaggcgctccccacatctcagacgatgggcccccgggcagagacgctcctcacttcctagacgggatggcggccgggaagaggcgctcctcacttcctagatgggatggcggccgggaagaggcgctcctcacttcccagactgggcagccgggcagaggggctcctcacatcccagacaatgggcggccaggcggagacgctcctcacttcccaggcggggtggcggctgggcagaggctgcaatctcggcactttgggaggccaaggcaggcggctgggaggtggaggttgtagctagccgagatcacgccactgctctccagcctgggcaacattgagcactgagtgaatgagactccgtctgcaatcccggcacctcgggaggccgaggttggcagatcactcgtggttaggagctggagaccagcctggccaacacagcgaaaccccgtctccaccaaaaaaatacgaaaaccagtcaggcgtggcggtgcgcacctgcaatcgcaggctgaggcaggagaatcaggcagggaggttgcagtgagccgagatggcagcagtacagtccagcttcggctccgcatcagagggagaccgtggaaagacagggaaacggagaccgtggggagagggagagggagagggagagctcaggtatcttatacattgttttctttccttctcttcttttgatcttacccacttttttttacaacttaaagcttttttttttttttttttttttgagacagggtctcgctctctcacccaggctcaagtgcagtgacacaaacatggctcaagcccagctaattttttttttttttttgtagagacagtgttttattatgttgcccaggctagtcttgaactcctgggctcaggcaatctgcccaccttggccttcgaaagtgctgggattacaggtgtgagtgaccagactggtcccaaaacttttttaatgtttaaattttaccactatactaaggaggagttaccca

SEQ ID NO: 1244715 - DNA, 4001 bp, Homo sapiens
gaggggtggggaggcacgctcccctcccccaccgcagctgctggctctgtctttgccggaacactccagccccaatgctcttctctttgctgctgagtgaagtcctccccgtggcccacggcctccctgcctcagccgtttggatctgctcctcagactttaccccttagttatgccctgattccaggacccagcctggtctccacatcccttggtcccaggctggccccaggtcttccaggtagtccctctccaccaagtccccaagtcacccttgactctgagaggtatccctctcccacaccagttcttttccagtcacttctcctcccatgtttgtcttcagtctttgcctctatttatccctgtccctcccaacccccgggctcccaagttctatctcactcctccaccttcccttccctctcacagctgaggttccaggctgtgatgatggcaatgctgcccagcacaacccctgcccccacgatgtcagaaggtgccacagtctcatggagcatataatactgcagtataagggccaccaccacctcggaatgcaggacagcgcacaccagggcagggtgggccttggtgaccgcatagctcacacatgtgaaggagaccaaggcgaggatccccactgcccccacacaactccaactcgggagatcactgggcaacacggggggctgcagcacaaagaggcctggcacagagcccagcagccccaccaagccagataggaaggccactgttgggaggcaggagggaaagtgcagagaacgatagaccagaagccccagggacagcgccagtcctcccacgaaagcctgcccatagcccagggcggtgtagacacccgtgatcccctcctgtagtgtccagagtccaggtcccacaatgatgattagtcctaggatgctgcccaacagtccacaccagtcgtagccactgagaccctggctctcaaggcagagggtgaggacggcggagcagacggtggaagaacctttgcgaacagtggcagcgttgccagcgggcaccacctgaaccgcactgtaggcacatccaatgctgaggacgttgagcagggcatagaagtaggcccggcctcggatgtcaggaggtcccagaagggggtcgccacgcagtttaagtagcagggcaatagggaggtggaagaggcatcgacagatgagcagctccagcgagggcaggttggaagcctggtaagccatatgagaaagggggcccacgaagccagcaggcaggcccccacccagcagggccaccagcaggccattggtggcatcagagggctggcagcactggtgccagcggaggctgggtggagcggagggcggcgatgggtgtgtggagtcaggcgggttcaagtaggggtgactgccagcctgttagggagaaaggagctcagggtagacagcagccgcagcccaggcgacctggggcagggcagatgccaggatggggtctgggaccctgtgggactgtacagtgttgggctatcttgctgaggaactcttcggagctagaaagggcctaaaagatgagtgagatgttataatgtgggcctggagcaggaagcaaggagtgagcagtcctggagcatcgtttccctgggtaagttgttcctgggaggagaaaaaggacccaggatgctctctcggattgaggaaggggaggaagcctcagatgctatgcatctgtatgatgccacaggttccagagacatctgggtacaccattatgaattctatttgtgggtatctctgagacagctaagttttaggaaaggaggggaaatggagcaaccaggagctatagggagggagtactaggcccctggcccccacactcaccatctttccttggactttctcctctcctcctggctcagggagcctgggcccctcagagctccagccattgtgacatggttggagtgggggtggggttcttccctggaactctcctgaggtggtagcacgcctattttcccgctgagtccaactctgcttcttttctttctttctttctttttttgtttgcgacgaagtttccactcttgttatccaggctggagtgcaatggtgtgatctcatctcactgcaacctccacctcccagattcaagcgattctcctgcctcagcctcccaagtagctgggattacaagaatgtgccactacacctggctaatttttttttttttttttgggacggagttttgctcttcttgcccaggctggagtgcagtggtgcgtgcaatctcggctcaccgcaacctccacctcctgggttcaagcaattctcctacctcatcctcccaagtacctgggattacaggcatgtgccaccacaccccgctaattttttatttttcgtagagatggggtttctccatgttggccatgctggtcttgaactccttacctcaagtgatccaccccaccaccccccgcctcccaaagtggtggaattacaggcatgagccaccgtgcccagcccaactctgcttcttttctatttatgtctccatgactccaaagtttgtctgattcttttattctttttatggctagctctgtggctttacattaatttgtttatttatatcttgcatggtttcagagaggtttttttgttgttgttttttttttgagacggagtctgtctctgtcgcccaggctggagtgcagtggcgagatctcggctcactgcaagctccgcctcccaggttcacgccattctcctgcctcagcctcccgagtagctgggaccacaggcgcccgccaccacgcccggctaatttttttgtatttttagtagagacagggtttcaccgtgttagccaggatggtctcgatctcctgacctcgtgatccgcccacctcggcctcccaaagtgctgggattacaggcgtgagccaccgcgcccagcctcagagaggttttaaggcaaggagctgtgaaccctggctcctccatctccttagtttttaattttccagcaccagggaggagttcttgggattgtccctgtggagtttcaggaatgtgttttttctgtgtgtgcttccacctggtgttttgttgatgctgtccccagaggccgacaccaaggcctctgcatttatgttcaagtatacagatgtggatctatctgctggtggggacaaagtacccagccagcttcatgtgttcatttgcgctggtggtcgttcgtgtgtgccccgtatgcagggccagggccttctttttccgcggcctgctgagctttcctgcgcattcctggagagggtgtgtgtgtgtgtccagggctggccctctttgagtgtgccgaccctgggtctgtgagtcccaccgggcctgattatgagtctgccatgtcatgtctgcaccctgagagcctgtgtgttatgctttcaggcagtgtgcaccgctgagtgaagggcgtgcaggaggaagggcggagggagccctttccctgggggtcggtggtcttgcgcccctgccgggatgctgcagcccggcccgcgccccgctcggtgtccacccgcccggtggcccagcgcggcgcagtgtcatgccgcgggggtcagtcctggggaaggccgtcgggcgctcggagctttgtgtcggtgtcggctgcgctgcgccggcctcctctcggcggcggcggcggcggcgctggggggggactgtttccgggggtgggggtgggggtaggaccggggcggggggagccgatgatgtcagcggcggcggcggcggcggcagcggggccgggccggggccaggcgctgggggggccagggccggagctggagccggagccggagctggaggcgggcaaaaccggagcggccgggggcggccacggtgatgagccgggcctggcggacgcggcgccatcgcagtcaggtgggccctggggcgaactgggcagggccagggcggaccggagccaactgccag

SEQ ID NO: 1244716 - DNA, 4001 bp, Homo sapiens
ctgcccggggggctctggaggcatgtagccctgtcttcccctgacaggctcaccaaccatatcaggcaaacaactcagacacaacagcctggagggctgcacgggagggtttgaaaattccttgatcaaaaaaaagttgttttttttttagagatggggtactgttgtgttgcccaggctggagtgcagtggtgcaatcatagctcactgtaatctcaaactcctgggctcaagtgatccttctgcctcagcctcccgagcagctgagactacaggtatgcaccaccatgcccagctaacttttaattttttttgtagagacggggtcttactatgttgcccaggctgaaaaaattttttggatatttttattccaaagataatgaatatgaaaaacacagtgtttgctaagctaatctaaaattaaactactggtgccactttgtttcaaaatatacatgttgttttcatttttctacctacttggtaacgtttcagtcagcctttcttttccaaagcactaaatgcttgtttattgtagattaaacagatgacacttagaaatggccattttctttcatgtgttattcaatgctggaatgacgctaaactttttgtatttgagattttttccaactgtggtaacgtctgcacacattagatcaaatgtgcagttttttgtttttgtttttgagacggagtctccctctgtcgcccaggctggagtgcaatggcgtgatctcggctcactgcaaccttcggctcattgaaaccttcgcctcccaggttcaagctattctcctgtctcagcctcccaagtatctgggattacaggcatgtgccaccacccccggctaatttttgtattttcagtagagatggggtttcagcatgttggtcaggcagttctcgaactcctgacctcaggtgatccactcgcctcggcctcccaaagtgctgggattacaggtgtgagccaccaccccctgccaaatgtgcggtttttgtgaaacgcagatcttaggtgtataacctggtggatgtttttaatcaccttgcaaccaaggtccctatctagtgtcgaagcctgggagtggtgagttgtgtgcttctgaagacaggtgcagttgggtcagagtttttaaaaacacgataaaatgtaaaaatacggagtcccaccgttcccttccgattctggaggatcattttgctttgttacactttgcttcggtatcgagtttttgagtgtggggaactttccggcccgggctgacaagggctgccagggccaacgccgtgcgcttctcatccacggattctctacgggaactgcgccgggacccagagggtcgccccgcccgcggccgcctgcacccgcccagcgaagccctgccccggcgggaactttaaccaggacgacccagccagacgccccctctgcgggggaggcgagggcggtgatctccgggcccaccggactcacctgtttgaagcagaagggcatggtgaggacactgacccctacgatgctgttcacgatgttcgtgatcagcccccagttggaggcggcggccgcggtcatagtgagaggtctaggggcccggggcgagaggcctcgggggtcgccgggctgcggccggctttggaagcccagcccgaggccacggtcacaggtcccaacgtccgggacgccggtggggaggggatgggcagcctgaacacgggagcctgagcaggcgcgggcgcgggccccagaggctgcctggaggaggcagcctcgaaggccggctgcgggggcgaggtcaacctccggaccccgccaagccctgcggccgcctcagggccatgcgtccctcgctcggcctcgcgggccgcctgtgaatctccgagcccagacccggaagagccgcagagccagctagggacacctcagcccaactcagctgccgccgcggcgctcacacttccgccttccacgggctccgttgcccggaagtgacggccagggggtagggtttggtgggacgcgagccaatgagaggcgggcccggaggggcgggcggaaactgggccggtgggcacctgagggtctcgcagctgtccggttcgccaagctggtccagccgacctgtgcccggggccccagttcaacgagctggaggacaagggactcgccccgcgaggcctcggtttggatgggcagtcgcgggctggagagaaggggaggcgctgtgccttccggggaggagcgggtttaagggttcctttttgacctttattcccaggaccgattctggggcgagtgcttggcgccagggcacgggggcgggggccctgactgcctcagccgaaaaatagtctgttgtgaggaattagcacctaggaggtaggaatgaaacgctgggcacagagaggctcggccactccgctaaggccacacagctccaaggggaggcggtgccctgccgaactgcgcccagatcagtggcaatgttgaacttcaccttttcacacgaaaagagcaagggacattcctggaggggacaggagaggtggaggcttacatgaacagggaaacccgggagggcttccagaaggaggtggcttctaggctggagcttgaaggacaaatgagaattcctcgggtagaaatggagaccggggagaggagagaacagagaagggtcccgatagatctgtggattcctggcacctagctgctcactctgagtctaatgaatgagcgcgtagaccgaatggctgggaagcagcaagtgattccaggctgctgggggaggacggcggaggaaaggaggccgtgtctgcagcacctgcaggaccaggtgtcttagaacagaggcccgttcctcaggcactggcagtgcagccaccaagtaaggctgtgccccaccttcaggagaacaggaggaaatgcctgggtaaagactaattaaatacgcaggcaaaataacaaatgcctgcgttcttttttttttttttcttcagtcagagtcttgctctgtcgcccaggctgtatatgcagtggtgtgatcttggctcactgcaacctccacctcccaggttcaagctattctcatgcctcagcctcccaagtagctggaattacaggctcccgccaccacacccggctaatttttgtatttttagtagagaccaggtttcaccatggtggccaggcttgcctcaaactcccgacctcaggtgatccgcccacctcggcctcccaaagtgctggtattacaggcatgagccaccgcacccagcccatttacttttatataaatgaaatggcatacacattccataacctcctttttattatgtaattttcatcaaatgttatgcatgcgaggtaggctgggcaatttacatgtatgttttcacaaatagcaaataccatggacccgctattgagctttaagaacaaaatattaccgaagacttagatcctccctttcagttcctccccagttccagcaccttcttcccctcttccctgctatcctgagacatcacaatccagattccatcaattcattacttttctttaaaggtttaccatatatggatatatccctaaacaattatggggaagactatttgtctcttttttttttttttttgagacagagtctcactctgtcacccagtctggagtgcagtggcacaatctcagcttgcttcagcctttccctcctgggctaaagtgatcctcccacttcaggccctcagtagctgaaactacaggtgtgtgccaccatgcccagctaattttcactttttttgtagagatgggattttgtcatgttgtccaggctggtctcaaactcctgggttcaatcgatctgctcacctcggcctcccaaagtgctgggattacaggcgtgagccactgcgcccagctgactctctgtctcttaatattcgtttattccattttccaaattaataggaattggcctgcacgtatgactgcctag

SEQ ID NO: 1244717 - DNA, 4001 bp, Homo sapiens
tggatcttgtgggctggtgaacagaacagagggagctcgtgggtgttcctggtggttagtgggatagggaaacacccgtctaagcctgtccccatgtatatctgagcaccctcctgagtaagaaaaagggacacagagggaagaccgaggccaccatcctttccatcccaacaggagcagcattgatcacgggcaatgcaagcccagtgcccctcggagaagtttcttctctatttgctgttttaaatcctcgctacaagggtggtcagagaaccagcagcactggtccggcttgggagctagttaggaatgcagaaactcaggtctcaccccagactttctgaatcagggtctgcattttgtggaattccatgggggattcttatgcacattaaactgtggaaagcaaaagattaaaactggtaaaacttggccaggcgcagtggctcatgcctgtaatcccagcaccttgggaggccaagacgggcagatcacctgaggtcaggagttcgagaccagcctggccaacacggtgaaaccccatctctactaaaaacacaaaaattacttgggcgtcgtggtgtgtgcctgtagtcccagtgcctgtagtcccagctactcgggaggctgaggcaggagtaatcgcttgaacccgggaggcggaggttgcagtgagccgagatcgcgccactgcactccagtccgggtgacagagcaaggctctgtctcaaaaaaaaataaaaataaataaataaataaaactggtaaaacttctacaataccaagagcttagaaaatgagttctcctgccccatgtgggattggcaagagcaaagaagagtcccaaaagaacagaaagttttctgcagagtctcaagagaagaaaaagtttctggcagagtcccaagagaacaagaagttttctctaaccggcagaccagtaacaactttaggacacagcatctccatcacagcttacacaatggggctcagaattcctcacgatggggatattaattccatcaaccctgattcgttagcagcagggagaatcattctctgaccgttccaacttttaacatgccaacagcctgtagacttgtacacacctgccacagcagcacatgggcattcccggctgattgatacaggtttgttttctttatttcctttctcccccttttaaacctgttgttccgcttccaagagtcagttcaagaggctggtgaagttgcagaagtggaaacagcactagggctgctgggccttagtggagctgcacacacatgccctaactccacgagggggaatccagcagaaggattcaggtctgggcggagaggactgtggaaaagttctctaatgcctcgctactcaaagcgtggtccgcggaccacccaacctgggaattagttagaaatgcacactgtcacgccccacccagacctgctgcaagttaaccagattcccagtcaagttccagaggtccagctaacagccagagcaagtgggaggggcctgggagcagctggatttgtagctgcctctgctcccaggaatcccgggtacccccacacaccgcctaggaagggacgaacgaagaggatttgggttaggactgtaaaaggaaggcatgtcattgccttccagatcaccctggagagggacatagccggggtccggggacttccttcccaccgcccctcaccctcccaccccgccccgacacctgccaaagcctccaatttctcctccaaacccctcctctctccaggcgtacccccttccaagctccaggtggctgcccttccaagtcccacactcttgtcctgatggcctccgaccccgggcctcgagcccaaccaaaggcaccgaaggagagaaaagccaactcactagggtgccctctccagcccccactgcacttccatcagcccccgctgccactctctcgccggctccactcccgcagtcacttcctgcttccctcccgcacacgtggccctcccgcctccgggccccgcccccttggccgcaactggcaactcccgcctgaagaatagattctctggttcacagccgtctgcaggctcaggaacagatctgggcgggcagaacagagccctgaggccaagagcccagcagtctgcgagtgactgcagccctaagggaagctacaaacacccaaggaaagagccctttgtaacacccctgatgttacttatgcttctacacctttggcagccaggtccatgccactgggtgcgcagcagagcaggatgtgctgtgtgtgtgttgcgggagaggctgggggcgggtaatgtgatggcatcggcatcattctccagtcaatgaccctcaaaagaatcactggagggggtcaaacacaaaatgccagcacccccagaggctctggttccgtcattctgggtggggctgacattttgggatttttttgtttttgcttttgtttttttgagatggagtctcgctctttcgcccaggctggagtgccgtggcccaatctcgggtgattgcagcctctgcctcctatgttcaagcgattctcctgcttcagcctcccgagtagctgggatcacaggtgcatgctgccaagccccgctaatttttgtttttttttttttttttttttttttttagtagggacggggtttcaccacgttgcccaggctggcctcgaacccctgacctcaaatgatccactcgtgtgggcctcccaaagtgctggattataggcatgagccaccgcgcctggcctgagatcttgttttgagctaggagttgctgatgctgctgtcctgggaccaccctttgaaaagcactgccctaggtcaaaggctttgatctgcaggatttctgtgaaaagaccagaggataggattgactagatttagccaaaaacaaaacaaaataaataaatagatagaaacaagatgcctgggctgggcgctgtggctcacgcctataatcccagcactttgggaggccgaggcgggcagatcacaacgtctggagatcgagaccatcctggctaatacggtgaaaccccgtctctactaaaaatacaaaaaattagctgggcgtggtggcaggcgcctgtagtcccagctactcgggagtctgaggcaggagaatggcgtgaacccgagaggccgagcttgcagtgagccaagatcacgccactgcactccagcctgggcaacagagcaaaactccatctcaaaaaaaaaaaaaaaagcctgattaaatttgaatttcagaaaaataacgtcatttattactataaatatgccccgggcaatgtgtgggacatacttatgttacaggcatatttgttgttgatctgaaactgaaacccagctgagtgtcctgtgttttatttgacaacatatcagagcgtgacctgagcagaaaagctacccgtggtctcgatggccatagcccaaagggtccaataacaggcctctttcttccagtggaactaggttgttcacactgacggtcgcaccatataccaagcactccatggggaggagaagacagcctggccactggagggtggtctttgcccttaaaagacccccaacttggaagagtcaaatcagccattgcaattccacataagagagtatgtacaggcacacagagacacaatacccatgtggcacggcccatcaactcatcttccaaaatgtcatacctcttcctgcacgctgcaatagccataaaatgacacaatatcttagactcacttcaaaatatgatggaagagaaaagtggatggagtagagattaaacaaaattggccatgaattaaccattcttaggctgggcatggtggttcacacctgtaatcccagcactttgggaggacaaggtgggcagattgtttgagcccaagagtttgagaccggcctgggcaaaaaagcaagatctcgtcgctacaaaaagtttttaaaaagtagctggacatggtggca

SEQ ID NO: 1244718 - DNA, 4001 bp, Homo sapiens
ctcttcccaactcccaagatttcttgctgatgtggggaaagacctgccaagaacccttaggctattaggaaatatttttgagtggctaaaggctaaaggttagttataaatgatatactttctgtcctctccccgcggcctctgcattctcctgctttctcctgccctgaacctctccagctaagcctccctccctagagactgggacacacaggaatctccggggcagatcagagaagggaaacagggaggcttccacaaaggattacacccagcatgagctggtccaaagctttctcttcctgcaaagagctctagaaagaaaaggcctgctgctggggattcaggaagtcaaacctgggctacctccatctaagggcactctagcactggcgacagggattatgtgagctcagctattatgcagctaccgttgggatcaaggagaaggcagagggaaaatttcctgtcaaggttgcctaagaaggagggtaggaggctagaggctgggggctgctgtggccctcctgtggggctgaatttactgccctgtagtcatcaggaccctccaacagggtatgaaggtgtgaaggtaagtgtgtgttgggtggtgcagatgtcatgtagagaagcatcctcagcctgccttcagcaattccagtgacaaggcaaagaggagagaacaaccctagcatcatttccataaacgttcctttcttctcttccccttcatccccatggggttggaaagccacggagatgtcctcagagcccgtgggggaaatgtcctttggagaatcataaggcagcaaaaatagacaagaaattgtgtccagcaagcacttaggagactccacaatggcctgaggaacgtctagattctagatgagccctccctggggtggaggcaaggccacttcctctcctgctgcaccccagccccttaatctggagttcctctttctcacaagcagacagcaacatgtttactaccagccaagctatgttccagggctgggaggagaggagagcagtccagcactgttcgtagcgggtggaaggaacaccctggacagcaggtggggttctgggtggatggcaggcccaggctctgcggccttgcgcaagacagatcgctctgagcctcgatgtcttcgtccacaaaacaggggcaatgacaagtacccggcagggctgggtgaggatcagatgggccttctgataccctagaggcactgggcaatgcggtgctgtggctcgctaggtcttcgcccccatcccgccccctcccaaagccccagctccaggagccccccgcaaccccaggcgcttgtctcacctggctcggtacacaggtaggagtaaaagccctctgacttgagcatgatgagcagcgagccccagcccaggaggactgccgagaagaggaggttctccagcacggccgtgcaggccatccaccagcggcgccgatgggcagtggccagggtgggcgccatggtgcggcgcggcgcggctccggctccggctccggctctgcaccacctgcgcacagaactcggcgtcagcggccggcccttgcccagcccctgcggccgcccccagcagccccgaccgctgccgcagggctcgggattgccacccctccccggccgcggcggccggtgcgcgcagcagaggaagcgaaccccagccctgcccggacctgggacaccccgagcccgcggccggctcgtaccgctgccctccgctacgacagagccgccccggccaggcagggagacgtctcccgcagctcactccgaggtaaactgaggcatggaggcaagaaggggctaacgcatgctcagggccgtggaactagtcctggcctgcagcaggactgacatcgcctggggccagcatggaacgcagcgtgaggtgggcaggggcagatccgagggctgcctctcccagggaccctgacaggtgccctcccgcccgcgcccgagacccttccccagagctggtttcttcaaccacaagatcagcgcccagacctacggaacggcccgccccggcgcgctcattggccggacggcgcaggaactgccgcgccattggccgccgtctaggtcgctaggcgctgcggccacgcgaacccagcgtgggagacgaggagccggttcaaaccggtggcgcgagccagccgcgcgacccccatctcgggcgttcccccggcaactcgcccgtttccatggcctcggacccccgcgcctccattccccagcccgcatctgttcgtcatctcttccctggcggcccctcatcgctccatctctctcctcgttcccacgttttctccctacgccccttcggcggccgcttctgcccccgcgccctcgccccggccgcgatcccctccctgctgcagctcacccggctcctccggcgtgtgtcgggcccgcccggcgccttttctgccctcttttattccagcccttttattccgaccccaagaagaaaacactgccgcccgctgattggctgagcggggctggaaacaggcgtcgaccaatcagcagccagccccccgcccgccccgccgcgagcagaagccggttccggccggactcggagacaaacaagagagatgggggacgggaggggcctgggcgctgcgggccgggcctcggctttgcagccttcaacccgagtcacagcgcggccgggaatccccggcgacatcgccccgcggcctctccagcggcctgaccctgcgaggctggggctccggctccgcgtcccggcccccagcggactccccccagaagccgccgggccaccagcgcccccagccgggctctcccgcggccgccccgccgtccccagctgccccctgcgcgcgggtcaccacgcccagatgcgccggctccgcacggtggttccactctcgaatccccaccccgcctcctccccacgcagcgccgccgtccccgccgcctcgggctttgggtcctggttcctcgctcccccgccccggtggttcccgtcccggcgtattcggggcctgggatcccggacccggtccagccgtggcgccccccgctgatgcaccgaccccttcccctctccccggtggcgtctgcccggtccctggaagttggcccttggaaatctgcaaggggatttggggctggtctgtcccgtcctaggatggggtctcctgagctccccccatcagactgacctttctccgcccgtgttcacgcactgctcggtcctccggggaccctccacccttgatcgtcatctgggtgctccctgcccgcgctggccaccttcaccccgttccccgtccctttcagggaaggtcccctctgcagggcgatgctacgggccacgtccgccagctggtacaagctagggagggttcgagggggctccgggtccccgtctgataagcccgggctccgaaagctcagctccccgtcttcgtcccccggattcgaggcactaacccgacccgggaagaccctctgactgccccagaatcgccttggtcaccctggctcgctccggggggctggcttagcaccccagggctgccgcgcggtgtccacgtctggaatcccagcggtttgggaggctaaggtcggagggccacttggggacaggagtttgagaccagcctgggcagcatggcgagaaccatctctaccaaaataaaaaccaaaaataaaaccccaccaccaccccagggctgtgggagccccaaacgcctcttgctccacctgccccagtccgagtgtgccccctactgtctagaatccgcccgggccacctggcgagggcaacctcccccagacaacgcttggagctgtcagcctgctggggggcggctccagctggtagcctacccggttcctcaccctgtggaacccttcccactcccaaggtttcaactgccatctgaaaaatctctttcttcacccttccctcctctttgagcagcctgacgg

SEQ ID NO: 1244719 - DNA, 4001 bp, Homo sapiens
aggcgtgagccactgcgcccggccgagggttttaaagatcataaatagggtaggtattaacaatagttactattatgatatgtgttatgacttcataacagggaaaatcttctggtcaagctgctcctgggcatagccaacgagggaagtgtcctctggcaggaaccacagctctgggaggaagaaaaggaagccgactacaggataaaacacaaattagtattcccctttaaataaataattagtgtccacagagatggcctttcttctcctgtccttgttattctgttgtgaccacacattgactgctgtcaggatgtttatgctttgggtttcactggtcaaggtcatccttcatgttctcttcagagaggtttcatttgacacaaatgctaggtactccctaaaagctgaaacacacttttgaccacctatttaaaaacttttattggtcaaaaaacaccatgaggccgggcgcggtggctcacacctgtaatcccagcactttgggaggccgaggcaggggatcacctgaggtcaggagttcgagaccagcctggccaatacggtgaaaccccatctctactaaaaatacaaaaaattagccaggcgtggtggcgtgcacctgtaatcccagctactcggcaggctgaggcaggagaatcgcttgaacccaggaggcagaggtggcagtgagttgagatcgcgccattgcactccagtctgggcaacaagagtgaaactctgcctcaaaaaacaaaacaaaacaaaacaaaacaaaaacttaaagattagaaaagtcaagggactcccccaagctagtaatggtcagattggggattcaagccaggccaagcctctgtgtgtaggccccaggccacgctgcctctctggagtctcctgtggctccggccaatacacacttcagtttggatcccacggcttttacatgtgccttattaagatccaatctgcgcccttcaactagaggtttatttttcattcatttacttatttattttttgagacagagcctcactctgtcgccaaggctacagtgcagcagcacaatctcagctcacttcaagctccacctccctggttcaagcgattctcctgcctcagcctcccgagtagctgggattacaggcatgtgccactacgccacgatgcccagctaattttttttttgtattttgagtagagatggagtttcgccatgttggccaggctggtctcgaactcctgacttcaggtgatccatccgcctcggcctcccaaagtgctgggatgacaggcgtgagccaccgcgcccggtcatttttttaaatttgtttttggagatgaggtcatgctgtattgcccaggctggagcgcagtggctattcacaggcatgatccctctactgatcagcaggacacttttgacctgctctgtttctgacctgggccggttcagccctccttaggcaacctgggggtccctcaccccccggaggtcaccacactgatgctgaacttagtgtagacatctcatcaacacagcacgctattgtgcagaactcctgggctcaactcatctgcccacctcagcctcctgagcagctgagactacagggggataccacaatgcccagtccccaactagagatggcttacattccttctgaagctccttttagacccatctgccccctgccctcacctcctgctgttgccttcggctgacctccccatggtccagcgccacagcatcggatgggcttgcatttgcctgtggactcccgtaggtcatcctgacatctgggtcactccccacattccccctctcgctcactccgtccccagcttccctgcctccaccggtctcagctgcgcataatggctgttcgaagccgcggtgccggagtgagggctgagcgctgagcagagcgccctagcgcgggcctcgagggctggcggaggggaaggaccccaggaggggaaggaccagctttgctgccaagcaggaagccggagctgtttcctgactcaccaccacactcacaggtgggagtgcaagcccctcttcccgccctcaggtgcttcccacagccccctcgccgcctctgcctccgtgcgggtcaacctgtcctgccagcccgggctgttcactcactgcctccacgcagcctcagtcacacagggaagcccgtgactctctctctttcagccccctggctgcagcataaacaggccggactgtgtgaccttcccagaggggaaaacagcagctgcaggcggcccctcccctggcattctggccatagagcatgaccaccggacaggagtgcctgcagggccaaggccctgggacagtgcgggcgcgggagcttctctaagatgccggacgtacgtgccttttggcccagggcaggccatggcattgctggcaggcagaaacaaggggcaaccgtggcacccccggccctgactttccacatccacggactcccgagtcctccctggcctgcaggaggctggggagctgggtggtgggtgggggctgcggagctgggaggtgggtgggggctggggagctgggtggtgggtgggggctggcattctggccctcgggtcccctccagagggagccttgtccccaagtggctggagtacacacccagagttctgtacaacctgcacaggccgggatcccggaaccagactgcacaggtagactctgccaggctgggctgtttcctacccacaacaaccgggcacctccaagcacatgctgcccgggacaaggtccttgtggtcacctttctgcttcagtgctgaagggaggggaagggtgtgctcccctcccccggccacctcctgtgccttcccggccgggtccagtcctgccaataccgctgccctttccgtctgaacgtggtcacatactgcagcaaattcatgaggcagaaccctcagatggcaaattctccccaaaccaatggcaagtagctgactgcctgagcttccccaaggtacaggacagaaagagaggaaggtggggaggcacagcaggcactgggcactggcaagtcccgctcaccaggcacctagaccctccagagctggccgggggccaccgcgggaccctctcctggaccctccagagctggccgggggccaccgtgggaccctctcctggctgcagacgcggggtctactgagccacggcactaaactcctgtcccctctctgggggcatctgccatcctgccctcctctccaggatctgaagagggatgtttatcctcttcacttccctcagatcccacctcccatgaaatcatgccttcctcaggtttaaagtcagacttgaaggaatcaaaagggaaaatccacagagaaatgtctcatcggggagcctggcaacattttgaaacccgcttttctgtgtggcttctgctgagaaatccccatcccacccacggggacaggggtcagagtaatggagtggaaatggcaggttcacaattttggctacagctgctcccatctctaagcaacccaggctccgggttggagggtggcgaccccaagatgcggcctcagccgccggccgtgtttgtgctccagccgatgaagcgagtgcaaagggctgtacaaacgcgaggcactgaacaaacactgagcgtgccgtccagatgtcccgggggaggctgaggatccacaccgtggggagtgctctgcccccatggagtgacctggcgtccgccctccacggatggcacgcgatggcccaggccctgtgctgcagggccctgggagagccagcactggctactgggcagcctacctgacgcgacagccacccttgcccctcggagcctccacttgggagggaaataccaccatgggtgccgacctcttgggctctggaaggatggctcatggccatctccttctggactacaaggaaaaggcgtgtgcccgcttggagccccctctcctaccagtggggg

SEQ ID NO: 1244720 - DNA, 4001 bp, Homo sapiens
ggctgctgtggccctcctgtggggctgaatttactgccctgtagtcatcaggaccctccaacagggtatgaaggtgtgaaggtaagtgtgtgttgggtggtgcagatgtcatgtagagaagcatcctcagcctgccttcagcaattccagtgacaaggcaaagaggagagaacaaccctagcatcatttccataaacgttcctttcttctcttccccttcatccccatggggttggaaagccacggagatgtcctcagagcccgtgggggaaatgtcctttggagaatcataaggcagcaaaaatagacaagaaattgtgtccagcaagcacttaggagactccacaatggcctgaggaacgtctagattctagatgagccctccctggggtggaggcaaggccacttcctctcctgctgcaccccagccccttaatctggagttcctctttctcacaagcagacagcaacatgtttactaccagccaagctatgttccagggctgggaggagaggagagcagtccagcactgttcgtagcgggtggaaggaacaccctggacagcaggtggggttctgggtggatggcaggcccaggctctgcggccttgcgcaagacagatcgctctgagcctcgatgtcttcgtccacaaaacaggggcaatgacaagtacccggcagggctgggtgaggatcagatgggccttctgataccctagaggcactgggcaatgcggtgctgtggctcgctaggtcttcgcccccatcccgccccctcccaaagccccagctccaggagccccccgcaaccccaggcgcttgtctcacctggctcggtacacaggtaggagtaaaagccctctgacttgagcatgatgagcagcgagccccagcccaggaggactgccgagaagaggaggttctccagcacggccgtgcaggccatccaccagcggcgccgatgggcagtggccagggtgggcgccatggtgcggcgcggcgcggctccggctccggctccggctctgcaccacctgcgcacagaactcggcgtcagcggccggcccttgcccagcccctgcggccgcccccagcagccccgaccgctgccgcagggctcgggattgccacccctccccggccgcggcggccggtgcgcgcagcagaggaagcgaaccccagccctgcccggacctgggacaccccgagcccgcggccggctcgtaccgctgccctccgctacgacagagccgccccggccaggcagggagacgtctcccgcagctcactccgaggtaaactgaggcatggaggcaagaaggggctaacgcatgctcagggccgtggaactagtcctggcctgcagcaggactgacatcgcctggggccagcatggaacgcagcgtgaggtgggcaggggcagatccgagggctgcctctcccagggaccctgacaggtgccctcccgcccgcgcccgagacccttccccagagctggtttcttcaaccacaagatcagcgcccagacctacggaacggcccgccccggcgcgctcattggccggacggcgcaggaactgccgcgccattggccgccgtctaggtcgctaggcgctgcggccacgcgaacccagcgtgggagacgaggagccggttcaaaccggtggcgcgagccagccgcgcgacccccatctcgggcgttcccccggcaactcgcccgtttccatggcctcggacccccgcgcctccattccccagcccgcatctgttcgtcatctcttccctggcggcccctcatcgctccatctctctcctcgttcccacgttttctccctacgccccttcggcggccgcttctgcccccgcgccctcgccccggccgcgatcccctccctgctgcagctcacccggctcctccggcgtgtgtcgggcccgcccggcgccttttctgccctcttttattccagcccttttattccgaccccaagaagaaaacactgccgcccgctgattggctgagcggggctggaaacaggcgtcgaccaatcagcagccagccccccgcccgccccgccgcgagcagaagccggttccggccggactcggagacaaacaagagagatgggggacgggaggggcctgggcgctgcgggccgggcctcggctttgcagccttcaacccgagtcacagcgcggccgggaatccccggcgacatcgccccgcggcctctccagcggcctgaccctgcgaggctggggctccggctccgcgtcccggcccccagcggactccccccagaagccgccgggccaccagcgcccccagccgggctctcccgcggccgccccgccgtccccagctgccccctgcgcgcgggtcaccacgcccagatgcgccggctccgcacggtggttccactctcgaatccccaccccgcctcctccccacgcagcgccgccgtccccgccgcctcgggctttgggtcctggttcctcgctcccccgccccggtggttcccgtcccggcgtattcggggcctgggatcccggacccggtccagccgtggcgccccccgctgatgcaccgaccccttcccctctccccggtggcgtctgcccggtccctggaagttggcccttggaaatctgcaaggggatttggggctggtctgtcccgtcctaggatggggtctcctgagctccccccatcagactgacctttctccgcccgtgttcacgcactgctcggtcctccggggaccctccacccttgatcgtcatctgggtgctccctgcccgcgctggccaccttcaccccgttccccgtccctttcagggaaggtcccctctgcagggcgatgctacgggccacgtccgccagctggtacaagctagggagggttcgagggggctccgggtccccgtctgataagcccgggctccgaaagctcagctccccgtcttcgtcccccggattcgaggcactaacccgacccgggaagaccctctgactgccccagaatcgccttggtcaccctggctcgctccggggggctggcttagcaccccagggctgccgcgcggtgtccacgtctggaatcccagcggtttgggaggctaaggtcggagggccacttggggacaggagtttgagaccagcctgggcagcatggcgagaaccatctctaccaaaataaaaaccaaaaataaaaccccaccaccaccccagggctgtgggagccccaaacgcctcttgctccacctgccccagtccgagtgtgccccctactgtctagaatccgcccgggccacctggcgagggcaacctcccccagacaacgcttggagctgtcagcctgctggggggcggctccagctggtagcctacccggttcctcaccctgtggaacccttcccactcccaaggtttcaactgccatctgaaaaatctctttcttcacccttccctcctctttgagcagcctgacggcgctgcagggctcaaacatgcctcaaatatcccccagaactgtcctccacattttctctcagataaccatactactactgtctactgaagttagataccaagaaccctgtcttttttctttttctttttttttttttttttttgagacaggatctcaggcacccagactgctggagtgtggtggcatgatcatagctcactgcagcctcgacctcctgggcttaggtgatcctcctgcctcagcctcccaagtagctgggaccacaggtgcatgctaccacacttggctaatttttgtattttttgtacagatagggtcttgccctgttgcccaggctggtcttgaagtcttgggctcaagtgatcctcccacctcagcctcccaaagtgcagggattacaggcatgactcacagtgccctgctgagaaccatcctttcatcagacatttgttaggcagtcgctgtgattctgcctctccctcaccgcatccccatcaaactgatacagct

SEQ ID NO: 1244721 - DNA, 4001 bp, Homo sapiens
agggtatttgaggtaggtcctgtgattcttatcagagaagtgagtaccaggcattaatggcatggactttgtttaagaacatatgaataggcggtgggaggccaaggggtaaagcaattagtgtatgagccacacttttgtcttttgctctatattactaacaatattaatggttgataacagtgggttaattactttagctactgaaggtctatattttccatgtatcaaagatggcatttttgagggatttcttagttgtctgttctccagtgcaggctgggggcataactatgtttccaaagacacaggaatgaaccacatctgggggcagtgagtggccggcccccagttcttacccagtgcctctgggacaagctgtccctgagcccacacactttacctgtgaacatgagaggcgtgatagtggcaaaggcaaagaccaccatccccaggatgttgaaggccaggccgatctcagctacccaggcatcggccaggcagtactgcaggagcttcagggccagcaggctggtgaggtaggggagatgctgagctgcagaaccatagccgattagtttggagtcccagcagaggggtgtgcttagttcataaagggttaagatgtcctgggccccaaagtgcacagtgatcaccacgaagatggccagtgagtagagggctaaatgtttcctggacttctctggggcgggagccacatagagctggacaatggatcggtggtgacggaacgtgaagagccgggtggactttggctcctttaaggtctcaccaaagcagaaagctgcatagagagtcatggctatcagcaaggccaaggccagccagaaggggttggcataaccctgggcccggagccagtggcccccgaggaggcttgccagcatcccagccaccccgatgctggcttccagcagggccatccggaaggtgcggctgcgactggagctgacatctgccacggacgcaaagctagcagccagaaggccaccgaagtcgccgaggagggcacaaaggatgcgacccagcacgaagtagccgacgtggagctgcagctgcaccacaaaaacggacactagggcctggagcagcaggcccagcgaggccagcactagcagcgggcggcggcccacactgtcgctccaagctcccagcagggtggacgagaagagccccaccaggaagccgcccacgttcatgtagagggtccagtgggaggtaagggtctccacttcctgtaggggcacaatgaccagggtgcggttcctcactctgggttccacaatccccaaatcctcgccatcccgggagctacagggatgaggacttcctttggagccctaaacctcagagaatcttagcacagctttcaaaatctgccagtggagagggggaaggacatggaccaaggccccattccctttcctttccccccccttttgttaacctgcaaggccagactttagctcagcttttcgcatcccacccgctgaggttctcggtcaggcccctttgctctggtcccgcccaccatccaaaatgcaccctccctccagttacccgccactaccattacgcaggccccgcccctccgctgcccccacgctccagaccagggccctccacctgccaggctcctcgccgccccgctacctgcatggtggggtccgcgctgcggttgctgcagccccccctttggcgggtgccattgtagccgaggtcggcgctgaagcggtgccacagatactgcgtggtgagcgggccctgcaggaccaaggcaaagttggccaggaagaccagcggctctaccgggccccggcacagcacggcagccgcagggcgggcgcggggcttttccggggggctcgcgctcccctccatgtgcgtgcgcggcggagctgtcgccaggcgggcggcggggcgcgcgagcgactcgctgcctgggaccagcgacgcgtggcgtggggcttgcgctgtctgcgcctgcgcccggcgtccctccttaaatgtccggcggggaggggcctgtgacctgaggccaccggactctcgccgcgggtgcacctggctgggcgtgggccagcgaggggcccggcacccccagcccgcgggatgacctcacctgtaaagtgtgcgtagacaccgccctgcagccctccctcccggcccagacacaccacagataacaagaatatcaacaattaacatgtattgaccacttactatgtgctgggcacggtattaaaccctttttgtgcgttggtctcccgataactctacaggctagccaatattaaccatcgctatctaccgctgaggaaacgaggtcatcgggtactcaaggcagagctggaagagcacatgactcctgatgctgctgatgttctgcgctgtaacagagaggcagctggagaggatcggagtgggctgagcccagctgcctgggttggagcacctaggctctgccactaccttcggcatgccacttaccaccctgagcctctgttttttcatctgtaaaatggagttgctaacaaaacatgtctcaaaaagttgtggaaaagcagtgtctggtatattcaaagtgctattattgctattaacaggctgtcacgtctgggagtggtggctcacacctgtaatcccagcacttttggaggctgaggcgcatggatcgcttgaacccaggagttcgagaccaatctgggcaacatggtaaaaccctgtctctacaaaaaatacacaaaaattagccaggcgtagtagcagatacctgtagtcccaggtactcgggtggctgaggtgggaggatcaattgagcccaggaggcagaggttgcagtgggctgagatcgcaccactgcactccagcctgggtgacagagcaagaccctgtctcaaaaaatataaaataaaaataaaataaaaaacaagctgtcacttgctccactcctgccctaggatcttttcctgggaaactagtcttgtttctggggtcaggcagggcctggctctgcagttcccttagagaagatgggggagggcctgggaggtccttgggtgtgaacctatgctcctgggtggctcccattataggaattaggccagaaggcagtcacctgctctgctgctgaggaggtcagaccctgtctgggcctctgttttattgcctgtaaaaaggaacagcattaccttccttactcccctatctttcattcattcagctcatttactgagtgccccttacgtgccaggcactgtgctgggggactccgggaccacaacaggaaaggaaatagacaaagccctcaccaggcccgttagtttctagaatggtgggagaggaaaaatagtcaaagaatcctactaattgatacaaaattccaaccgtggaaaatagttttgaactccaagggtgctaattcaggggctggaggtagggggagcagaatcaggaaaggccaccttccctgagaacagagcagctgagtgggtttctggaggcaggtcctgacaggcctgattcttgggaggatggatggctccaattctggccactgtgactgtgcctgggcctgttggagcttgttagctaccccacctcccctgagccaggagtccgagactcaggatgggtaggtgctggctagatactagtgaactgaataacctccccctgcaagctgcccccacctgtggtcccctagagagaggaaattccacattaaacattcaagcctctggattggctccactctcctccctccccttccaactcctccctaccacttacacaaaagcttggcccagttaggtcagctgcagtgagggaggggtacttggctaaatccttggaattatttcttagataaagaactaaggctaggagaggccaaggtccctcatcaggaatgggacagggtgtggctcatcccagagccagagcctgcagtacccactagggtagaggtcttttctaac

SEQ ID NO: 1244722 - DNA, 4001 bp, Homo sapiens
gaggttaggaggctgtttcaatctgcacagctgcttcctgacttactttcggaggtcaaagcagggcacgcagccccaggtcttgagattccaaatcatgaggtgtttttttgcccaggctggagtgcaatggcgcgatctgggctcactgcaacctccgcctcccgggttcaagcggttctcctgcctcagcctcccaagtagctggaattacaggcgcctgccaccatgcccagctaatttttattttttattttttgtatttttagtatagacggggtttcaccaggttggccaggatggtctcaatctcttgacctcgtgatccgcctgccttggcctcccaaagtgctgggattacagacgtgagccaccacgcccagccatgaggtgtttttgttttgttttgttttgttttttgagaccaagtcttactctgttgttcaggctggagtgcagtggcaccatcctggctcactgtaacctccacttcccaggttcaagcgattctcgtgcctcagcctctggagtagctggcactacaggcgcccgccaccacgtctggctaatttttgtatttttagtagagacggagtttcaccatattggccaggctggtctcgaactcctgacctcaagtgatccatctgcctcagcctcccaaagtgctgggattacaggcgtgaaccaccgcgcccagccccaaatcatgagttctttctggtctgtgagaaagcatggctgatggatcttattccatggctttgacctcggcattacccttgctgtcctgcacaccacagcgggtgccacaatatcccacaaactaccgagcccccactccagaggcacagcggcccccctcagcccgcgcaggtgcagaatgtgggcctcaaagtcaaaagcttattcacgccttaagtgcataccagttgcttcttgtgccgcgtcctaccctctcggtttgaaaaccacccaagctggcaggagaacgtggataggattgtgtttttgtggtttttaaaaccacattatttttaggagacaaggcagaaacagccctaacctaatgattaaaaagaaaagaatcccacagataagaacacctcgaccccacaaagaaccacattaaaaccccttttttctttcacatacataattactggcggggagggggtggtacaggatgcctctggtttcctcggtagaggttgactgaattctgaagaaatcatttcgcagctctgagtccacgacagaccacgcaccccctcctccgtgcctcgggattatttagatcgcagagctcccgaacttttgaccgctacttttcaaagaaacaagttcccttgtgttttgaagttcaggcaacttgcgttttattggccggaatcagctcccagagaaggcacccccggatgcaaatgcagcctggacctggtagagccccgttaggggcaaaggtcccagctctccggtgtctcctggcgcaggaggctggagccgccggcctctccgagccaacatgcgcccgggcgcgtaccagccgttcccgcagtgccccgcggggcccccagtcgggtggtgcggagcggaaagcggccgggacgcaggcagaggagctggggtgcccgcccggctcctggcacgatgctccccggagcccgccggcggacagctcgctcggtccccaaagcccgccaaagtcacccgcggaggcagaaatcaccaggtccccagcccgccggtaccggcctgccactgaggccaccttactcaccgcggggccagccaggaccaagagcgcccgcagctcttctcggaaggcggacagccgcaagcagcgcgacccacggacctcaagggtggcctccgggcctccgcgcactggcgcgggctcctcaggagcttccatgtgactcgcgcgctgcggccgggtagcgcggaggccggcagtgggtaccgcggaggccggcagtgagtaccgcgcaggccggcagtgggtaccgcgcagtgcagcctgctctgcagtccccgccccggccgcccgcccagagcccgccccgcgcctggcgcccgggggcccgactgagcgcgcagccaggcagcctgcgaccttgggcgcgccccttgcacctctctctgcaccactgcggacgcctgcgggtcttgcaaagaccaaggaactcctgcacttggaaggcaaagtttgaaaaagctctgtaaactaacggaacgcgctccgggggctgggtcctccacgtctcggacgccaggactcaccccggctctccacctccgctgggggtttcaggttctgaatgacctggcgtggaaggacccagaggcctcgagccgtgactcggttagcaccccgcggggtgtgtggggttgggcgcatttgctgtgcagattgagttgggtacaccctttgatgctggttagggtgttgcatactcctctcctctcatcagttgttccattagagaacttagaatctaccaggatagagcaacatgctcccatttgccaagtagcacagtttgtgccagctggtcgtgttggaagtttatccatcaagcctgctgtgggagtacgagaggctgcggcccagaagggcaggagcagcgcgctttcctcccagagcctcagcttcctcatctgcaaacgtgaaagaacactcgtcgccagctgtgaagactggggttgcctgggcggaggaccggagtcagtgccacctgccctcagcctggcaccagccgttacctaataagtgtcagttaccaggacaagattgatttctctaatagtcaaaattccttccgttgtaatgatccaatgtaagtagagaaaatggaaaacaaattttttggctcacataatcaggaagtttggattcagggatttgaaaacaaggtcattaggccaggcgcggtggctcacgcctgtaatcccagcactttgggaggcctaggcgggcggatcacaaggtcaagagatcgagaccatcctggccaacatggtgaaacaccgtctgtaccgaaaattagctgtgcatggtggcgcgcgccataatcccagctactagggaggctgaggcaggagaattgcttgaacccgggaggcagaggttgcagtgagccgagatctcgccactgcactccagcctggtggcagagggagactccactcaaaaaaaaaaaaaaaacaaaaccagatcattcttgttgtccctcttcccatctctgtccctctcctcccttctcctcgccccttgggattctttccgtagtttctcttcctcctctgccggcagcctttctcttcctgtgcaagtgacagtggtggcctctgataccctcgttcctatctttcccgtctgttaaaccagaaagtaaggccctcccctcctctcttctggttccaaactaacaaacaaaaaactgggagaaaatctggttggccctgcttaggtttcttgcccacctctggaacaatcgccctgggtgggaaaatagggtctgatgtttggctggccctggaccatgcacccagctttgaacctacagggttagggttaggtgccctgtgactggtctcgtcccacaaggactgtacatatggagtagcgcagtttcccaaaagaactgagagtgtcaacagacaaatacccgaggatattcactagatctctgatcactgctgttttttgataattttctggaagtcctgactgatgtaataagacaggaaatggaaatgtaatgtataatgttaggaaagaaaaggcaaagggattactcacagtagaaattgacagaccgggccaggcacagtggctcatgcctataatcccaacactttggaaggccgaggtgggaggatcactggaacccaggagttttgagaccagcctgggcaacacagtgagaccccatctcttaaaaaaaatccacacaacccaaagaaataaaatatgaacaaaagctaatagaattgat

SEQ ID NO: 1244723 - DNA, 4001 bp, Homo sapiens
aaggtgtcacatgccgaagacaaaccaactcctacagaaactccgcagacattgacaaactggcgccacacacaggaggaaacaagagcttgtcaggtgaggcctgaagagaggcccctgcatctgggctgagccagggtcaggaaatgctgcccagcaggcagcggtggcagaggctctgctcagcagcctcatgtgctgtgtgccccagggccagaccgcctccatctccggccctcaggttccacctgtgaaggcagctgtccagccacgtgggctgtgtcttcccatccctgaccagccacccaagacgggcccacccgggaacccggtggagaagcctggggagagaacgtccctgctctgggccaagctgggtactcacggccaccgcgagggtcaccgatgccagctccaccttgcccaggtgcccgcagaacacagtgctcacgatgtagatcataaaagtcagcacctggaacaggaactggaggacagcggccaggtcagactcggggccacaggtgcccacacagccgagccctgcaagacaggcctctccagctttgagggccccgcaccagtgccccgagaggtcacctacgcctggggaagccagggctggaggtcggatgacctagcccagctcccattctgcgttctgcagctgcagtcacgcctggcctccacgtccctacccagaagggtcagtgcctggcgcagcgcagtgcctggcgccctgagcttgacccaagtgtctgatactgctattgcagttcctattataacaataatttggtcaggccgcacacccccaaaaaaggaggggaattaaatacaccaaaatcttagtaatggctatttccaagtactaggatttgagttaaatttctttcttctttatatctttcatttttttctaaaagttttacaggaagtgcaattccattactcctttttggttttgttttttttgtttttttttttttttttgagacggagtttcgcccttgttgcccaggctggagtgcagtggcgcgatctcggctcactgcaacctacccgtcccgggttcaagcgattctctgcctctctctcccaagtagctggaattacaggcgcccgccaccatgcctggttaatttttgtatttttagtagagtcggggggttctccatgttggccgggctggtctccaactcctgacctcaggtgatcctccctgctcggcctcccaaagtgctgagataacaggcgtgaggcagcacgcccagcctattcctcttcatgatcagaaaaaataaatgtatttaaaacaatttcccctttggaaatgaaatgggtagccggccccttcttccccctgcgaaggtgctgcaggcttcatgcatctctgggtcccatttgtcctggagccatcttccaactcaggcttttgtgggtttccagctgaggcacacccaccccttctgtgtgggggctgcctgctgctgagcaaagtcaggccccactgccactggggattgtccagagacagctttcaggagccatcctgctgtccccagactctggacctggcagtcaacatgggcagtttctggggaaaatgtgagcacatttctggatcctgcctgcaaggcagacaccctcagcctctcagcttcctccactccctacctgccccccagctcctcctccttaccaggggtccagaaagggcaaagagagtccacatctcagtcccaaagcctctgggaaccagcctgctgagggcagggcagcagcccccatggtccagggccactgtgtcctggaggctgtccattcctggccggggcactggctaccctgcacgcctgagcgcctgcacggccagctttgtccagcgagccaccccctgcctgggcagcccgtgtcggtacagcctggctgatgagtaaggggcaggaggaggggctaccatggcaacttgtgggatgagccctgcctcctagggcactgagtccctgctgccaagcctactgcctcagccactagggaggacaggttcctgggagtcacccagaccgctgcctgttgtgtctggtctcccagagggattggcagtaaggcctcagcaggagaaggtccagggctgcctgcagtggctgtgggaggtgtgctgaggccaggacagggcagcctggctggggcagctgagccactgggcgtcctgtacccgggcgtgatggtgcccacagtgactcccgtttttcagaagaattggtggcctgcccgaagtcacagagcaggtggtggcagagcctgaacagccctcagccctgcttttccctgggaggggtggcttcccaagagacaggggcctggcaaaccccatggcagtgcggtccctagcctttcatgctggaggggcctgggcctgggcctggggatagggatgggagctaggacacctcggcggagtcccaagccccccactgcccgtcacccctttcagcagcatatctgagagccaggggtggcagtgcttgggaaagcagctcactatgcacgccagtcactgtgcccagcaaggctgtgactcgacgtcccacagggtcctctgtcaccttcccaaattgccctctctgcttttccttgcagggatggcctgtgactcccccctcaacctgcctcaagaccagcagggcagtgggaaccaagagaggcatctaaggattgcaccggtcacctagcccagtcctggatcaagcttttgggtgtggttcagcccaggagaaggaggagtgagcgaggggggcaggaagacagcaggcaggctggccagtggctgtgggagggctgaagacatcccaaaggccccacttggttcccatgtccacccctgcagcggaggagtggccggcaggattccgagatgcagcccccagagccgcgaggaggaaggagcagaccctgaaggagaggaggcaggacaaatacaaaaaaaaaaaaagggtttgctacacccatgggcggccccaaacacaggcacagccccaccccagtcaacacgcagccttcttttttgacacagaattctgaaacgctccactggatcctcccaggatcacctgggaggtcacattcctgcccttgttctgatggttcttatcacagcactctccaacctgtgcaccaaatagtacctttaccacctgcctagaggaaagaagacattttatcaccatcgtgattgtgatgatgacaccaaacaggaggaagtacaggtgaaagctacagccctgcaggccaggctattgctagtatgtctgacttccctcctccaacaccttctccacgtccttctcacctttggccagttctcatggtcagcctacctcttccaaaagggcagccgcaaatcctcctgcatccaggggacctgggcctggggtctctgttatgtgaaaccagctgcttccagctgacagggcctctggggagagcagtcacctgctggccttggcctgtcacctcctgtcgcagcattgcagtgagccctgcagccagaagcaatacttcttgggagcccatggcgatgggggtgttcagggagcccacacgtggaggtataggcagaagaatccatctcactccaggtcacttttaatgaggacagctggttcccgtgcccccaccaagctggaaggtgttcagtgcagacgccccgccatcagctcggtgacatcaggctttatccagagctgaccagtgttcagcactcagctgcacaggacaaaggtcgggtcatcttcccgagggccagtcctaggccgagcatctccaaaatcccttctcaggaacattcccaggatttttgtgatagaagccaatgcattcctacattttcttcgggaagacactctcctcctacactcctctcagaatttcaatccccagaccccagtgggtttgaccctggggaggagcaagggcgattactgactccactgccatgc

SEQ ID NO: 1244724 - DNA, 4001 bp, Homo sapiens
gggtgcgggggaggggtcctggacctgaggacgaggtagtccctactgcagggcttggctttgctcctgaggaccctgatgacccacctcttctctctctttttcctcctccctctctgcttctcccaaagttcctctttctcttccatctttattcactttcttccttctctggacttgcccatgcactttcttaggcctcagatgctaaggcctccagggtgtctaagccttaggtactaaaagtcccacccatggggctgggactgtggccttggttgcctatctgaggagtggaatggtcagaggggccctcagagctgcagaatccagaggtccaggctgcctctctgccactgactggctgaagggccttgggcagcttccagcctgtaggcctcagtcaccccatctgtacaatgggagtgccttcctgccagggttctgagacatcagtgagagagaagaggggaaaacagaggtgccttgagctcagttggagacttacagggcgcacccatgacccagattgccacccgccagccaggccgccccccagctgcaggccttgtgctgcctagcactgataagggcctggacccagatcgctgccccaagttttggaagtgcaccaaacacctggccagctagccagctggccagggccaggccagataagggtgagcgggacatctgagcctagaaggtatagcacagctgggaagacacggcgggagaggggattgaccagatgacagggacaacttcctagtggtatggcaccacctttgtgtaatcagcccgaactgcacaaagaactgtactgccttaactcttagaatccccaaagcattctgtgaagtggtttggggattctaagaggaagaagagtaatgtcattaatccattctacagatgcgaaagctgaggttcagagacatttacctgcttcagccacccagcaggtaggtatcagagccaggttacagcctggactacctgactccagccacatccctaagcactatgctaagttgcctccaacaaaacaactgttagctggtttagagttagttgttaagatcacggactctgcagtcggactgcctggattcaaagcccagccctgccatttactaacggcgtgtgacttcaactctctgtgcctcagttttctcatctgtaaaatgggggtgatgataatgatgcccatctcatagacctgttgtaagcattaaggaaatttacatttgtaaggggcttagaacagtgcctagcatataaggagcgctatgaaaatgtttgctgtcattatcccttgctgctggggttacagtcagacttgccatcttcatttcccctctgatttgccctcagttcccatggaattagcctgagctaagtgttttgagattctcatgtggtaggaggctctgcagttccctccaatactgaccacgctgggcgtggagccaggtgccccaggtagacccctggaagtgtcccaaaggggatactgtgtcagctgacatcctgcctcctaggtgggagagggggtggtctgaggaccccattaggaaggaaggagtctggggtggacaagacctgaccctgtgggatccaacaagctgacaagggcccatacctggaggggatcagataccccccgcaacacacgcaccggagccacacatacctctgctgccattgaccacctgccaccctcctcttttcaggtgccaatgggcctgttcccttaggggcaacatatgcatggtaacattctcaccccacccacctgcacccccttggaggtcaggagcctggcccacctgggcatagattcaggctgggcacctgtagaagccctcagggcaggcaccgaaggaccatccccagcccctccctgccctgcccacctgctcacgagcctcagggtcccttggtgaagtcctgcagccgctggtgccctctgcgaccagctacgttcccactcgttctgacagcaccagcgccccaggggcagctcgcaaacccctgactcatgcccccgcctcctaatctgcccgccccactggccctgggagccccttcccacaccccccaccccgctcccactgggtgcccagtaaacagagttatctcttacccacatctggacagctgtgagtctggcccaccccacccgcctggccagcccccaaggcctctcggggccctcctggtccccatggttctcctgactcttcctttgtggatgaaggtttgatcgctctgtcctcagggctcccagtgccctggcaggaaggcaccagcctccagaggtccctgtcctgcctctgtccatcctccactctggccaggcccttctgctctggccccaaggtgcaagggcgcctgctcctctcgtctctcttggtatccacgctaggactcactcctcctctgcagttttctccacagggaactgctcagcactcacggggcacggacagccccctcccctccttgatccagactaggatgccccagccacattctccccaagaccctggctggttctaaagagctggctcctggacactaagacactgacattcagtcaacctgaaacaatgtcagctcaacaaaacaaccatccccacaccaagctcttcaactcacaaagctctaatgtctgggcatactggctcctctgtaggcagcctggctcaggcccccaggccagaacagccgcattctcagcccctgccatgcccctccccttcagttcccacccctacacccccagtttctctgctctggggggtgaccagagcctggtcacctcttcgtaggctctggttgctaaagaggcagagactgaaagatgagtacagatcagcaagaatgaagaggggttttcaagcagacagaaaggggtgttgtggccatcgctctgggcacagagaggagggtgtcctagtacagctccggcatggactggctgaaggaacctggacaagtccctggccctctctgggcttctgttttctcatccgtaaagtgagagtgttgggttatgtggccaccagcctgaagttcagactcaagcagaagaaactcaaacacagggacacacaggtggacaaatcccgccactgcaagaccattcactatctgcaccacaagcctgccaggggctgagtcctgtggagagagaaaaggggagggacacgggtcctgaggcagaatcctgtttatggaggacctcggttccaggaattatgctgaggccttcatcttgtggtcacgctggattcctacaaaccccccacttcacagaggaggaaacaaagccacagagaggctttcccaggaaaaagaatgcccaacggaccagcacctgccccgtgcagtgcaccatgcctggacttcacacgctctagcttgccaagctctctaagcccatctgaggacaacactgtttacgatgtttattcacctctcacagagaaagggcagcaaaaggagagcagtgacttgcccaagtcctctgggctggtgaagccagcgtgggcactccgacctgctaatctgcctggacagctggtgttctgccagatctgagcccctcccaccacccaggccttggtgccggtcaggaacagagagaggccctggctaaagggggctggaggtgccttctcctgctccagctggtgggatctgtcccaaaccctgggcccacactgggttggcttcctatggcctgtggcagtgagtgccaagtgaagacctttgactccttgacccagccagtgtgcccagtccccttgcccctctgcctgccctaggagtcagagacagctgagtgcagggggcagcaatggggcacctctcctggggcccgggaaggactgacagctggctgggggtggaacaacaaatggcatcatctggcttagggggaaaatctggccagctgtttggctgttctgcaggcaccaccccctggcagc

SEQ ID NO: 1244725 - DNA, 4001 bp, Homo sapiens
ccccaaccttaagttccacccaccaagcctggggacccttttgcacctgcacagcacgcccatggccaggaagcaggcaagggggttggcggcactgcccagcaccacagccaggtggtaggccaggcgcccatagggcaaacaggaaaagctctgcacagaaggcagcacgccattggtcacggcactggtgaaggccatcaggcccagcaggaaggcaccatgggctgagaacagctgatgggcctcagggtctgggccagggatggtgcctgctgcctggctcggtggctcctgcaatggcaaagcctcttcttcctccttctcttcctcctctgctcctggggatcccagttgaagttcaggccctgagccccctgtggttacagagggtagtgatggcaacagcaacaggagaccccggaaggcggcagctgaagtgaccagaagggcagtcagtgcccagaagaaggtgctggcaggaaaacgctcagggaagtcgaggggaggcccagaggtgccattggtgggcgctggtgggcactcgaggcggcccacaccttgcactagggccagcacacaggggagtagggcactgagaccctgacccaggaagaaagaccgtaagaaaggaggtggcaggtggctcaggaagggcaggaaagtgacattagaggtacaacaggccattgccaacaccaaggccagagttaggaaggccacagagtggagctgccctgccactggggccacgtggtgccacagaggggccagcagggctgtgcccactacactcagcacctgtaccacctggatggggacctgctcgcccttgcccggggccagctgcctccacagggtcaccaccagcagacccaggtttcccagcgccacaaccacagagaggtatgaggggaggctccaacctgcagggaaggaatgatgccatgtcaggagcacagtggctaagggacaaagagctgccacaggccacctttctgggcatacctgccccacgcttccctgtacctccctcccactcaccctctggaaggtcttttaccaccacaggcagctccacccagatcccgttcacagcagcccaggagcccatgccaaaaagggccaccagcaggtgggtcagcaccagacggcccagcgtgggtgctgccattcagcccaaagctggaccctccaggacagggcaaaggtcacaggcaggtccttccctaggtaggtccaaagatgctttggttcttctggaaactgaagaccttctagctggagggaaacagacaggctggcaggtaataggctggtgggacagaaccggagtcagaagacaagtcggtcagactgctaagaccagggcaactggagggagaggtggccgggggcgggcggggaaggtggggagccaggacttaccacggggcaccggctgtgcgtttgggtacagcgacccagcagtgccggcaggcagacaggcagaaagctggcccgaggtgcagctgccccagaggagcaaagagggagctgattttcctacccacagaggacccggggtccaagttgtcaaaacagctcagcactggccgggtgcggtggctcacacctgtaatcccagcactttgggaagctgaggaaggcagatcgcctgaggtcaggagattgagaccatcctggccaacatggtgaaaacccgtctctactaaaaatacaaaaattagctggtcgtggtggtgggtgccagtaatcccagctactcaggaggctgaggcaggagattcacttgaacccggaaggtggaggttgcagtgagccaagatcacaccactgcattccagcctgggcgacagaacgagattcggtctcaaaaacaaaacaaaacaaaacaaaacaaaaaaacagctcggcaccaacacgctcaccctcaaatggaccccgggacaagggcacgtctctggtgccacttgcaaccctagcgcttttgcgacactcaggacttgctgaggcaggtcgagttggagaggggagtggctggggcgggctctgcccggaggggcgtctccgtgctgccctcccgcctgcctcaggggggcatcccgggagccgccaggtgcgcaggggtccccgcacctccggatccggcagtccccggacccagcggctggcggtctgcctgagagggagccccctccgccggggaggcggcccagcccagagcccacacagctggggttttgttgtttgttgttttaattaattaattaattttgagacggggtctcactctgtcacccaggctagagcgcagcggtgcgcgatcgcggctcactacagcctcaacctcccaagctcaagggatcctcccactcagcctctccccacccccccacaagtagctgggaccacaggcgagcatcaccatgtccagctaattttttttttttttttttttttttttggtagagacaaggtctcactatgttgctcaggctggcttggcactcctgggctcaagcaatcttcctacctcagcctcccaagtagctgggactacagacgcaccacacctagctaccgccacgctcagctgtttttacactttttttttttttttttttttttgagacggagttttgctcttgttgcccaggctggagtgcaatggcacgagcctctgcctcccgggttcaagccattctcctgcctcagcctcccgagtagctggaattacaggcgcccaccaccatgccctgctaatttttgtctttttagtgcacagggtctcgccatgttagctaggctggtcttgaactcctgacctcaggtgatccacctgccccggcctcccaaagtgttggggattacaggcgtgagccaccgtgcctggccagctgtttttacacttttaaatggttgaaaaaaaattagctggacgtggtgtgcacacctggctaatttttgcttttttttttttttttttttttttttgagacggagtctcgctctgtcgcccaggctggagtgcagtggcgcgatctcggctcactgcaagctccaccttccaggttcacgccattctcctgcctcagactcccgagtagctgggattacagacgcctgccaccacgcctggataatttttgtatttttcgtagagatggggtttcaccatattggccaggctcgtctcgaactcctgacctcaggtgatccgcccgcctcagcctcccaaagtgctgggattacaggcgtgagccaccatgtctggccctttaatgatattttgtacttgtttactcactgaccatctcagggattaccctgacctactacccatttttgtatggcctgctagctaagacaggttttcacatatttatttatttatttttattactatttttgagaaagtgtcttcctcaaaaggaagtgcagtagcacaatcacagctcactgcagcctcaaatacctgggctcaaggatcctcccacctcagcctcctgagcagctgggactacaagcacatgccaccacgtccagctgtttttacatttttaaatggttggaaaaaaaaatcaatatctgtagtcccagctactcaggcgtctgaggtgagagcatcccttgagcacaggaggtcaaggctgcaatgagccatgattgtgccaatgtactccagcttgggtgacagtgagaccctgtctaaaaccaaaacaaaacaaaaaacaaagaaaacaaaagaatcgtatttcctaacccgtgaaaactaaaagcatatgaaatttaaatttcggtaggccaggcgtggtggctcacgcctgtaatcccaacactttgggaggccgaggcgggctgatcacctgagatcaggagttcaagaccagcctggccaacatggtgaaccccgtctctactaaaaatacacaaattagctgggtatggtggcgggcgcctgtaatcccagctactcgggaggctgagatatgagaatc

SEQ ID NO: 1244726 - DNA, 4001 bp, Homo sapiens
caactgtcacaggaatatagcacgttacagtttgcaacagattttcacttccattggacccttgctccttggaacagccctgagatgtgggctgcacagaaacccgcattgcgtgtttgaggaaactgaagcccacagagattaagtgacttaagtacacagagcagagccgagacttgaactcggctttgccgatggccagcactgggctacttgtgagttaatatttaatcacatacaggttgaggagccgttatccgaaatatttgaaaccagaaaagttttggatttcggactctttcagatttggagatacttacagaatacctgccagttgaacatccccaacccaaaactctaaaatctgagatgctccaatgagcatttgctttgagcatcatgttggtgttcaaaatgttccagattttgggtttcagatttttgaaatccaacctgtgataattaattttaatgactgcggctgctactcttataatcaccactgctacaactgccaccaccaccaccactgctaccactgtagaaccaatggcagcagcaaggtctggtcctgtgtgggccccttgatagcagacctcaccccaggtaggtggtgtctccatataacagatcagaacactgaggcccaggaagctgaggggacgtgaccagtctcctgtttgccaggccttcgtgcttaggccaggggttatggaagataagaacgggtactcggccgggcgcggtggctcacgcctgtaattctagcactttgggaggccgaggcgggcaaatcatgaggtcaggagttcgagactagcctggccaacacggtaaaactctgtctctactaaaaatacaaaacattacctgggtgtggtagtggacgcctgtaatcccagctactcaggaggctgaggcagaattgtttgaacccaggaggtggaggttgcagtgagccgagatagtgccactgcactccagcccaggtgacagtgctagactccgtctcagttaaaaaaaaaaaaaaaaaaaaagaaggggtactcattctccccaggagactgtcagggctcagggatgccaggctggggacctctggggcttaagaagtggagcccaacatccccaggcgctaagcgtggagcaggtgacctgaaccaggctgtgtccaccttccctcaggaaggcctccacgatagaccagaggagcccttcccttgctgcagggccagagcctcggtttctccatctgcacatgaaacagcctgtccccaggggccccgctgcccctggaatctgtgtgtggggtcagatctctgctcatttctcactgttatgaagggagaaagaaccggcttatgatctagggctaggccacaggacataaatccccagggagcttgttcaaaataaagacccccagttcccagggccctccctgcctccggattctgatccagcagctctggggtgcagccagggaatcccggggagcctgttgttcaagcagacaggagtcactgacaccatggagactgggaccaggaggctgatgggccacacccaaggactccagctgggcagcagcacaaaagcccagttacctgttagagagaatttcctcctcctcactttgcagatggagacgccattacccaaagagagaaacgggcttggtcaaggtctccaagcaagtctaccccaggctgggaggaggaccacaaggatcactaggccaccagctgggaccaatgctgacaccacagggacatgctggaccccggttcccaccccaagcaccaaccctgagagcccacttggccaacaccaccacaggtccccttacccatatgcccacggccacattcagagcaaaatacacagtgatgacgatgatgtcagccacgctcagctgcgtcccgggagtgtggaggtcgctggtggagttggcggccatggctgtcctgccgcaggcactaggtatgagcccgagggactgaggggcaaaccaggtcagaaagggtttcctggcagggagctcattgatcattaaaccaagcggacagtggcatctccagcccatgatgtggctgcatgcagggcagctgcctcaccatgcagttcagcttcctcaccccatggtggggtgcagatcccagagcgcaggagtcagggagcctgggagaagcaagtgggaggaggaaaggaaggagcctccttgaactcggagggggcttggggaaaatgaaccgcatttagtggacccggaggcagcccaaatagtcccagaaaggctgggttgcttaatgggtggcttcacctatatctaatttgtataagaagcatagagcgtagggacaaccgcctcacctctgaagatactgccgtggcgggcagccatgtcctcccttggccatcgggctgtgagtggactgagcagggcttgggagggggacacctgcattatggctcacgtccagccaacacagcccaggctcagaggcagccccatgtcggacaataaagtcctgcttccagcgtttctgctttctttttctagacccgtgaaacagtcccaggcccctcaacttgaccatgcattcggcccccaccccgggcaatgtctgcctgggaccacagagggacccaatatctgtcacacaccaaggaccatgcgtggctgttctgcacatgatcccatttcacggaccatgcgtggctgttccgcacatgatcccatttcacgctcacagcagccacgcagagtaggcaatgtctcatcctagtcaaggaaatggccatccgccattacgcagccattgaaggcgcagagtaggattcagtgcagatgtggccccaccgtctccaccgcagtgacagtgacgagttccatctggattccatcagagtgggacgctcgctcactaattctatcagtgtacacagcagggctggccggcagtctcacgcctctgctcagtgacatgactcgtgactttgcaaagcatttgcagtttaaccagacatgcagcacttccagaagtgttaatgagtgagcggctgccaccaggaacacgctggcctgcaaacccagccagcctgttactcaataaccctgaggtgcgggtaaaaattaatcccctcggccaggagcagtggctcatgcccttgggaggctcatgcctttgggaggccaaggcgggtggatcacctgagatcaggagtttgagaccagcctggccaacatggcaaaacctcgtctctactaaaaatacaaaaattagccagacatggtggtacgcacctgtaatcccagctacttgggaggctgaggcaggagaattgcttgaactcaggaggtagagattgcagtgagccaagactgcgccattgcagtccagcctgggcaacagagggagactccatctcacaaaacaaacaacaacaacaacaaaaaacaattaatagtcctcacatacaggactaggcagaagaaggaagggaaaaaggaagtcactgctgagagaaccctcaggcaggctcaactgcctgccgtctccccttgcctctggccagcgagcctcagatggtgtttacttcccaagccattgcttgcaatgtgttttaaaacaaaaggctgctttgcactgatcaggaggacccagctgggaggatccagacttaccaaaactatcccattaatagagtagttgtaccagcagcattggctctgagaccgttggctaggtcttagaaggaaataaaccacttagtgataactgccgcctttggatcaaaagtccttgggatttttgccactgagtttaaatggaaaaaaatgaaaaaagagaaaaaaaatcctagggaaagaaagcaccagtaaaggtgctcttaaggggctgagactgatttgctggttctgtcctgaaggacggggacaggaggagggtggcagcggaggacatggagggagaagtaccaaacaagcccagccatgt

SEQ ID NO: 1244727 - DNA, 4001 bp, Homo sapiens
ccggggagcctgttgttcaagcagacaggagtcactgacaccatggagactgggaccaggaggctgatgggccacacccaaggactccagctgggcagcagcacaaaagcccagttacctgttagagagaatttcctcctcctcactttgcagatggagacgccattacccaaagagagaaacgggcttggtcaaggtctccaagcaagtctaccccaggctgggaggaggaccacaaggatcactaggccaccagctgggaccaatgctgacaccacagggacatgctggaccccggttcccaccccaagcaccaaccctgagagcccacttggccaacaccaccacaggtccccttacccatatgcccacggccacattcagagcaaaatacacagtgatgacgatgatgtcagccacgctcagctgcgtcccgggagtgtggaggtcgctggtggagttggcggccatggctgtcctgccgcaggcactaggtatgagcccgagggactgaggggcaaaccaggtcagaaagggtttcctggcagggagctcattgatcattaaaccaagcggacagtggcatctccagcccatgatgtggctgcatgcagggcagctgcctcaccatgcagttcagcttcctcaccccatggtggggtgcagatcccagagcgcaggagtcagggagcctgggagaagcaagtgggaggaggaaaggaaggagcctccttgaactcggagggggcttggggaaaatgaaccgcatttagtggacccggaggcagcccaaatagtcccagaaaggctgggttgcttaatgggtggcttcacctatatctaatttgtataagaagcatagagcgtagggacaaccgcctcacctctgaagatactgccgtggcgggcagccatgtcctcccttggccatcgggctgtgagtggactgagcagggcttgggagggggacacctgcattatggctcacgtccagccaacacagcccaggctcagaggcagccccatgtcggacaataaagtcctgcttccagcgtttctgctttctttttctagacccgtgaaacagtcccaggcccctcaacttgaccatgcattcggcccccaccccgggcaatgtctgcctgggaccacagagggacccaatatctgtcacacaccaaggaccatgcgtggctgttctgcacatgatcccatttcacggaccatgcgtggctgttccgcacatgatcccatttcacgctcacagcagccacgcagagtaggcaatgtctcatcctagtcaaggaaatggccatccgccattacgcagccattgaaggcgcagagtaggattcagtgcagatgtggccccaccgtctccaccgcagtgacagtgacgagttccatctggattccatcagagtgggacgctcgctcactaattctatcagtgtacacagcagggctggccggcagtctcacgcctctgctcagtgacatgactcgtgactttgcaaagcatttgcagtttaaccagacatgcagcacttccagaagtgttaatgagtgagcggctgccaccaggaacacgctggcctgcaaacccagccagcctgttactcaataaccctgaggtgcgggtaaaaattaatcccctcggccaggagcagtggctcatgcccttgggaggctcatgcctttgggaggccaaggcgggtggatcacctgagatcaggagtttgagaccagcctggccaacatggcaaaacctcgtctctactaaaaatacaaaaattagccagacatggtggtacgcacctgtaatcccagctacttgggaggctgaggcaggagaattgcttgaactcaggaggtagagattgcagtgagccaagactgcgccattgcagtccagcctgggcaacagagggagactccatctcacaaaacaaacaacaacaacaacaaaaaacaattaatagtcctcacatacaggactaggcagaagaaggaagggaaaaaggaagtcactgctgagagaaccctcaggcaggctcaactgcctgccgtctccccttgcctctggccagcgagcctcagatggtgtttacttcccaagccattgcttgcaatgtgttttaaaacaaaaggctgctttgcactgatcaggaggacccagctgggaggatccagacttaccaaaactatcccattaatagagtagttgtaccagcagcattggctctgagaccgttggctaggtcttagaaggaaataaaccacttagtgataactgccgcctttggatcaaaagtccttgggatttttgccactgagtttaaatggaaaaaaatgaaaaaagagaaaaaaaatcctagggaaagaaagcaccagtaaaggtgctcttaaggggctgagactgatttgctggttctgtcctgaaggacggggacaggaggagggtggcagcggaggacatggagggagaagtaccaaacaagcccagccatgtctgcgggagaagaaacgccacccgaagcccagtcacacccacattcccaccccacctgacccaacgggatcacctattcactcaccccaagaaacatgaagaccgtcctagctgagaagtcatccgtaccacaccccttgaagcctcttccatccccggaagaagtccctcagactcatgagaaccaggaacgggatgtggaggggtcagcagagcctaagcaggacgactggagccatttgtatcttgtgtgtggggcatctatgagcttatgagtttctttcttaagtgcttcagaattgtgaccaaggcatgaccaaccatgtgatgagctgggcagcactggaacggactgcacatgagtgaagggagcccatgaagggagcccacggtcatctgcggcagcttgcagcgaatccctccagggcctctctctgcctgcctgccaagtctagttccagcttatctgttgctcctgcttttgcaataagcacaagactgatcatttattcctgctaagtattgtctgcttgtctgtcctgatggagaaactccccaagagtcctaagctacaagggcaagcgtgctcagggcagccaaaaagtttagaaatttcctacataaccacccagagaaggtggtgagtgaattatgagacctccaaaccatggaacaccatgaccattaaaaagatgaggtggctttatataatggcatggaaggatgatacacttgtaagtgaaaaaagcaagctagagaatatagacccatatccatgtttatcctctcattatatataatgtaaggggctgaacagccacagtgttttgaaggacacacaccaaactgctaaggagaggagaaaggagaattatcactttattttattttatttttttgagacaatgtctggctctattgcccaggctggagtgcagtggtacaatcacagctcactgcagtctcagcctcctgggctcaagggatcctcctacctcagcctcctgagtagctgggactacaggcatgcaccaccatagccagcaaagttttgtgggtatttttttatagcgacagggtctcaccatgttgcccaggctgttgtcaaactcctgggctcaagcagccttccaaagtgctgggattacaggcgtaagccactgtgtccggcccaagttatcactttttatgctttggtgtgggctgggcttttttgtaagacctctggccttggccttggtttagaccagcaagctggcccctaggggtgcccccgaccctgcctgggctcccctcaccagccaggtcaagcagtttccttccactgatacagaggctcaaggagagtgttgccaggtgctttgtgaagggtggtgggtcccagacaaccatttcctgaatgctcacctgcccacctgtgctgggtacctgcatctgcattggttggtcacctccccgcagcccttccaggcggccttcacttccctcc

SEQ ID NO: 1244728 - DNA, 4001 bp, Homo sapiens
agcaagcacctgctgtaagaaacagactgatccatgctcctaacccccctccagccaagcatccccattcctcaggcacctcacctatttgcgaaactcttcaacatgcctctccaagtttcatcaaaatgctcagacgactctaaacatcccccgagaggaatttctgaggtctttcagattccattaaaacatcaacattattcccccatcccactcctagtatatatatatttcttaaacaaggagattgaaaaaaatgggtttgaatatctgtgctggtggttatatctctgagaggtcttagatggatcaccagagtgttgaggggacttttgattaattgtgaagcactttcaatctgttctttagtgggaaaaagaaagaaagaaagaaaagaggaaaaacccatgccccaagtggcttgctcaatttgcacaaacctcataagaacctgcttctcactcatccatattggaacggtcactgccaccccagagtgcgtggcaggaaaacccgaaccctggggcctcagtggcttcacacagaagcaagtaatgggacaaagagtcaaagctgtgtgctccctacgctcctaaaaacccaacactgacgctgcccacagttctctgtttcattaaacacaagtcccaatgtcaccttcttagacatttttcctatgtaactgaaggcaaaacacattaaatatttgctctcgtcttcctatgatgagagttagctagcaggctcataaataatccattgaccaggttcacttttctggacaaaactgatggtaaaaatacatacacaaagtctttgtaatgtctgattcagaaattctacccctctcaaattcttcagagtcccaaatggaaaaggaacaattcaatatgcaaaagccccagttcagaagaaaatctgctccttagcccaagacccaaatccactcttgagctccagagagctttttttcaagaacaagtttgaatgtacacaattttcaagcaaatgatggttatatccttcaaccacgtagcacagtcgttggagttggagtttcacatacattctgaatggcctgtgaggtgtctgagagcgcctcagctctgacagtgaaaccacccaagcgcacggagactcggcccacttaggcgccactcagagatttctctagctgtctgggcatttgtgtcaaccagaactctccctttgcataaagccacctgcacgcgatgacagcaaagtaaagatcaaacataaaccatgggttgaaacgaaagcaagcaactcttcccaaagcgcaggacagcactttgctcaagaccctctttaaggggtctttcacgggtcctcaagaggttgcaaagcccctgcaacaatagacaaaggagccccctacgcccgcccacttcgagcactccacgttcctcgtctcccactctggccggtcagcttcagctctggctcttgctgagcgtggagggcgcaggggcaggatccggcgcccaccgctggggcgcatgcacctcctcgcctcctcgcagggcggtggggcgcagcggttctatccccctccccgaggcggggaagaaggtctggaaagaaacgtgggttcgaggcggagaggaaaagcggacccacctgccaggctgcgcggggaggctggtcccgggctgggcaggcgggctggcctcgcgccctcgaggcacccggcggcgctggctgtgcggaggggcgccggcgcggccgtatttgtacccgcgggccctcacatggtctgatctctagatagccgccgccaaagagctcttgaagaatttttgcgtcactttgaggcgaataaacttaatgcttccccgcggccgcggctccgcgctcccgctggatggggttgcgctcgccagggaggggccgcgctacggggcggggtgcgcgcccgaccccagagccaggaggggagggacccccgacacacacacacgctcgcagggaggagcggagcgcggagcagccggcagggcagggccgagcgaggaatcctgactttcctgctctttaactttgcgggaggggggaggctgcacaaaggagcaggtgtgcgcctcccctgccgccccgcgcccacaggacggcacacaggggtctgctcgtgccgctttctcttgacctcggacacctccccatcgtccccatcccgaaagctgctctctctttcttcctgggacctagcagtactcgatacccatgcgtttatctgactgaccggctgggatgtgagctcagcttagaggcccttgtctaattcctctccgtccccagagtctcacaataaagacttccacaatgaaggaatgaagaactggttctcattttgttaaccagctacagttcaaagctgcgtcaaaaaggagcacagtgctttgggaggctgaggcgggaggattgcttgagcccaggaattcaagaccagcctgggcaacacagcaagaccccatctctagaaaaaaaatttttttaattagccgggcgtggttgctcgcgcttgtgttcccagctactcaggaggctgaggtggaggatcagctgagcccgggaggtcgaggctgcagtgagccgtgatcgaaccactgcactccaacctggtgacaatttgaattatctgaaagggcccagcaggagcctattgttttgaaccatgtgcatgtagttttgataattttttcaaaaagtttaaaaattgatttaatgttaatatcctttttgctaaaattatttaaaactttaaaaagggcacatgcagtacttgctttgggttgtccctgaggcggaaaggagagggctctacctctccccaagaggaggccaggaacgataggaagtagaagaccgaaaggaaatagcagtgacaagtttgcagctccagagaagccaccgccccttgtacttggaggaactgacccctgaaaactgtgcggccggttgggctgagcgtctagagggactgagctggacaaccacgggcaagcgagggcagctcccagcgggtggagtccgcgcgggattctggtgccacctagacgccagggcggggaccgcaaggtgggcgggaggcttggaggccgggatgcgggggaatactggtagggtgcaaggagaatgctggaggggtgcaggggggatgccgggggtgcatggggggatgctggggggtgcaggggggatactgcgaggggtgcaggggggataatgggggttgcaggggagatcctgggagaggtgcagggggatgctggaagggctgcaggggggatgctgggggtgcaggggagatgctgggggggctgcaggggggatgctgggggtgcaggggggatgccgcgaggggtgaagggggggataatgggggatgcaggagcgatcctaggaggggtacagggagttgctgggaggttgcaggggggatgctgggagggctgcagtagggacattaggggttaggtgctggcattcagagcggcaacgccaggcgggagaatccccaacaagcttgggaatttcacccccaggggcagcgcctgcacgggagtggggcctcctcctttcagatgaacacagttgtctgctgcctcccacgttccacttcttaaatgagcatgtttgtgctgtataggcaagggcaacagaaaacgcaaagtgtcctttccaggagggccaaaggaggggggcagggacgctgggaagaggcgccaaagcggaggacggctgcaggggtgacttcagcgcttggctaccaagaccaggtctgtccagtgtgacttcttagcacttcttaattgtgcagtctcgccacttctgatcttccttctagactctttctagccgaagatgcattcctgcccagcgcgcagcccctccctatggcactgccctgttctgtgcaggtgctgcctagagagtgggcaccctgtggacctgggtcaaatcccggcccccaccct

SEQ ID NO: 1244729 - DNA, 4001 bp, Homo sapiens
tcagatcccttccccctccccttgccaatgccagcttggcaggggcaggaagtgggagcctggtggccctggcattcccagcacccagctctggctggacagggcttctggtgacctcacttccaccaaaccagttgatcctctagggctttgccttctaccttaatgccgaactgtgccctttctctgtccaggaggctcctcgtagccccacggacactcccatcagacactgccaccagggagagctggtggtgcaagctgaaggggtcctgggaggctcacgccctgccctacacaatgcaccactccactctctggggacaggaggctcagcacaactcctattttgccagctgcccctcttgcagctgatccaaactgggatcccatgggcaaacaccaaacatgggcaaaaagcaaccggcctgctggctgtgtgggcaccagagtgaccatggcaaggccagggcaagaccaccggctcaccgtgagctccgctggcgcacacagggccgtgagccccaggagctctctctcctccccatggccatctttttcttcttccaaggtctttccccttccctcccagatacagttctaggcgcttactcttcacattcctgagaatcgtaaatcctctgaggtggcagaaccaccactccgagatgccttggctcctcctccctgccaggcaacccccacaccgccctgagatggtggggcttcctctcccttagaagtcacacaggactccgggaggatgaagtccagcaggactgaagttcaggacacacaccggcgggctgcggagagggcctcctcgcgccggggctccacacaggaggagtaatgctattcctctagcttttgaagtaggagtggcgggcgaagctggcacctctggggcggagagccctttctccccggcccatctgcggactggggtgaacgaggagagggcaccagggaaggagcaggattgggggattccgaggaacgggagcagacacccacagacccgagggaagggggctgggttcccctgcgccgccctcccaaaggccagggaacaagaggtgcaggcggcaaaggcgctcaagctcccagcacagcctgggaaggagaggaggtcgcgggacgcagccccaggcctgcctaggatgtgtcagggcgcctggtcggcgggcggaagcggtctccccctcgcagctcgagtttcagaaaaacgacggcgggcgcggggctggacggccggggcacctgggtctctccggatcctcctcccactccatgccagcctgcgcggcttgggccccgcttacctgctccgggtggctcttgtcggcctcgcgaggctcattttcgttgccagccccctgcacctcggcggcggccggcggctcggcctgccccggcgcttcctgggcgcgcagcagctcctctcggacctggacgccgagcttctgcagctgctcgtccgtctcggggtcgaccaccagcaggcgcacggcgttgagtgcggcgcggatgcggctcaccacctgctggtgggtctccttctccacgttttcgccgttcacctccaccagccggtcccccgccagcagccccgccttctcggccggcgagccgggctccaccagccggatgtactggcccaacttgcccttctccccgtgcaggtggaagccgtagccgttcggacccttctccaggcagcagagccggggcaggggcgccccggccgctgcgtccgcgctcatctcgccctgcgacgggtcagcggcgcgacttggggttccgatggggacgggacgggacggcccagcccttcttcccgtccagcgaaccgggagcgcagcagagaagccctgagccgccggacgggccaagcaagcaggtgtcccaggaaccgtcggccgccgcgagccgcgaggagccgagagaggaccacagaccaatccccgccccgcgcggcgtctgagcgtcccagagtccgccccggctccttaccccgggggcggggccgcgctgagggtggggacctccgcgggccaatagggggctgcaggcctgggcgctccggccgggtgaacggcgccggccattgggaacgcgcggggcggggcctgcgctcggcgcggcgccccgcggcgggcgaagactagcgctcaggaagtggaagtgtttgttaccgagcggccggcgctggggtggcaggggcggggctcgccgaattcccggttctgggcgggtgggcccgccggctccggcctggtttcccctacctgtggcggggagtgaggaaagccggccctcgggtaaaggaccctaacttttttttttttttttgagacggagtctcgctctgtcgcccaggctggactgccgtggcgcgatctcggatcactgcaacctccgcctcccgggttcaagcgattcccctgcctcagcctcccgagcagctggggttacaggcgcgcaccaccacgccccgctaatttttgtatttttagtagagacgaaatttcgccatgttggccaggatggtttcaaactcctgacctcaggtgatccgccctgggattacagacgtgagccaccgcacctggccaacgttttaacagcctttagccaaagcctgggtgcagctccagttgagagggagcggctgttgccggggcaactgctcccgctcggggcagcgagggccggtcagtctcgagaattaagacggagggcctcctcggaccctacagagttgtttgaataacatttttccgtttgtgggaaccctaaccctaatccactttgtgctgtcccaggactcgcatagaggagtgcaggttctgatccctgctgggaaggtgagggctccgcggagagcctgggacctcgaggggcagcccgctgaagacaggccatctagggcaatagcgtgggctttggcagcagcgtttggctagggaggtggggtggggagaggcaggacagactcaggtaatcaacctctgggtacacgccacagggaaaggagccttggttttttttttttttttccaacagaaaaatgattaggactgtaaagccttctagctccctcttgccaaagagaggctggtcacagaggcgggagacagtctgttgagcggggagctgaccatctgaggacagacactgaggaaggaggatggaatgattttggcagtgaatgacaattccttcaacaagaccccccccccccactcacttcaaagaaacagtggacaggatgtgctttccaaaatactgcagtttaattctgaaaaactcaaatgcaagaggcccagagctgtctatgggattggatctcctgcaacctgccttgggccccagaagagactggcaatgtcagcctcctccctgctctgcctgagggaggccacggagaacttccttatcgggcccaaactggagccgctgactgctcagagcaagatttctgccttgaaagcaaatgcagtagcctcagaaatgtgcagcgcatacttcttcctccccctctccccctccaggccggcagagctgcagtaaagatgcctgcaggtcatgacctcatgtttcctgtccacttcccatggcagggatcggagctttgggagatatgtgaccaaggaggacacatgaacttgctacccctctctctaccccagacatacccacatgactttgttttactcatattgcattggtttaactcggaaatgggtgacctcccaccacctaacctgactcagtaggaggggaggtaaagcagtttaggccctggtatctgtttgagaagttaaaggaaagggcatgggtggtcagggaggaggcagagcttggggtcaaagggatacatgtcaggggaggtttgcttaatcttgtctcccaccagctccaggagccagggatttctcttttttttcacaacacattccaaacctaggaaagggatttctccttatctggctctt

SEQ ID NO: 1244730 - DNA, 4001 bp, Homo sapiens
aataggcatgtgaaaaggtgctcaacatcactgatcatcagaaaaatgcaaatccaaactacaatgagataccatctcatccaagttaaaatggcttttatccaaaagacgggcaataacaaacgctggcaaggatgtgaagaaaagggaaccctcaaacagtgttggtgggaatgtaaattagtacaactattatggagaacagtttggaagttcctcagaaaactaaaaataaagctaccacacaattcagcaattctactcctaagtattgacccaaaagaaaggaaatcagtatatccaagagacatctgcactcctatgtttcctgcagcactgtttaaaatagctaagatttggaagcactctaagcgtccatcagcagatgaatggataaagaaaatgatgtgcatatacacaatggagtactattcagccatagaaaagaatgagatccaatcacttgcaacaacacgaatggaacttgaaatcattacgttaaatgaaataagccaggcagagaaagacaaacatcacatgttctcacttatttgtggcatctaaaaatcaaaacaattgtattctaagagcagaaggatgactacctgaggaagggtggtaggagggaaggggtgaggtggggagagttaatgggtacaaaaaaattagaatgaataagacctactatttgataacacaacagttattatagtcaatgataacaattgtacgtttttaaataacttaaagaatgtaactggattgtttgcaactcaaagggtaaatgcttgaggggatgaataccccattctccatggtgtgcttatttcacattgcatgtctgtatcaaaacatctcatgtaccccataaatatacacatccactatgtacctacaaaaataaaataaaataaaataaaaactaatgagcataattggattgttggtaacacaaaggataaatgcttgaggcgatggatacccccatttaccgtgatgtgattattaaacattacatgcctgtcttaaaatatctcatgtaacccataaacatatacatctactatgtacccacagaaattaaaaattaatttaaaaaaaaagaaaagaaagggaaatgggctgcgacagatgtgccctcttggaaaactaaaacttagagctctttgtccttctggggtagcacgtgtattctacagatcttgtccagagggagacatttttctcatttctcccccctctagattataaatctccccgcagggcaatggcaattctaattctgccttttagtttctatattaaggaaaatagtttagagtggttggtcggtcacatagacagctgtagaactagtttctcaagtttaaaataccaataactctgaaacctgagatctgcagccctgggagccaccaaggtgcactcagtggccttctaggcttcggttcctgctccgcgccccgcagaaaccgcggctggctggccaggggctcttccaacttccagcgggagcaggtgcacaggtcaggcccgccccgcccctaatgccttctacccccattacccacccccgccccgcccgccagtcctccatagtccgctttttagggaacctgctgagcaaactagctgggcccccggacaggggagaaaagcacagatacccccactccactccacccccagcccctccgcacccctccagcccctccccacaccccacaccctggctggggtggggtgggaagggtgctgctcccttctcgaacctggcactcgagttacagcccgacgcggattcggctgggctagaccctgaagcacgggtagaaacgcaactccggagtcccaggctgggggcaaggaccctctctgacctctcaagctccagcgcttccgaagcccccttagcgtttccctggaggcgcccaggtcgagtccttatatactagcgggttggcgccatcccacgcacatcccacgcaggagatgcaagagccaatgggcgggtctgctaagcccgcgaactctgccgcgttaaattgcctagaagctcccacccttctgactgttgccacgtagttcttagtttccgggaatttggggattttttcctcccccttcttcccacccttcctccgtctcctcgctccctccatccatctctccctccctatcatctatctattcatctatctggattacagcaaaacaaagaataaagattatgaagaaagagaagaacttcccaggcccaagcagctgtcggctcctgcgctcccaacggggtggccgtttccttcctcgcaccctcttctctcccggtgcctgcggtcccaccttccagatacccctcggagagtccagctgagctctcgccagagctttccccttccaacccgctcgacttgcccagatcccaagctgggcttctctctccatcgccccagaaagtgggtcttggagaccgaggcaagaatttgggcctccgcttctgttccagaccccggaccccttgccaaaatgcggcagatgtgcagattgggccgcgcttggttcctggctgggtttatggagcctgcggctgaggcaggctccgcagaccccgagccagagtgggatttaacggcggccggtgcgctgtgcttggtcaaccccggtaaccgtcacgctgctagtgatatgaaaaaaacctgccagcgttctgcttttctgccccgctgcagtctttagcacccgccaggattctgtccgagtgtttggattttgtaatcctcctgtctttggccaactccccatccttggcggagcgctcgcccttggccgggctccgtgctgccagccttgcggaaccctaggcccgggcggctctgtcggaggcccacttctcactgatgcggagtggcccgagggtgggagcagcggttaatgccgcactgattaatacaggctccagtgaaagcgaaagtaagaaaataaaacggatttcattatacatatacaatgtgtgtatggatacatgtacatacatattacacttatgtgtatgttacgcacgtttgttaaaatgaggtcataatgttcatgctgtttcataacccactttctttcaatgaccaccttttcatttcagtaaatcttcgtattctcatgttgcagcttctccatttttctttaacatgtttacagagagtctgtgcaaacctgtaccaaatccagaaccatgcatctataacgtgctaaaagattgtcaacctagaatcctataacaaccacaaaaaaggcctacctaaatggaggcaaagtaatgacttcagacaaaaaaaaaaaaaaaggaaatctgaaaatctgagggaatttgtcaccagccgatctttcttatgaaaaaatattaaaggaagttctttagctggaaggaaaatgatacctgaatgaaactcagatctacaaaaaagaatgaagagcacagaagatagtaaatatgcagataaatataaaaaatctcttttttactgttaaaattattctttttttacaatataacaaaatgtattttcattggatattaattatgaacccacaatgcatgtaaactaaatacaatacttcaaatcattctgcacaaagaaattacagatcacatttatttaataacaaaatgtctaattgtttaataaaatgtttttaggaacttacaatataattttcaaaaacaaagaataaaaatattaaatatatcactttatggcagaggacaacataaatttatttctgcaacacagcaggcaaacttttgtgctagaaacagtggagaaaaaatttaaagcaaaaagtcaggaaatggatgttcacaaatttctggttaactgaggctcaatagttattgtaagaaacgggcgtttgaacatcagattttaaaataaaatattttaaatatttttattttataatattttaaagattttatttataagattttaaaattttaaaatattttt

SEQ ID NO: 1244731 - DNA, 4001 bp, Homo sapiens
attgtcttcccaggaatatggatttgagaaaccaaacattggttataaacaactttagcaatttataagtcagcggtttccatggcagtttgatttttaaaggtcaaacttcctcgcacttcaaagaacgctgaggccaaacagcaccaaaggagaacatcacactttaacccgacacaaccctgcttagaacagcagcacaagagcctgcatacatgcaactccatcccactttaccattcaacagcaaactccagattccaaacaatattgaggccaaacactactgcaaccggaagagaaaattctaaggagggcttagtactaggcctaagaacctctaccaaaggaacccccttggagaggctgaggtccaaaggatcctccagagcatccccctttagggtccaatcttagagcgtcagacgtctctgaccttaggtggtcaccagtgccactttacatgttttccctccagaggggatggcctactgtgagctttccttttgtctctggatgaaggccttgacttctagcatccttataatttgataaggccatgctttcccatggttcccattccactagagtgatagtcatgaactttaatgatatgaaatggaggctaggtgggtttcttttaaccttagccagtagagtaggggaagggaagaatttaacataaggaaagaaggtttaagtcacctgaaacacgtgtgagttcgccctggagaagctgcgtcacacatagggatcagggaccacaaccagaaaagacagaaaagagcccttcccgcttctgggcagggcaactatccccattcactccttggccttcaaggcagcactggagagtagcccccggccagaaacctgcagtcgcctccgtgtctaggcgctacccaccaaggatcccacgttggaaaggaaaagagaaagagagagatttacctgtatggagcagaaaggaaaagggaaaggagaaaaataaatcccagactttgggcttacctcctggttggcttgccaaaatatgttaccagtgaagagtgtccaggttcttggcgtgttgaacaaagaactggacaaacacacaaacaaagcaaggaaagaatgaagcaacaaaagcagagatttattgaaaacgaaagtgcactccacagggtgggagcaggcccgaggatagcggctcaagagcccggtttcagaattttctggggtttaagtaccctctaaagttttcccactggttacttggtgtgcacacaatgtaaatgaaataggagcccgagatcagtctgaatggttgcagaaagcgatcaatgggaggctgaagtgaagttacaaagttatgccctatgaaaacatctgattggacgcagaaagcgaagttacaaagttacattcctatgcacatgaagacttggccctggagaccagtctgattggttgcgggaggggaccaatcagaggtattttcagtttttcatctgccatgtagaaaaggaggggctacaaaggaagtttgtggaaagttgggattttcctccagacccttattctcctgcttcagaagggagagaaagcagaccgggatgggggtgcggggatcttcccgggagtggtggggttgtgttaccagtgccccacctcctcccgagccagcagactccccagaaatgaaaaactaaggctggaaggtttagcgatggagcaggaccaacttaccagctcgcggtgctccctagaagctggattcttcgcaggtgcgagcacaccccagatgccagcgtggacccttgagcaactggaagttaaaaacccacgaaaacagctctgagtgatctctagggagctctcgtttctttttcacccatgtgtattttttaagacaaaaagaaaaaaggtaatttaaagaaaacaaagaacaaaggaacttggcgaggcccaggctacagtccgcgggctcactctccacagagtaaaaagaacgcgaatccttttctgttttccggccctccccatcctgggctgcggctccacacttccccagcgtggcctgcatttctattgggcagctggcgctccggaagtgtccgcactctttattatcgactctgcgcctttgggcaattgtcactattttggttcatcaaaattgaagaaataccaggcattcttaccatgcccctaaaggggtgactcaacctttccagctgtactcgcattcccagagcagcactgctgcccccttgcttaaaagcacggttgcccccaggaaccaggccagggcagctgtggatggacaggagaggacaaaggtgcaaggagcggattgctccaggacagacagattcaaatacctacccctggcagtgtagggagcatcttggggccatttgggagattcctttattgggatgctccaaaggctagtctggccggatacagtcctcctgccactttgctttcctttagcccccttattatgataattatggtaatacatgtttttcctgctaacttgtctaagaattggtgtctcagtacatagcttttgaaatgcacacaggccacgatgactcatcacaggggaatgtgcaagtctgagttgctccttctccgcaagctccacctaccccactctggactgcattaactgcctactgcctattctaaaatcttaaggtacctaggaagagtacctattcacattaaataacgtatatattgaaagcacatagctgcgcttttcttcttctcatctgatccagacgccagctctatggatacagtctcaccgaagttaaaaaactattcttcagtcattggcttagaaaatgctagtgccggctgggagcagtggctcatgcccataattccaggactttgggaggccgaggtgggtggatcacctgaagtcaagagttcgagaccagcccagccaacgtagtgaaacccccgtctccactaaaaatacaaaaaaaattagccgggcgtggtggcagacccctgtaatcccagctactagggaggcagaggcaggagaatcagttgaacctgggaagcggaggttgcagtgtgctgagatcatgccactgcactgcagcctgggcaacaagagcaaaactctgtctcggggaaaaaaaaggaaagaagaaagaaagaaagaaagagagagagagagaaaggaaggaaggaaggaaggaaggaaggaaggaaggaaggaagggaaagaaagaaagaaagaaagaaagaaagaggaaggaaggaaggaaaggaaggaaggaaggaaggaaggaaggaagggagagaagagagaaaggaagggagggagggagggaaagaaaaaaagaaagaagagagagagagagaaagaaaaagaaagaaagaaagagaaagaaacaaagaaaaaaagctagcgcaggccgggtgcggtggctcacgtctataatcccagcactttgggaggccgaagtgggtggattgcctgagctcaggagttggagaccagccagggcaatatggtgagagggcatagtcgtgcgcgccttggtagtcccaactactgtggtggactggggagggtgtgggggcgctgaggcatgagaatcgcttggatggaggcagaggttgcagtgagccaagatcacacggctgcactccatcctgaaagacagagcaagggattctatctcaaaaaaagaaaaagaaaaaaaagaaaagaaaagaaaaagaaaatgctagtgcagggattttcccagagcaccaggatggcttccaaggcagaaacaaaagacattaagaagttgttcccatgggaatgtgtgtggcaggcatgacatatcagatcaacttggaatagaaaatgcatatcccaaaaggcccctcaaaagtgagcagagtaaaaacattcacagaacttttaaattatgtttttattaactattgagtagaaacaatatttatagaatacatataaggtataaagaacaaaagta

SEQ ID NO: 1244732 - DNA, 4001 bp, Homo sapiens
tggtcgcatatttgtttcacttctcatcattccagttgaagagagaccatttgacattctagagatggctgcatgcaaacatcgaaaacctttgagagaatacagtgcaccagggagcctattattatgatgactattgggaggataataccaagagtttggaggatgctccttgcccagggttcccataaaccaaaccagttaaaattaaatagatcaaataatgaactaaataaagaatctaccaacttaagtaaacaatctcctcattaatcccctacaactgaatctcttaatcttcatttaatgtatttctccatagactctaagtgccagcagctgcacagatacttctctgttcagccaattctatcataactttcacaaaagaatttaaagtctgttgtgtaactatggcctttacagtagatgttctgagaacatctatcctatgggttctaggttgtgaaggggttgattgttctcagtgaaccataaaaagctttctttacctggtgaaaatacactgtagcataatcatgggaaaagcttttatacaacaagaaaacatgcattgaaagtgacattgaataaaatccctttgtaaatgtttaaatggcccatcgggtagccaaatgtacctgaagctttgattgtcttcccaggaatatggatttgagaaaccaaacattggttataaacaactttagcaatttataagtcagcggtttccatggcagtttgatttttaaaggtcaaacttcctcgcacttcaaagaacgctgaggccaaacagcaccaaaggagaacatcacactttaacccgacacaaccctgcttagaacagcagcacaagagcctgcatacatgcaactccatcccactttaccattcaacagcaaactccagattccaaacaatattgaggccaaacactactgcaaccggaagagaaaattctaaggagggcttagtactaggcctaagaacctctaccaaaggaacccccttggagaggctgaggtccaaaggatcctccagagcatccccctttagggtccaatcttagagcgtcagacgtctctgaccttaggtggtcaccagtgccactttacatgttttccctccagaggggatggcctactgtgagctttccttttgtctctggatgaaggccttgacttctagcatccttataatttgataaggccatgctttcccatggttcccattccactagagtgatagtcatgaactttaatgatatgaaatggaggctaggtgggtttcttttaaccttagccagtagagtaggggaagggaagaatttaacataaggaaagaaggtttaagtcacctgaaacacgtgtgagttcgccctggagaagctgcgtcacacatagggatcagggaccacaaccagaaaagacagaaaagagcccttcccgcttctgggcagggcaactatccccattcactccttggccttcaaggcagcactggagagtagcccccggccagaaacctgcagtcgcctccgtgtctaggcgctacccaccaaggatcccacgttggaaaggaaaagagaaagagagagatttacctgtatggagcagaaaggaaaagggaaaggagaaaaataaatcccagactttgggcttacctcctggttggcttgccaaaatatgttaccagtgaagagtgtccaggttcttggcgtgttgaacaaagaactggacaaacacacaaacaaagcaaggaaagaatgaagcaacaaaagcagagatttattgaaaacgaaagtgcactccacagggtgggagcaggcccgaggatagcggctcaagagcccggtttcagaattttctggggtttaagtaccctctaaagttttcccactggttacttggtgtgcacacaatgtaaatgaaataggagcccgagatcagtctgaatggttgcagaaagcgatcaatgggaggctgaagtgaagttacaaagttatgccctatgaaaacatctgattggacgcagaaagcgaagttacaaagttacattcctatgcacatgaagacttggccctggagaccagtctgattggttgcgggaggggaccaatcagaggtattttcagtttttcatctgccatgtagaaaaggaggggctacaaaggaagtttgtggaaagttgggattttcctccagacccttattctcctgcttcagaagggagagaaagcagaccgggatgggggtgcggggatcttcccgggagtggtggggttgtgttaccagtgccccacctcctcccgagccagcagactccccagaaatgaaaaactaaggctggaaggtttagcgatggagcaggaccaacttaccagctcgcggtgctccctagaagctggattcttcgcaggtgcgagcacaccccagatgccagcgtggacccttgagcaactggaagttaaaaacccacgaaaacagctctgagtgatctctagggagctctcgtttctttttcacccatgtgtattttttaagacaaaaagaaaaaaggtaatttaaagaaaacaaagaacaaaggaacttggcgaggcccaggctacagtccgcgggctcactctccacagagtaaaaagaacgcgaatccttttctgttttccggccctccccatcctgggctgcggctccacacttccccagcgtggcctgcatttctattgggcagctggcgctccggaagtgtccgcactctttattatcgactctgcgcctttgggcaattgtcactattttggttcatcaaaattgaagaaataccaggcattcttaccatgcccctaaaggggtgactcaacctttccagctgtactcgcattcccagagcagcactgctgcccccttgcttaaaagcacggttgcccccaggaaccaggccagggcagctgtggatggacaggagaggacaaaggtgcaaggagcggattgctccaggacagacagattcaaatacctacccctggcagtgtagggagcatcttggggccatttgggagattcctttattgggatgctccaaaggctagtctggccggatacagtcctcctgccactttgctttcctttagcccccttattatgataattatggtaatacatgtttttcctgctaacttgtctaagaattggtgtctcagtacatagcttttgaaatgcacacaggccacgatgactcatcacaggggaatgtgcaagtctgagttgctccttctccgcaagctccacctaccccactctggactgcattaactgcctactgcctattctaaaatcttaaggtacctaggaagagtacctattcacattaaataacgtatatattgaaagcacatagctgcgcttttcttcttctcatctgatccagacgccagctctatggatacagtctcaccgaagttaaaaaactattcttcagtcattggcttagaaaatgctagtgccggctgggagcagtggctcatgcccataattccaggactttgggaggccgaggtgggtggatcacctgaagtcaagagttcgagaccagcccagccaacgtagtgaaacccccgtctccactaaaaatacaaaaaaaattagccgggcgtggtggcagacccctgtaatcccagctactagggaggcagaggcaggagaatcagttgaacctgggaagcggaggttgcagtgtgctgagatcatgccactgcactgcagcctgggcaacaagagcaaaactctgtctcggggaaaaaaaaggaaagaagaaagaaagaaagaaagagagagagagagaaaggaaggaaggaaggaaggaaggaaggaaggaaggaaggaagggaaagaaagaaagaaagaaagaaagaaagaggaaggaaggaaggaaaggaaggaaggaaggaaggaaggaaggaagggagagaagagagaaaggaagggagggagggagggaaagaa

SEQ ID NO: 1244733 - DNA, 4001 bp, Homo sapiens
tattgaatagggtgtcctttctccattggttattttggtggactttatcaaagatgagttggttgtaggtgtgaagctttatttcaggggtctttattctgttccattggtctacgtgtctatttttgtatcagtactatgttttggttactgtagccttgaagtatagcttgaaatgcagtaatgtggtgtaaggctccctatcctgttttgttctttttgtttaggattgccttggctattcaggctcttttttggttgcatacaaattttaaatcattttttctaattctgtgaaaaatgacattggtaatttcataggaatagcattgaatctgtagattgttttggggagtgtgaacattttaatgatactgattcttccaacacatgagcatggagtgcttttgcatttgtttgtgtcgtctatgatttctttcagcagtgtttcatagttctcctcgtaaagttctttcacctccttgattagcccctgctctccaattcttcttgcagcctctgtaactggagtcctgtcccctttcctcccagcccaacttcctgcactgtctgtatcaggccttgccctggatgaacccttttggctcacccaccatacacagaaggtgacagaaatcacatctcaccctcagattgcttaaggagggtacgcataccactgggaaacttggaacccatgggagctgcagttgagccaccttatagaggaccgagcacttgtggactagcctgggatcctggccacccgagtccaacacctgcagccatgtaaaactttccatggttcaaaacctcaggcttcaggcatacatctggaacacaatgctaaaattaaataaataaataaataaaaacgagctgaggactgagccgaccaaatctctagggcctaaaactcactggcctcccttaaaccttgggtctaggtttacaggttagatgtttccactgaaatcctttatacttttgactataggggaaattctatcagacctgaactcatgatttaggctatgttgttggctatctttaatgggaatgggggtggcattcatatctccttagagttatgccagaacaacaggttagtaagaactgcaacccacaagggtgggacaggaggcagaagagctacctcctggggagcaaaaagcatagagcgtgatttgccgtcttcggataccactttgcatttagttcggaacagcactgctttcaccctttccctcttctagatgataaaccagcagcgcaagagggtgcttggtttttctttcaggatctagggcgcagttcgtcagtgcctggtcacatttcacctaaataacccattccccaactccctgaatgctcaggactccaggagggtgggcaacccccatccgatggacacctgccaagtctggcctgtccatacagcactccccacttctccagctctgcaccaacacctcacgggcttgagccaccgcgcccggccgccctgcggctttttaaggcgctccccagcccacgcacgggcggaagttttgtcatctacagctttcaagtcctccattgctaagtctacaacagcctgcggttttgacagacattgctacagagacaggagccaactttcccagaagggagagaaagcagcctcgggtctccccgagatcggtggggttgctctggcagcgccccacctcgtcccggagcccacggaccaccccccccggacccccggaataagaaacggaggctggaaggtttggcagtggagcgggacgaatttatctgccagcaattccctggaaacaggattccttgcaggcgctgtgccagcgcgggcccttaagcaactgaaagttaaacgcccacgtgaatagctctgagggatcacggagaagttctcgtttcgtctgtacctatttgtattttctaaggcgaaaaaaaagttatttaaagaaaaagagaacgaacctggcgaggtccatgtctgcgcactcttcaccaagtagggggacctgagttcttttccactttcctgctctccgcgtccgtgtgcggctagcccctcgctcagctgcatttctatcgggcactcgactccccggaagtggtggcaccgcacgcgctgttatcgactctgcgcctttggaaacggtgtgtctgcgaatccaacgacgggcgcggtgactcacgcctgtaatcccagcactttgggaggctgaggagggtggatcaccagcttaggagatagagaccatcctggctaacatggtgaaaacccgtctctactaaaaatacaaaaaaattagccgggcatggtagcgggcgcctgtagtcccagctactcgggaggctgaggcaggagaatggcgtgaaccccggaggcgcagcttgcagtgagccgagatcgtgccactacgctccagcctgggcgacagagcaagactccgtctcaaaaaaaaattgacgaaggaccaaacccctaaaggggtgacattccagcttgactcgtatcccagagcagccctgctgtccccttgcttgaaagcgcagttgacgccagaaaccgggggagagcagctactaatgcacaggggaggagggaggtgcgaggagcgggttgctctcagagagacagagttgaacaactaccccttgcggtgtaggaagtatcttgcggccttctaggccaattagttggcttcgaacagtccagtggctcctctaactggatacagccctcctgtcacgttgctttcgtggggcccttgttatggtaattacgataatacacgtttctccagcccacacgtctaagaactgttgcgagaacccatactttttgaaatgcacacaggccaaaatgactcactaactgaggagttcaccagtctgaattgccctttctccctagctccatcccactccggactcaattaagggcctgccgttggaagtcccatctagaatcttaaggtacaggcagagtacttcttcacactgaatgagcacatgcattgaaagtatatagctggccgggcgcggtggctcaggactgtaatcccagcactttgggaggcagaggcgggcggatcacctgaggtcaggagtttgagaccagcctggccaacatgaagaaatcccgtctctactaaaaatacaaaaattagccgggcgtggtggcacgcgcctgtaatcccagctactcgggaggctgaggcaatagagtctcttgaaccggggaggcggaagttgcagtgagcccagatcccgccactgcactccagcctaggcgacagagcgagactttgcctcaaaaacaaaacaaaacaaaagtacatagccgtgcttttcttcatttcatctgattctcacgccagctctaaggaaacagcttcactgaagtgaggaaactcttcttcagtcactgacttacaaaatggtagtgcagggattttcccagaccaccaagaaggcatccaagaagtaagcaaaaaagattacgacgtcgttcctataccgtggcagtggctcacgcctattatcccagcactttgagcggaggagacaggaaggtcgcttgaccccaggacttcaggactagcctggcaatataaggagacgtcatctctacaaataattttttaaaataaccgggcgtggtggcagtgcacttgtggtcccagctactaaggaggctatggtgggaggatcacttgaacttgggctgttgaggctgcagtgagccgtgatcaggctactgcactccagcctgagcgacagagtgaaaccctgtccgtatatatatgtacatatatatatgtaaaatgaatgcagcaatataccccccaaaattatattaagaccaacagaggtttactctcggtatccaagagtgatttagatgtgaaaatcaatcggcctattcactgcattaatgaaaaaaggaacatcacatgatcatttcaatagataccgaaaaagca

SEQ ID NO: 1244734 - DNA, 4001 bp, Homo sapiens
accagtttgcctaatttagacccttgcctagaaatttctaccgtcaggattctgtcttgcattccgagaccactgaaacatctttgtcaagttacctgtaaaatattctttttgatatatggggacttcaaagttaaatcttttctctttacccccatgaactttattgttaaagcctagataagctgatagtttttcattggtaactgtattcaaatggcaaccccacccatatcttttgcaggcagaaaagtcttagggagctctatcccagctcttcctttgggtataaaggtattatagtcagtgctacttgcagattctttgtaaggtagagatattgtttcctaaataaaattgaaaccctaaataaaactgaactattcaataacaaattgagaattcaggtgaaaaaaatcaggaagcttaccaatatatttaacaaaagcaactgattctgttgtatttacagaataactttgctagaattcctttcttaatgtaaccagacttcccaccagcacagtgaatgcccaccgcctgctgtcttcttccaccaaaatcagtcctgaaagacctgtatgcagaaacatgtagagagaggcagtagagttcaggggtcaagattcagacttctttgaaccccccctacacatgcatgggaataattagagataattcttgcccttgcttctctgtggaaattgatggaaacagtttcgcctcctacacaggtatactgtaggtaaaatcagaacaacacaaatcctcccatccactcccaagccccccaccccactgaggaaaactggtggggactggctagtctcaggcagaaacagaaggaaacagctgcgacagaggctccctcttgggaaaataaaacacagagctctttgtccttctcagatagcagctctgtattttacagacgttgggagggagacatttttctcatttctcccctttctagattgcagggtaatcaggataatgggtacagggtaatggcaattctaattctgttttgttgttttgttttgttttgttttgtttttgttttgatacaatgtcttcctgtgttgtccaggctggagggcagtggcgccatcacaggctcaggcgatttttgcctcagcctccggagaagctggaaccacaggtgcgcgccaccaggcccggttaatttattaatattagtattatattattattattattattattcatagcgatagggtctccctacattgcccaggctggtctcgaaatcctgggctcaagtaatcctcccacttggcctttcaaagtgctgaagctacaggcatgagccaccacacccggcctaattctgctttttaactcttagattaagaacaataatttacagtggttagtgagtcaatgccaagaaccctgaaacaagagtcccaaccttcgcaacgggggaagcctccaggacgcacttggctctgcctgtttgttccgcccccgcggaaaccgctgctcgctgggcaggggctttctgttttgcagccggaacaggaacacagatagcccgccaagccgccggcgacaccttccaacccctttagctctccgcaccgtccctccccaccgccccgcctccacccgcgccgcgatcaagtcctcatagccttttagggaatttgctcagcaaactagccgaaccccaaaggcaggggagaagcacgcaaataccccgactccaccggctggccggagctggggggcgggggttgctctcctagcttgctccccatccgagtcaacgccagtccagggtcgtgccggactagaccctagggcgtgggtacaaacgggagctccgcagtccccgtaggagcagggaccctctcttacctctcaagctccagcgcgtcaagctccaggacactccgcgtttccctggaggcgccaaggtcaggttcttataaccaatggttggcgcctacctgggcaggtcccacacaggggatgaacgaaccaatgggtcccaggcagggcatggacgcgccaatgggagtgtctacaaagcccgggaacactttgccacgctgtctagaaggcctggcgggaggctcgcgcctatgaaatcccagcactttgggaggcctaagcgggttcatcgcttgagccaagaagttcgagaccagcctggacagcacagtgggacccccgtctgtacaacaacaacaacaacaacaacaacaacaaaattactcaggcttagtggcgcgcgcctgtagactcaaatgtagtctcagatgcccgggaggctgaggctggaggatcacttgagcccgaggaagtccagggtaaagtgagtcgagatcgcaccactgcactccagcttgggcgacagagtgagagcctgttccccctacaaaaaaaaaaaaaaatgtctggaaacgccaagttttctgattgctttcgagtggttcttagttctttcttactccccctccgcccctcctccgtccctatctctctctcctttcccggagcctgcggtcccgccttccccggacccctcctctgagggtccagccaagctctcgcccgagctttccccttccaccgcactgcaactgcccataccccagcttgggcttctctccccactgcctgccccagaaagtgggccttgagacccgggaaccccaggtcaaaatgcgacggatgctcggatcgggcggcactcggttcctggctggatttgtggctccgcagaccccgcgccagagtgggatgtggcggcggccggtgctctgtgctcagtcaacgccttggagaggaggactacgaaacccatacactcggacagaaccctggcaggtgttaaaggctgcggcagagcagaaaagcagaaccctggctggttttcttgtaacacgagcagtgtgacggttaccggggttgaccaagcaccgcgcatcggccaagttctcactgacgcggactggcccaagggtgggagcggcggttaacaccggggtgattaatatacgctccagtggaggctaaagtgagaaaataaaacgtactccaataccacccccccttcgccccagagattaccactgaccactattaacaccctattgtacatatctttacggatcatacatatatattacacaaacatatatgtaatacttttttattaatacaaagtcacactgtatgtactcttcttaatctgcttttttcaatgacttccacctttccatttcagtaaatcttcatataatcatattccagttttttcatttttctttaaaatgcggtttatagattgtgcaaacctgtactgaatccagaactatacatctgtaaagcgctggaaaaaaaaaaaaggctgtcaatctagaattctataaccaccaaaaacaaaacaaaacaagtcctccaaaatggaggcaaaataacgacgtattcagaccaaaaaaaaaaaaaaaatcttaggaaatttgtcaccagcagatctttacaaaaactattaacgtgtttttttgttttttgtttgtttgtttgtttgtttctcagatggagtctcgctcttgttgcccaggctggagtgcaatggcgcgatctcagctcactgcaacctccgcctcccaggttcaagcgattctccttcctcagcctcccgagtagctaggattacaggcgcccgctaccaggccctgctaatttttgcatttttagtagagacgggggattcaccatgttggccaggctgatctcaaactcctgacctcaggtgatccacccgcctcgacctcccaaagtgctaggattacaggcatgagccactgcgcccggcctaacaaagttcttcatattgaaggaaaatgataccagaatgaaactcagatctacacaaaagaatgaggagcatggaagataataaacgcgtaggtaactataaaagattctctttttcattgttaaaaattattcataaaataattgat

SEQ ID NO: 1244735 - DNA, 4001 bp, Homo sapiens
cagtggagtgatcttggctgactacaacctccacctcccaggctcaagcaatcctcccacctcagcctcccatgtagctgggactacaggcatacaccaccacgcctggctaatttttatatttgggggagagatagggcttcgctattttggccaggctggtctcaaactcctgggcttaggcaatctgcccaccttggcctcccaaagtgctaggactgcgcccagcctcagagttattcttaaacagtgtttctctagaatatcatctctaaaatgaggctattccaattttgactgggatgatcagcctgcacaattttttcaacaggtttatagacaataaaaggagacctttcctaactcattgctgatggcatactgtaactttcctttaaaagttgcttaggctggccaggagtggtggctcacacctgtaatcccagcagtttgggaggtggaggtgagttgatcacttgaggttagaagttcaagaccagcctgggcaacatggcaaaaccccatctctattaaaaatacaaaaattagccgacatggtggtgtgtgcctgtaatcccagctacttgggaggctgaagcacgagaatcacttgcacctgggaggtggagtttgcagtgagccgaggtcacaccactgcactccagcctgggtgacagagtctaaagaaaaaaaagttgtttaggccatagaatccaaacatttcttgacctcagtttatattctgagtctttggaactaaaaatgttagataaggaacactgtaatgggagaacacttataagaaaaataaatttctattttttaactaacatatgtgatcaaatacccacaaaaggcagagaaaggggttcctccctgctgatggggacaatgacttcacttccctttacctgactgagtatccagcatcatgaccacccactgctcagctgtcagccgtgtgacagaattgtctttcatgatccaggaatctggggcctctgcaaacaccacgcaacagaagggctccacttgaatcacacagacataaccatccaggacatctttttggtacacattcaggatttttgtagtgaaatttacctttggcttctcacagcagaagtggaatgtaggcaatttttctatgcagttttcgatttctttttttagtaagtcaggattcactttttcccacttacatccaaccacttctttgctcttatcatccaccccaatgaggacatatcccccttgagtgttggcaaatgcagaaacataatgaggcagcatttccttaatccgaggtatgacttttttggtggtgaaccttttaaattcaacatgtgttgactcagtaaagttgagtttctccttatacatgagtttgtcctttttaaaaaattctgaggccaatatcctcatatcttcctcttcctgaatgcatctattgagaacctgctgaggatgcaacttcttcacccttggtcttcctctttgggctctaaaccccttctctctgagaagctccagggcactgctagcactcaagttgatagcagaagtcacatctctccgatacaaattggagcgcaagctgcaaatccttagtggaaggctgaaaacatctgggctccatgacttcacaaaaatcaggagattgtgcccctgctgcatgtagtcaaggtatttctgtgaacctgaaggaaggagcttttgaaaagaagtttccaaatcctgtcccagcccatggcattggtaactataggttttatcatcaatctctgctttgatcacaccacctccagaatttaacagtgcacatatagcccggataattctagaattctcagatcttttcaaacagctgttggtcatcttcttcctgttttcttctccaaaaatcactctgcccacatctactattacctcaggatacggcatttcagtatcagtcttgagactctccatttcagcagcccctctgtgctccaaacaataaaagaaaggagttcctataatcaggacagaaatattgtttctatattaataagaattccaaagattacaatattttcttcaaaactatcaattactggagatatattttaatgttggaagtcatctctctctatatgtatatttgttgttgttgtttgttttgggttttttagttttgtttgtttgtttttgagatagaatcttgctctgttatgcaggttggagtgcagtggcacaataatagttctctgcaacctcaacctcccagttcaagtgattctccaacttcagtctccctagtagatgagactacagacacgtgccaccaagcctggctaattttttttttcttttttgttcttgctattttttttttttaagagatggagtcttgctacgttgcaatcctcctgcctgggcctccctcccaaagtgctgggattacagatgtgagccaccgcacccaactggaaattatctttgatactgctgttttctaatcactttgccaaatatccttagccttgccagaataagtaggcatggataaaggtgaatgcctaatatttgtcataatggaaaaattaaattgctaacattttcagccattttgcatttcaaatcaggaaacgccaacactgagcccagatataaagggcatgggttggcacaggagcccaggaaggtattggagaatatgcagaaatagaagttgaagtgagaagatgctcttatttataattcaaaaggggaagaaaggaaggcactagagaactaaggaagtataattttacagtatatgtactgtagaagatcttgctataaacacaaacataggctgggtgtggtagctcacatgtgtaatctcagcactttgggaggtggatgtgagaggattgctttcgatcaggagttgagaccagcgtggacaacatagcaagaccccatctcgacaaaagataaaaaaaaaaaaaatgttaaacattaggcaggtatggtggtgcgcacctgcagtcccagctacctaggaggctgaggtgggaggatctcttgagcccaggagtttgaggctgcagtgaaccatgatcgcaccactgcactccagcctgggcagcagagtgggaacctgtctaaaaaaataaaaataaaagtaaataaataaaattctatatttttatgtattatttcatacactttgaaaagctttattttactcctgaaagaatgtcagttgataccaaatgcagaaaccttttcaactcttcacatgttctaaatctcaaaagtacattgcctcatatacagtgtgatgtgacagcagcattttccttcccttctaatagttctgccctgtgctgtggaaacccctaagacttggaaaagaacatgagcttttggggcatggtaactaaaccattgtcacccttcttttgcttcctagaccagaaaacagccacctaaactgaaatttgagctctgaaacaaatatttcagaaaagatctgcttacctttagtcaattgcaaaacaaaatatttgctaactcaaccaaaattcttcctctaggagaagagaacccatctttctgtgtgatctttgcaaagcaggggccctgtgggcattgtatatactcaccaagaggaagaaagcaggcatccggcaagacatgtgcactcccctgatatcaatttgttcttggttgccttctcacttccttcaggaaaaccagaatcaacctggggaattctttttagaatgtgagcctcttctataggtacatgtaaatgtagtattttatggctccttagggaaatttcccataacattctatttatatcatagaatcacagaagtgttggaaaggactttaaagatcctccagtccaacaatctataggattctaaaatctcctctataatattgccaactcccaacaagttgcaaacctccagcaatgagcaactcactacctatcaaatagtccctctagtcccttctaa

SEQ ID NO: 1244736 - DNA, 4001 bp, Homo sapiens
taggcatcaacttagggtcttgggacatatcccatggttaaagtggggctgctataaacacgtgtgaattttcataatcaggccaggagtggatcacagcattttcctcttcttcctcttacatggaaataataaaactgcttattttcttaaacaaaagagtttaattcttgtgactttttttatggtggggggagggggtggttcaagcaattctcctgcctcaggctccgagtagctggaattacaggcatgtgtcatcacatccagctaatttttgcattttttgtacagatggggtttcaccatgttggccaggctgtctcgaactcctgacctcaagtgatccgcccacctcacgtgatccaccagcctcagcctcccaaagtgctgagattacaggcataagccacggcgcccggcctcttgtgacatttaaatgaatacttctgacacaggatgttatcacactgaattgcttgtctgttatcctgccacaggaactctcacctcccatgagacagacagattaggaatcggcttctttttcccccacaaaggcaggcacagcctccgcccccttctcatagggcgaggccagacaaactttagccattgctctcatcttctcctagaggcttggctctaaaccaacgccctcccacccgctattggtaggggaggggaggaactattgaaaagttccccccatcctccctcaagcatcccttcctgcctgcactagtgacaaaggatccccttctggtgcaaccgagcccctcaagatttcagcaccccaacatttttagtgatgaaaccatgaaaattccgatgaggcccttgcttatttgcatatgttaactacccactttttgcccaatattcctttttctagcaatataattataaactgctgatgcaccgtttctttgtcaagcaggaggatatagcttcagagtcaagaaaaaaattttgcagaaggaatgaatgcctttaagggcattgtgaccagctgctgacgcccagaagtctggtggttcaagatgtaatctgagacgaagaaagacttttccccgaggttccctgaaattccccctcccttacttcctggtctcataaaaactccccactacttctttttgttagggtggatttgagagatcttgacctcttgccttctcgctttggccaaatggaataaatcttcctctgtctccaagcatctgtgtgtcagtgtttggcatcaacagcacatcaggttcctgagcctgaatttgggcttcgacaactcgggctcccgggacacatgcaagagggaaacggaatcacaccgcagtctcagccactgcggatatgaccaactagggctctagttagtcactgtatgggggatacagggctttgtgggctaccctagtagcctgcccctgttgttacagtttgaagactgacgttccaagccaggggcttataggcaagcctctggaacaaagcctcttgtaatagactggacattggccctatttgtccccaggccacaacccatttaacttcatcctcgggagccccgatttcgtcgttttcccttaagtccttcgtgctcctgaaccgtggggaaatgttgccaggtttggtttgctaagatgtaggctgcgctgggtcggcgcctctccctcctccccagctcgccccgcgttccgaacctcccagctcccgggtcctctgccactagctgtcgttggaggtgctcctgagtcaacaaactaaatctccccagcgggaaagactctctcccggcagcgcccagacctggggagctgcagtcgccgcaccttgtcttcaccacagcccaataggagaacccgcgcagaccggggggaggtttggggaaggcctgggcaaagaagcgcgggggattcattacccgctgggttctcctcggcagcgcgtctccctccgggagcaggcaacggagcctcccaagtccagagcagagaacctgacccggcgggatcccgggcttatatcagctgagttccgtgacacctcccggggcgggacatcgcgcaggagacagacagaggtacagcccaatcgcatcgttacgtggagccggaagcccactcttgcaactacaacagtcttggtaaaccttgggtggactggggagaactgaggaggggaagcgcttttttgttgcttctctgtgttttctattttattttatttattttatttttagattttcagttcttatttcacccagggaaggagacctgggtatccaccccatgtcctccagagaacttccctggccccgctcggagtcttcctgggacgccacaggctcggagagcgctccgcaggtttctcccccggcgcctccaaatctttcgattcctactcgaattactccgtcagctgctggaagaggggcaaggggtatggcgagacgcgttggtacatggggcactggggggaagggaaagcctccctccttctcctagtaattcgagaatgttgcgtccgcctcctttcttttgctggcgctaggggctcggaccagcacctgccaggcataggtgtggccactggggcgaaacctggcaggctctggaaacagcgttttactgacaggaaagagaaactgttctttgtattcatcacccaccgcagacttcctcacgcccgggtcttaggcggggctgtcagatttcagtgtgtttctcttaattctagtactaaatttgtactgggcgctggcgaagggcctggctccgccacgcgcggccctctcgaactgcccgtgggtacggcgcgcgctgctgccctgtgtggcctgtgcggggaacccgagggccgaagtgggccccgccgcagcacagggggacaagagaaccaggagcgggctgcctgggggcagattcgaacccgtgctcccagcggatagaagtagcacttggggactcctaaaatattcagcccaatcctgattccagctgccctctctaggcacctttcctctacccttcttccagtttacaattctggtgagtagatgtttctctatctcttctcttccaactcctgcgcccagagccaggaggacttctggagcccgcccagcaagaccctctctctcccatcttctgctcaagggctcgaggtctcagtggacagagctgaagaaaagccgtctatggagcctgcgccaggcgcagactgggtcgtcgcagtctgggtcgtcgcagtctgggccggggcgctggaagtcttactcacttctcaagaacccgcaagggatcaggcctgaccctttgcaagtgacagaatccaaagctttgagctcatgggaaagtggctggaaagaaggtcactgtagggccgcacaggtctctggcgaggctacccaagaacatttaaatccctgcccagagaagaagaggctccagctgtcctgcaccttcctgggaactggcagtccctccgcgcaggggttctgcagcgaccggcagcgcgaggagacaaggatggtggccagttaacagaaaatcaaggcagcgggaaaggtctggaaaacaccacctactatcacctctggagcctgggattatgggataagttttcgatttttaaatgtattgtcaaatagctaaagtacacggaaagtgcgaaataatagtaaattgaacacctgtgtattcaccacacagcttaagcaataacattagcaatatttgggtacccagctggtctcattccctcattccacttgtcccctactcacctgatagccagtacaattttatgaatttaaagttactaattcccatgcaactgtttatacttttagtaaatgtgtttatgtccctcatcaacacatgacactgattcaacacatgtatatgcgtttaagctgcatgtaaatggcatcatgttggccaggtgcagttactcacgactgtaattccagcactttggaaggctgagagggaagacgg

SEQ ID NO: 1244737 - DNA, 4001 bp, Homo sapiens
ctggagcggcttgtctgttccaggtccttccaaggccaaaggcccacagatggtgcccaggccaggtctcagtgggcaggcccaagggctacaatgaatgatgcagggagccctcagcaacaccctgggcccatgaatccccaacggggacagcaaggtgggagagatgagccccagctggaatccctgggaccaggtctgtctctgcccatacccagactctcttttctcttgagaaaggaggaagaatgaggagtaagaaggaaaaaaaaatccagtcactgtccctagttaagccatctccttagaagtgagggcccagtggggcaggtaggctgtgtatactccacgaggatccctaaggacctctgcctggagacatgagtcgaaaacagaggaagcccacagcaaacccgtagatgagcaagaagccagtgtcaaatgcttgggcacatggcttcggacgtggtggagttagaacctgaaggccaaataaaaatgcagagagggtgacaaggcagatgggcacagtttccaagccctctggggcaacctgaacagcagactagagcactggcagggtcaggctgaggtcctcacacactgagcagaagtcgctgctttgcaagggcttttgaagctgcaatctgagcagctctcaaaaccccaaaggggtcaggacagcactctttgaagcaactctcgcagactcctccggccccagaccagcagggctccactctgcacgtccagactaatcaactcccggacacgatgacaggaggcagaaagcccagaagagagccggcctgtgactgggctgggcctcccctcaggccaggccaccaccgtctctggtctaagctggagtcctcccagcgaaggcgcctggccctgcctcaggagtaaagtccgcccgtgcacaagctggaatcccctggccctagcctcagcgtcccgtgcccgtgggaagccaggctccttcctccttattagcagccgggagccatctcagacacgctagagctccgccagttcccaatcagaaaaaacagggcagacttggactgggaccaaggccgatgcagggtaaccccggtttctcagcgagggccctttcccaaactttctcatcactttccagccctcctaccctagacttctcaacccacccgccacaattcactggctccccaaactcctccatctcccagtcactcggaatccctgtgccgcggaagcccccaggcctcccagctgcttccagccctccgctgcagaacctgcttccccttcccacttctccaccgcgacccgccgcagcccgagggtcccggcccgccctccaccgtctcccggagttcctcatgcattccccagggccctcactcgaggccccttcagccgccggcccgggcgccctcgcagcgcctctcgcccccgtccgctcgcgtcctccttgctcacctggtactgcgccgcggggcccgcggggcccatggggcggaaggcggcggccccggggccccccacgcctcctgccggacccggtccccggagcgccggtccgggcagcatgccgggtcccgcggggggaggcggcgctcccagggccgcagccacggcgccgccgccagggcttagcgggggcagcgggaacccgcccgcgcctcggcccgacatcgctccgtcccgtcccgcggtgccgcgatccggactccgggctccgcgtcgagtccactccgtgctctgtgctccgcgatccgggacttggcgatcttaattccgggttccgggatttgtcgatccgggctccgggatttcctaatccaagttcgcgagttcctcacagacccggttcgggacagattccgctcctgcccgggagattccggatccaggatctgctgcgggcccgccttccgtccccggcctccggaggtttggccgcccgagtcgagttacccagaggcggctacgaactccctgccccgcccaacccagcccagcactaggccccgcctctacctggtgcccaatgctcgagtgcctcctcgaatcctgcccctcgcgagacccgcccccagcgggcaccgcccctaactgccgacctcagagccccacccccccacctttggcccagcctttcgtcggaggggcgggagcggaagctgcgcgcggaagcgccgagtgaggcgcggggtcagaggtctaaggtcacttaggggcttcacagtgaatgagccgttgctactactctctcccggtatagcaccctcaccgaattccgcggccacactccccgaaaatagttttgtcaagtctcctttctgcatcttcggcgttaaagactcaactcagagtcggtagctgtggctcacgcctgtaatcccagcgctttgggaggctgaggcgggcggatcccctgaggtcagaagttcgagaccagcctggccaacatggtgaaaaccccgtctctactaaaaatacaaaaattagccgagtgtggtgacgggcgcctgtaatccaagctactcggcaggctgaggcaggagaatcgcttgaaccttggaggcagaggttgcaatgagccgagatcgccccactgcactccagcctgggcggcaagagtgaaactcatcaaaaaaaaaaaaaaaaaaaaaaaagactcagctgctctgtggggcagaacagcagccaactcaacttcctgtaaaagctcatgctggtagctcggaactgccaagggacctaggaggctccagacttgacccagctggtgaacggtcgacttggccaaggctgagttctaccgcacatttttaacgtggctccgcctcactttaaggaagcctggtactttactccccagaaaatgcttctagtcaaaagaaatttggcttatgagaaacctccccgcagtttaaaaaaagaggtctttctccagtatttatagcacttaattttcaaaaatgcagtatcttttcaggtacactgtgctgtatcaaagtattcaaaaatgcgtcagctgtgccagggagcctaccctctgatggtctggatctcctcgccgtgatatggaccagtgctgcttaaactttaatgagcacataaaaaacactcgaggctcttattaaaaatgcagattgtggcagggcccaggactctgcatttgtaacaagctgccagcgatgctgttgcttctcagaccacactgtcaagaagccgggatctagacttttttttttttttagtttttttactataattgctttatttttccagccccaaccaagtaatacttccttccttgcatcatagcaccccagatcttttttacagtatagttctccagtgctttttagaaattagttctcctcatgcctctagtgataaacaccgctgctgctgttttcttacctcctgaacttagagatcccactctattgccccaagagtcgataacctgtcagtctggggactggccactggaattgttaaagtcactgaatcatggcccctcccatccctgtaaagtgggttaagagttcatgataaggcagctaatatccatttcaatccttttaagcttctagaacaacagtaattctcaaagtgataggggcagtggagaatcagagtcctctgggaagctactccaaaatacctccgccagccacccctccaatccaatggctctcagtattgtatttgaaaaataagcttcctaggtaattctgatgcgacccagtgggtcgcatcagaaaacacaagattttttctaccctagaaaaggggcaagctaataagtgcatttaaaagcagatcagctgggtggagtggctcacacctgtaatcccagcactttgggaggccaaggtgagtggatcacttgaagtcaggagttcgagaccagtctggccaagatggtgaaaccatgtctctactaaaaatataaaaattagctgggcgtggtggtgcacacctgtaatcccagctac

SEQ ID NO: 1244738 - DNA, 4001 bp, Homo sapiens
aataaaaaaaaaaggaaaaaaaaaagagaatcaaaactcagcaagcatacgagaatgttttcctaatgaatagggtaatttaattggtatttctgagtaaaattacttcaccttaattcctagtaattaagccttttgtgtattttaactagttcttataggtcatttggttgattagaattaaatgactaaaataaagtactggggatatttagaaatgtactttcaggttttttcttgtgatactaagctacctcttgtatggaaaacattttgctgacgccatgtaaacatttcatcagactgatacaaggatgagaatagaaagtgatgtattatcagggtccaacgcaacaaggcctaccagatactgacagctccctgatcagcaactgtatcatgcttttgggataacaatttttattaaaattaggcagcattttattcctggaagcagtgcaaaaggtaattggtatgacaatgaacttcacattctcttataatggtaaatagcttcataaatgctgggaataaattttgagagtctacctgaaaaacttttattcatcattcacagcccatttcaaaatttttctcctcaagggaactttcttgatacattacctgggcagaattaactgctcccccatctgtattcctatacagtttacacagatctatattattataacttttttttaacttatcaatatggctagattgtatgctacttggaaagagggaccatgtcaggacctagctcaattcttaggaaattttttcctagtattaccagctcacaacataaccaggcacatgtgagcttgttctttacatcaacatacatcacaaatagtgaggtacaaaaagacaaaaattcatctttggaaagaaggcaaataaacttctatgactattggaggtatttgcaaccaaacatgtggaatagatctgatttttcgcttctattattaattttaaggaaattccctggagcataaggaatgagtcctggtgtggaaagaaacagctcattttctcaatggtccaacctgagtctttccctcttaaagaacagccagaaacctttgactctggtgtagatttcctttctgctcacattaagggagctgtcaacatccagcaggcctcgctgcaggggaccctgacaactaacataagctccctgtacgttatacttcattgttaatactttaaaattattgctctcttttgctagaatacaaaatttaagagtgggcttgtacatttgtccaccgttggatccatctttggtgcctggcataaaaataaatacccgataaatatttgttcaagaaatactttatacggggtacgcttatgacactatttcgcttaacactcacaagtactttatatgtacagctatccccattttacagatgaaacaagggagtctcggaaagtttaaacaacttgtctgaagccatatgcagccaggaagtgccaaagttgggtttcaaacccaggccaaactatttcagagctctgctcgtcctcaagtcgctgcctgaaccaatgggggaaccttctgcccgggtggggggtgaaccacggacctgccttgcccacggcttcctgaggtcgctctctttgtcttggagaatgtactttactagcaactcccctaaaacggggtattcacaggtgctttgaccaatttcgggggactggccttgcctccaaggagggggccccagatgggactccctcccaaccctcgctctgctaggcctcaaggaggcctcaaccggctcctggctctggccccacggccaaggctgaaccccagcaacccccgggaactcggggtctagccaagcggggacaccacgacttgcacccaccgacccggtccgtcccacttggaaacactcacccgcgggcagaaaaagcgcccgcagctccggcttcgcttccctttgtcccgcgctcgccccgcccctcgcgtccggagcttccgcactcgcactttccacactcttcttaatttttttttttttccgggccccacccgaccctctttagaaaaactaaccttctagtgaagatgcggtgatgcttagcacactcagggatttttttcaggacccattggatcctcaaaactccccgaattttgatactttcccagccgggcgctgattcgtcacggcgaagagggccgaggaggcccgacctaacacagaataggcctgggtttagcggctgtgaggagccggagccgccgcagcgaccgaggaagtggcgggaggtgccgagccttgcggaggggcggtgggggccgcggtgggagacggcggatggcgctcagcgcgaggccgcggaaccactgtggcagcaagcagttcggccagactcccgctgagcccgctcctggaggggccctccccgactccggtcttgctttcctttaggctgtgggtcagagtctacacttcactaaacctgggatggaggcgtggaggacttgcttcgcggcgtttgcgtcctcgcaggcgcctcgcagggcttcctgccctcacggcgggggagtagctttggcgaaaatcagcacgagttctgcagtttttccaagcgcttttagggtgtaatcgtcccaggtttctaagccaaggcccggagagttgaccccctcgcaacagcttgtgtgtccttgcagcgccgcgggtgccacctggtctccgcctcagcgctgcctcggctccttcggttcccaccagcgggaacgaccgtccccactttcagcttaaactcatctgtccttctggatccagctcagaggtctctttgtgatgccctcctggaacttcccccctagtaatccttcctttgtattcccgtggctctttgataataatggttggagtcctgaacccgaccctttgtatcggaccgtgtttgtcatctccagtgctttatgaaggccttgaaagcaaggttcagccgtctgtattggtcatcttcccattgccagtgcctacgaagggcttgacccattcattgttagacgctcagtaagtgtgtattgaggcagccctctgtgccactccagggctctttccactaaatcatgagtatgttggtttaccagatggaatgagtagcctcttctttggatacataaacacccgatggatattgtgggtcactgtggagggagaatgaacgtatgggatccctgacctgtggttactggaaaacagttgacatttagagagaggctgaattcttgggcttcccgtagcccccatcctgagtgtgccaacagggactagaagcatctctagtctgcaaagcgaggaacaagtgatactctgtccaatttttccaatattgttatactcatgaatagagattaatgaaattgaagagcatattcaagagaaagactaaaggagaagtcgtctgccccgtggacaggcagcttgagtggtgcttgagaaaatgtacatgaaattgcttgttaaaaaatattcacgcctgtaatcccagctcttttgggaggccgaggcgggcagattactaggtcaggagatcgagaccatcctggctaacacggtgaaaccccgtccctactaaaaatacaaaaacaaaattagccgggcgtggcggcgggcgcctgtggtcccagctattggggaggctgaggcaggagaatggcgtgaacccgggaggcggagcttgcagtgaacggagatggcgccactgcactccagcctgggcgagagagcgagactctgtctcaaaaaaaaaaaaattatatatatatatatgtatatatccatcagagacatgtaaaggattaaagtacgatacacaaaggcctcagaagggatttcagtacattctttttctggcttcgtccagcaactccagcctggtttcttccctgcctttgggattatggtgggaggattgggcgagtgcagtgctggggaggcgctgtgtgttgtctc

SEQ ID NO: 1244739 - DNA, 4001 bp, Homo sapiens
caatggtactgtgaggcttgcctggctgtcagatttagaaagcacggaggtggatttctccgtgcccaaaacttcaatactttcaccactgctgatactccctttcatatccatatccaggtagtccaagttttcctgggggtcgaaactgctcaactcagtcacttccacttccttgtactcctcatctcccagttcctgctccatcttgatcaacacagactccacactggacttgtaagaaccaacactaattaacactttaggaattgggcattcttctagagaactggaaggcggcctgtcttgactgggcttagagggtatgctttcttgtttctccaccatcctgtcatcgacctccacaaagtcttcaaagagaaagtttgttatatgctgttgttttagaagtgctctatcaatctgactggtcaggaggtaacacaggtctcctctgaacatgtgttcaatgtggctgagctgagccagggtctgggtgaaatattcagtgtcacagagctcctccaaggtcttcaacttcttgtcaaaacacttggtggactttgctttgataagttttggggtgtaggctggtctgcaggtgtaaaggtctgtgtcggcagactcatcagggttagaggtagtggatgcctggctggcctgatcctggatgtgctccatctcaccaggacacaaatcatgccccttcaacttccgatgagggtatgagcggatctgcttcagcaggtcttgatgttcaatgatggacttctccacactggccagttcattggctttctcaattgcctgagatgagtaaaagcctttgtcgttggctttcttctggatctccgtttctgtgtgtagcactgtcctggtgtaatccaagtctttcagctttttttcaagttccccagcaaatgccttcctgttgccagtcttcaagcactcagaagctctggaaaattcggctgaaagctcctggaactgctgcatgattttatgctggtctgcagagatataagccatgcaaaacggcctcacgaagccacgggcctccaggtcgtatagggtaaggtggtgcacgtatgcaaaggcgccctccttagaatctcccagcaccaccttggagtcctccacgaagttcagcttggggtaggcagatccaggaggatggcccacgaaggaagcctggtaatccacagacatgatacgcagggagaagtaattgagatcaaaagtgccaaaaactttggtgtcattggggatggtcagtaagggttggggtcccacctgctcagagaactcggaaataagaatgaagtccctcgaaaacttggccccggacagttttgaccaggggttagcaccctgactggcgaaggggaagagcggcaccgagtactcctcaggcagggccggctcattgtaaggctcttcttcatactcttcctctttggtgaaggccactacgtcaggggcgctgatcatatttccagatatatgaagaaaacattgagaggaagtgggaaagaatgcggtgttaatcgacgcgcagaaggcaggcctccggagaaggaagtgaagcccttacggccttctttgcgactccccgaacccggggtcctaggctgcttctcacacacccgaggagaagaactctagcagccccctcacagttgtagctcctccggagctctctgaggcctcatgaacgccaaggccgcaggcccaactgcccttctcttcttcgtccggcgagcgcggccagcacaagaaacctgctgcgaaatcacctgcactctccggaacccactgcgacagcaaaagcccccgctctgaacaaggcttaacgcgaggctacgggacgccgcaggggtcagccaagcgctgctgcccctcactgcccgagggcagaaaccgtcgcggctcctaggacgccacaacccggatcctgctaccgcggcgccgccatcttgacatcacatgactcctggtgtccgcgccgcgtgacccggaagcgtcctcgtagacttccgagcaggagattaaaaagtcatgagaaagaggccttggatgggagtgtctggcggctccccgcaagaaggagtccgattaaccaaccactgccgggaaggaggggaaagaggggcggagtgagacgggggcggcgggaaggtggcagaggggaacgtgcttggacgaggggcgcgggacagtctgggagttgtagttccaggtcgctgtggggcgcgcgcctggcggaagtagctggagaaggcgggcggaagttccacgccaagatactggattcggtgctgaggcggcggctgcggcacgggaaaggctcagtgactgaagctccaaaggccagcaggctggtggggacgtgaccgaagcgaggctctggttccctttcggtgggcgccatttgagcctcatctctggcttccccaggatgcgccggcagccggggagcggctccgggcgcgaggtctgaggatgatctttcctgtcgcccgctacgcgctccggtggctgcgacggcccgaagaccgtgccttttcccgcgccgccatggagatggccctccgaggcgtgcggaaagtcctctgtgtggccgaaaaaaacgacgcggccaaggggatcgccgacctgctgtcaaacggtcgcatgaggcgggtaagaaagcgcgttccgatcagctgcgtgccttaagggaggcccaccgagcgggacagcgtggtgggcgccaagaatcgagatgaaggcgattatctcccatttctcaggcctcactgcccctcgtctggattattgcagtggcctcctgtctgctctcggactggagtgcattttaaaacgtagttgatacatctcactcatttgcgtggaaaccttttgttttgcttgcgcttagcaggttcccaaacttgtctgattctcggaatcgcctcgggcgctggctgcccttcgggtcttgtgtgaggctggggaagtgtgtattttactgtttttccctagagattcagaaattcatttgggaactactgaccagattcccttaacttggcattcaagccctgcccgatcgttccccagccaacctagccctccccatcctgtgccacagccactgcattctacagcccttgtgactttccagcctcacagtgcacacttacagcaacacggtaaggtttggggattagatttgaagtcagccctgttcctacccgaatgaactgattctgagagaggtaagtggtaagaatgtgttctacacacacgggaggcacaaacgcaagggaggataagaaaaagtttcataaaggaggtgccacgggagacataaagagctgtccaggaaaatatctcagataacaaaagtagatcctgaaatggttttctggagaacttttctaagagcatgggtggaagttccctgctcatttttctttagttcccagggtcctaagacctgtttccagatcaaggatagtgggagtggagccagggttgtgtgaatgctggctgacagctttacctgtttccagtgctagaagtcctggtgaccagccccaaggtttgtctacttctagacaatgaagtagacattgaaaaatggttctcctacgcctaacttcttatccttcaaggctctgctgaattcattctctctctctcccttttttttttttttttttaagcaatccagaggtcttgtatttatctatttttaccctatcataccatgaatccatagggaataggttccagcggctcaggctcttttccattggttctcacaaagtgtacttccctcaatggaacaggctggcacttcaggtgaaccctttctctttgacttgcttcttttttgatcattttccttcacacatttcaggaaagatcttggttcttagagtgcttaatatgctcaatagaaacattaattctttgggcaagaatctagcccttgttcgcagcagtgccaacag

SEQ ID NO: 1244740 - DNA, 4001 bp, Homo sapiens
cgatttatagtaccccctcacgtacattccagttggctggaactcagcagctgattgctcccttgtctaacttggcaaggagccaaaggaggacttttctcagtcaactctcccaagctggaaaattctctaatgccagagttctggcttaagtcgggatatcaggttattcatgagatgccaaaactacatctttacattggctttgaacaagtccctcaagtacaccatacagattcccacagacctcaaaatcatctggatattaaggccaaagatggctactccatctctcacatagagaggaatgtgcttttcacaacaccagcaacatcaaaacaaacctttcataaatcacaaatcaatctcaattcttaaaataggtgtcaagcaacaaacgcaacattaaattacttcctaggctggacacagtgactcatagctataatctcagcactttgggaggctgaggtgggtggatcgcttgagcccaggagtttgagaccagcctgacccacatggtgaaaccccgtctctacggaaaatacaaaaattagctgggcatggtggtgtgtgcctgtagtcccagctactcaggaggctgggaggggaggattgcttgagcccaggaggcgaaggttgcagtgagctgagatcgcgccactgcattccagcctgggtgacagaacgaaaccccatctcaaaaaaaaaaaaaaaatttccttaaaatcttgtattccaccctactgaaaactctccctattccactagctactcaaattctctcactattgttaatccctaggccatcaagatccaaatcccaagtcaggttctctgagaggaaatgaaggagtaaaccttaacaaaatgtttttgaccttgtcaagcttcaaaagtagtggttctcaaccagaatatgaccacccatcccaggaactgtttggaagtatgtgtgggccgttactggcatctaatgagcagagccaggaacgctaaacatcctgcaaggtcagacctgcataatgaagaactgtcggccgggcacagtggctcaagcctgtaatcccagcactttgggaggctgaccacctgaggtcaggagttcgagaccagactggccaacatggcgaaacaccatctcttctaaaaatacaaaaattagcagcgggtggtgacaggagcctgtagtcccagctactggggaggctgaggcaggagaaacgcttgaacctgggaggcggaggttgcagtgagctgagattgcgccactgcactccagcctggacaacagagcaagactgcctctcaaaaaaaaaaaactgtctgcttaaaaggcgataacattctcattaacaatcaatttcctaacagaagaaccttatcattaactgcattcacctctcccagcttttacagcagtggtaaattttttctgtaaaaggtcacagaaaataatttaggcttcgtgagccacgtacatctctgtctcgtgttgctctttttaaacaactcctgacataagaatgtaaaaaccattcttagctcataggccactggcaatattttgcccatccctgttctagggtattacctgaatcattagtctgtttatattaatttagagatgctggttaaaataaagtgtgatggagtatgctataaacaacaccaataatgcatatgacaatcttaaagaatgaaatatgaacttcagaacttagccttaccacctaagaactggtgcatgtgttgggcttctaatcacctctcattctcgtcccctgtgcatttcaggtgctttaggttttcttctgaatgttcattttcaaacactttaccaggaagagcacagaaatgcctttcccccctcttcaggatctagtactttctgttcaccatgcgtgccactcaaagtcttttacaattattgctgttaacatcttctaaaatgtctaaaccaaaccaaggcctggaaattctgacgggtatctgggtcctgactttccggatggtaactaaaggtcacgtggggtggaaagtggcctgtgggtaacacagaatatacacacgcacgcgaacaggatatgctggtaatccggcttcctgagacctggtgagttttgagagttctcatcaacactctcggggaggatgaaaaaccttaagctgggaaatggcagattttaagcaagtgctcattgttagatctctgtctacagcagaatgggaaggtacaccatttactcctctatattttatttgcctaaaaacacaatacacaaaaaataaacaaagtgactactgagagaggtttcttcagtgtggaagctggcgtttgcagcatggcttatgtcacgtctcaaccccagaaagatgaagagtgtggttttggtgtttaaccagcctcagcagcaccctggcactctgtttcttcccccagagaactctgctctgttagaggaaagaaaccaacctcacatattgaaacaaaacggataggataaaaataaagccctgaagtggtttggtgaccgaggtcatttggggcattaagggtttataggtagggctgatgtactttgagaaacttgcactcactaccaaccacaaagacattagccttacagtccagcagtgatctggacaaagcagccccaatccttgcctaccaggggctgctccttgcaacccacctcacattatcaacatctgaaaaacccggttctggttctgaccttctttgaggatcccactaagctgtttctcatggcctaagaaaaagaaaaccaatctgcttcttcccacagaaagaggctctaatgaactgctgtcatcacgtgctgccaaactgcagttcacacacttttcaaatagcttccagagtgaagagtacagcctgaggtacatattgcaaactactttacaaaagcataggactaattaaagacatgaagtcaactcacaaaaaccctaaaaaattttctgatgcccaccttacagatacggaatctttttcttttgaggcagggtctcactctgtaacccaggctggagtgaagtggagcagtcaagactcactgcagcctcaaccttccagaccagagtattctcccacctcaggctcccgagtaactaggaccacccaccacacctggctaattttttttttttagtagagacagggtatccctacgttgtcaaggctagtcatgaatgaactcctggattcaagcaatcctcctgcctcagcctcccaatgtgccgggattataccggcgttgagtcactgttcccagcaagatatggagtctttatatccatgaggccaaaaaattaagctggctttctctgtcatgatgatataattatgagacaatgaaataactgggttatcacagataaagcacttacctactagtgcagagactcaactattctttatcattatagattaaatcagtgcttgtgctatccagagagaaccaggccaaaagctttcttttttaatgtatttacttatttatgtatttttaattatttttattattattttttttttttttgagacagagtctcgctctgttgcccaggctggagtgccgtggcgcgatctcggctcactgtaagctccacctcacaggttcaaaccattctcctgcctcaacctcccgagtagatgggactacaggcgcctgccaccacacccggctaattttttgtatttttagtagagacggggtttcaccgtgttagccagggtagtctcgatctcctgacctcgggatccgcctgccttggcctcccaaagtgctgggattacaggcgtgagccactgcacccagccttatttatgtattttttaagtgaaatatttttattattattagagacggcatctcattatgttgcctaggctggtctccaactcctgggttcatgcaatttcccacctcagcctcccaaaatgctgggattataggcatgtgctactgtgtcca

SEQ ID NO: 1244741 - DNA, 4001 bp, Homo sapiens
aggtgcccaccaccaagcacagctaatttttggtatttaaaggcaggtcctttacattcacacctaaagaagccacaggtcatttggtgctggaacaatgtcttggctgaggctgcagctctgtgacaggtagctcactgaactctgtgggttgtttttagtgggagatgggaatgaacaggagggcacctcaggagggcccatttccagagtcaggtgggcttcctacttggtagcagactgtccctcccctttgggcctcaccagcacagcattttacaaactttgttctcttctccctggaaaccagtgctgccacttaagaatcgatgcttcctcagggccatttacccaaatagccatctcaggaaaaattagccaagttcaaaaaggcatctaagcccctggatctcactttctgctgggaattctaaacgctgtagcaggcagcatgagaggaggaaatcctctaggattcagaagtaactgagaacccagacacactctgagaggaccttgcctagtcccagaaagatccgcatttccatttcaaggcaaagtgtggcatattcactcccccaccacaaccaagtgaagcataacccttaagtacaaacggggagataaatcaatcaacttcatggtgagagaaagtgctatgaaaaggggcaacaagagacccagcgccactctgtcaagaaacaccagatctgttttacagcagggtctctatgggccaattcccacttcctggcatttcttgccctgagaccaaacactctctgtcagtgttctgaaatgactcctaggcagcatggaccaaattacccttgcgaacagacacagaaaataatgtcatccctgtactacataattccatcaagtcataccatatcatccttacctaagtgaaatgaagggaacggaagggaagggaaggaatcctggtaacatcctttgaccctgacctggtcatcagaacatttaaaaccctgccaatctgtccttctcccctctacttccacacccacccgaccccctatgaaaaaaccccaaaatgttcagaaaaacattttagaatgcacactggtataatagctaaattctgggactggtggtttttgtgcttccagatttgagtcaccaaagctcatcaattctcggttcttactccctggcaggctcccactagggatatcccatagggaactagacttttccatattgaacaaacagggtacatgagtccagaaacagctattcccaatccctgccaagcgtatggtctctgcaatgaaacatctcagcaatgcctctcccttgggagaggctctgggtctgcagccttcaagaggccttgctgctgcctttcgcgtggccagatgtgcaactgcatctctgcatttgcaaattaagctctatacccatgattccctccttccatcccacccaagcactagagagtcatacagatttcaaagtaaactaaatatctgagacaatggtaggaagcgtagggtagggtgtgtgtgttcgggggtggggtggggggaggtaggtatggtaggtatggtaacacaagaaagaagctacattaatctctatctgtctatattctagatgaagaaactaaacatgccttacctttcagctgggagttgtgtactgcaaacatattgatggtcataagctgcagcatgcgggtacttccaatgggagaggggctgtgctgcagtaacacctggaactccttgaggaccttctcagccactgcagggaatgtctccatcctgcagattcagaaaacccatcaatgaggcacctctctctttcagtctctctctcactctgtctcacacacacacacacacacacacacacacacacacacacacacacacacaccagacaactactgcctaggacatttctttgctactttcacaaaccttcccggtatcctgcaattttgaacaaattcaagataaaggagttttcagggtccagagatgcaaacaactcaagttttggataaatcactatgagttattatgctttggtatgctatttcctcacccctggcaataactgtgttcaagctaatatcaaagtttctctctgaaaccatcggcttttctaaatactcaacaaatttcctgaaaccttcacagtccctaaactctctggtatgaaacttaattcaattaaaaaagtaatgtgaatctaaacaaaaaaaaaaaaatttttttttttttttgagacaaagtttcgcttttttcgcccaatctcggctcactgcaacctctgcctcccaggttcaagcaattctcctgcctcagcctcctgagtagctgggactacaggcatgtgccaccatgcccggctaatgtttgtatttttagtagagacgggatttcaccatgttggccaggctggtgtcaaactcctgacctcaagtgatccacctgcctcggcctcccaaagtgctgggattacaggcatgagccactgcactcggcctaaagatattttacccaagcgtttactttaggtaaccagacatagttctgctattgtcttctgaggtactatcacactgactgttccgcctaacgatcccaaatttccccttgaagaatgcctagacctagaagcccccagtcatctgtctcagttcttcgtgtgttgccgtcctcctccctctcacaaggctctgctcatcggggtctgtatgttttcaggccagtggaaatagaatgccctggccaagtgccactcccaatacaggaagaggctgtaacgcagggaggcagaaatctagccagtgacctagggctcctaaggagaggtcattcaaatcactccttgccaaatgtggccactggatcccaaacagtggtgcatgcctggagcttctttggcaacagaaacaaaccacagctgaagtcttcagaaataaaaagcaagttcaagcttggtgctagagagagtagccaggcacatgggccttagggttatgccaaacaattcgtggtcaccaaagtattttttaccatgtcccccagcccccaaataaacaaactgcttgtgacatacttgtggggttggggaaacagctccaggttggattaacaaatagcttctgaaaagccacaaggaaggtaatccttctcaaaagatagaaagcagtttcaagttctagaggaaggtgcttctagcttcacccatctcggcccttcccgactgggaagtgtcctccctggattagaaaactccaggttttctagaatcttggcaatcttcactccttgcacttggatggcaactcttattactgaccccctggtgcccagaagtcgtgccacagttatgggtcaattacagtttacattccagttccctcctctgctgagctgtcctcattttcattggcacaaaagatgccatgcatttgctttttttctccacatgccatttcaagtacccacccctccaaaacaaaacaaaactcttttttttttctctaaaaaatttcagagccgttaaaactcttggaagatgtggaatggcagagagtgacatgtttggggctggactagatccgtttttccccacgggctctaacaaaggtttcattttaaaccctgacactgtgcagcactctttctggtcagaggtggggagggggctagcacttctcgttacgagaatagcagcgttcactctgcttgaaaagcagccacgctgggcaagtttcagagccatgtgtctccgtgttgaaaggcagtagagagccagcacagaacgacaggacagaagtgtcacgtgggacagttttgcttcgaagctgtgtctgaggaagcctcttccctggagtaggaattggaaacagatccattaacactctctgggtcagactgaagtcttgaacgagcaccaggtcaaatgtccacatttcctttttataaaaagttttttaaaaaaaattctccctttgcctt

SEQ ID NO: 1244742 - DNA, 4001 bp, Homo sapiens
tttgcttggctcacactctcctccatgcttgcccctgtgtgcccttctcttcatctctagcctccagcatcctcttctccctactggctgagtgctcaccaagggagaggggccctgctggatctggagcttgaaagctgaaggccattccacatgggaaacacacgtccgtggccagacgtgccacaggggacggccccttcatcctcactgactagcccctgcctctcttttaatgcatcctcgtttcttagtgtgaaaggaacttcacagtaataagccttctatctgcagcacatagggaagtactaacctggagactactgatgatcattttacaggtgcaggtgttctctctctcatgtggacagcaacccctctggtggcaaagcctaaatctcatcgttttcgtacgtcactggcaagaattgtaaggacaagctgtgcacacagtaggctcacagtaaagacggacagcccagggaagctcggctgggtaccacagagagcagatgaagcaggcatgacccatgttctctaagacagtggaaataaatgagcaccgctgtgcaggctggctgcccaggaaagtgcggcacacaccggtcaactgtgtgctctgtggctgcatcctctgccaccttcaccaaaaagccaaccccgctttcctacacggtctaggagtgttctctgctttctctcaccattggccctgttaccattataggctggaatctcaagctaagtactttgaccaccttcacctgagaggttgatgtagaaggttctcggctacccagaagggcttagaaaaagttcagccccttgagcttggggtgcctggtcctgggcttgcctccgtgaaggagaagggaagcttgtcttggcccagggcaggtaagcctggttccattgcgtgtattcaaacatgtgatgaggaaggctagaaatacagaagcaggggctaaaaggcattaaagaacagagccgaaatgagtaatagcctggcaggcagcacgcacagtggcctccctgcatctccagcctctcacttgcataggaaacttctgcatttccacaagactgccagtttcctctctgtggtctaattttaaccaccttgtcgttacagtgtgtgtcagccacctgaccccactatgacctctgaccttacgccccagctactgcttgcactatggagaattatgtaatgggtccaggattttccttcttggtgtgaggctgctgccactgaatggagaggagaggggagctaaggagtgagaagaggacagaggaaaagcttgcaattgtccttggcctcacctggacgatgagaggtacactggcacccctgctaagtgtgcagaggaaacctgcccaggacaggagtgtgccacggacacatgcacagacaggcgggcaggagtgttgctgctgctagagcacgggctacatggtatgctgcgtggctaagaaagcatggtttctggccgacagggagaaaagccacatgtgtggatgtgggactcctggagatggggatttccagggcacagcaggacccagggatgtggacatcctgaggccacctgcagcacttccttacagggtctgtgggaattgcctattccatggacacaagcaacgaggagtagccctctcccagttttcatttccgccccatttagaaggaaattggtttccttggggattgtgtctgtcatagctattagttccttctctaggacaaggacaactgctggctgatatgcaaaaggctgtgatctactggggtctctgacctggtgttaacaggcctggaaaggattctacctgtttggagagagaaaggttgtctgtcttttggaagagtaccctgtcctttgcaatccaagcagcagggaggatggtcaaagctgtgtaaagtgtactgtgggagtgagaagtgcacagtctgagctctttagtagatggagaaactgagaggcagaatgtccagggcttgcccagaggcacagagaaaccttctgtctgtagctcactggcctgtctgcaaaagcattctgtcttaacttggggggaataagcccactggggagaggaccaccgctctcttgatgctggagttctgtaggagacttacgggaatattctcctagacaaagcctccagcacttgagtcagggaaaaagcaacacaagacagtttaaatacagttaataagagacttcataatgaaagaagcctttcaaaccactgacaaaaagccaattccaagatgatctttgcttggtctaggaggacttcctggtaggagaggggttaaagctggactccctgcttggagaggaaggactccagatgaagtctgtgacatcatccccacagttaactctgctcgtgagcacatttttccactctatatcaatgaaaaccagagaatgtaagtggcatgtatatcgcagctctgggggcaaactctggatcctccagaggagaaagagctgggcgggagaggctcccttcctgggctacattagcacgtggggctggactggggatagaggcgactaaaagggccgccagccagggaacaccctggggagcctacggacctctcctctgcggtgtaccttctcagtcacagtcctgacccttctggagggagatgcactgtgtaggcgattgtcaagaattcccaagttaattgacaaaatatcacatacaaatcatttcaatcagcttgggaaagaaaactggggctttaggtcagggaagagctgaaagaaagcccctttcccttcccctgaagattgtcggaggcagcttaccactgcagcaggaactgaaacctttagctttagggctccagttatcactctaatcaagtccacacgcaaagaaccaagcagaaaggaaaactgaaagtgagatgtggagaggcgataccggaggctgttctctcctaggctcagttccttagagagagataatgtaagcatcgggtaagtaggggctggagccaaggggagcgaggaacaaaggagaaaacctctaggtcaagagagtagactgggttactgttctggggtatttaaggtggagaggtggagaagtaaagaaaaatggtgtttcttgactgggcacggtagctcacgaatgtcatgtcagcactttgggaggccaaggtgggcagatcacctgaggtcaggagttcaagaccagcctggacaacatggtgaaaccccatctctactaaaaatacaaaaatcagccgggtgtggtagtacatgtggtagtcccagctactagggaggctgaggcaggagaatcgcttgaatctgggaggtggaggttgcagtgagccgagattgcaccaccgcactccagcccaggcaacaaggcgagactctgtctcaaaaaaaaaaaaaaaaaaaaggaaagaagaaaaaatggtgttctctgaaaactggtgactcttcacagccactcggtagggaacaagcacagtgtgggtagagatgcccggcgggggaggggggttggggagagaaaacgagctatatgctgctttatgaaggtagggagggtaagagagaacgggaactaagcaccaggtatcacatactcatgtgctctgagttgcaagacttaacacctcagggcagccccggggaagggagaaaacctccaaatctagccagggaatatgaggaagggctggagagccaggaccctggatgcaagctctagggagtgagggactcgctctatcgttacctggtccccgttttctccaaacaggcttcttggaaggcacaaccatggttactagtcattttgcaaaatttctttttctgaatttttggtttggagaaatcggagtttaaacttgtactatcagccagttcttttttctagtcttaacagtccagcttgctactgctcctctggttaaagagaacaatcacacgggtttccccccacaaactcaagtt

SEQ ID NO: 1244743 - DNA, 4001 bp, Homo sapiens
agcttgcagtacgcggagatcgcgccagtgcactccagcccagcggacagatacttacttaagtatctggttttttaaaaaagtatctgttaccgttatcaaaagtaaccactaaacattacaatggaaaagtgacagaattcgggagaatattatcaagtacacaaatggaatgctatataaaatcctagcataggccaggtgcagtagctcacgcctataatcccagcactttgggaggctgaggcgggaggactgcttgaggccaggagttcgagatcagcctgggcaacatggcaacaccctgtctctataacgtatacaaaaaatagccaggtgtggtggtgcaggtctgtaattccagctactcggaaggctgaggtgggaggatcacttgagcacaggagggggaggctacagtgagctgagatccctccactgcactccagcctggaagacagagtgagaccctgcctcaaaaaaattggccgggcacggtggctcacgcctgtaatcccagcactttgggaggccaaggcgggcggatcacgaggacaggagtccagaccatcctggccaacacggagaaaccccgtcactacaaaaatacaaaaaattagccaggcgtggtggcacacgcctacagtccaagctactggggaggctgaggtaggagaatggcgtgaacccgggaggcggaggttgcagtgagcagagatcgcgccactgcactccagcctgggcgacagagctagactccgtctcaaaaaataataataacaacaataaaaaagtttttaatcctagtattgctctctaaatataaatggaaacaagcccaaaacaggaatcatatgctccagcaagtacatttactgtttgtaggtgtaaggaaaaggggaagaaaagagactgaggttttggatagtgcttcactattttcataagtttaaaaggtaggttcatgaagtatccacaaagataaagcagtttaacccaagaatagctcaccctcggcagtctgtaacttggtggggggcggggggatggggaaagctattcctactactttctagagcagcgggagaaaatagccttaataatccaattatgttaatcaacaaaaaccaatttcacagactggccgcaaacctagagaaggcacctatcacagctaccattctacacaactctattgcctaacgcaggagaggtgagacacttagaatctttcttactttcctgacgtggctggagacttgaaattaacttgcaaattgagcattctctctaataaaaactgctcccacacatgccagggccaaacccgagtagtctgaggtcccggatccctccagtggcgcagctttcggaagcctgtcttgggggggaaaagttcagcaacgaagtcgcaggctcttaaacctttctccccaattccttctctccgacgttaaagcggtggccggggcaggcccgcggagggcggcctggagagcgatacgcccggggcctccaccagaccccactcctttccgcgtctcccgatgcctgggaatccggggcgggtctgagagggctggggcaaaaggaacagtcaccttcgcggcgagaaagagggtggaggcaggaattcgggccaggctctcccggagctggccaggactggccgagcccgaccccgcactaacccgcgagagaggtagggcagcgagggtccgccgcggccccagcgcctactgctgggggaaggggcgggggctccggagccgagggccgagcggggaggaggcagaggaggaggagagggaggcggggcgggcaggcccggcccaggagctgggcggcgcgactcacctctgctcccggcctgcggggccagagtagccaggatcccgcgcagctccgacgcggagatccgcacacgctccagcccttccgccatcttcgcggctgctgctacagccgtagcggctccgccaccgccgcgcgcagccaggaaaccaccacagacgggcggcgcgcgcgctcgcccacctcccggcctttccccgccccctgccgccctccctttccgaacgacggtggccgcgctgggaggaaaagcgcccgccgccggttccagaggggcgggaccggagcgagagcctgggtggggcgggcgggcgctgcgcgtgcgcagaggtgcggccggggaggcgcgcggaggctggagctggaggcgcggcgccggtgagctgaggtgaggcgaggccgggccgtgccaggccaggcgggcgtttgcggcggtggctgccgttgctgttgtcgtggacaccaaggacactgctagtctgggactcgggttgacagagacacccctcagcctgggctcctctggacaccttaggccaggctctcccgccacaggcccggcctagcgccgcgggccattacttgggaccttgaagatctgctaagagtagttgttactattcccttttttttttagttggagtctcgctctgttggagactcccgggctggagtgcagtggcgcggtctcggctcactgcaacctctgcctcctggattcaagcgattctcctgcctcagcctccctagtagctgggattacaggtgcacgccaccaagcccggctaatttttgtattttttgtagagacggggtttcactaggctggtctcgaactcctgacctcaggtgatccacccgcgtcggcctcccaaagtgctgggattacaggcgtgagccaccgcgcccggccgccccctgacttttaaaaactagatacgatatagttggaatcgtgtggaaggaagtacatcaggaggcatataagtccatttgggacctgtaatcccggcgactcggaacgctgagacgggcggatcgcttgaacccgggaggcggagactgcagtgagccgagatcgcgccactgcactccagcccgggagtctccaacagagcgagactccgcctcaaaaaaaaaaaaaagtcaatttgggaatttctgtgtcactatggattcttgaaaaaaattactgctgtggatctcaggttgactttttaatttcccatctttaaaattgaactataccagaaggctggtacttgaatctttttttggagaactgtacagaggtgaagctcccttccccaaggcctcctgcctccacctgttgcccctccacagccccataggcttttaccccacacccatcacagaatagttaccaattattccttagtctgagccgaagggattgccacaacctctgacagaactccttcagttccttttacgtgacactttgtcaccggaaggttaagcataagaagaaagtcagtagatgatgggtgaaaagatccaacagttcagaagaggaaccatttgagtggtcagagcagaagacagcctttgccaccagatttgagagaaataggaagaagcgttaaaaaataatctgtttcatattgaaatttgagaggccattgcatgatttcttttttcagctggaaaaataatggaaaacaagaaaactttcttaggacaaatggcaccacccatttaatgcaacagtgtcagtgaactgcagattagatatgccaaaagttaaaccagttcaagaaaatttaccagaactcagaaggaaaaggtaatagataaaaactgagagacaaagataggagacatggagaaggggtacaaaaaattaataattaaatacgagttccagaaggggataatacagctgactgcagaagagcaataatcaaatagtagaagaaaatttactacgttggtggaaatttttgaattatcagatttaaagaattcatgaaataccaggtaaaaagaaatgacaagaaagacaaccatatttaagtcagtatcacaatgaaagctgctgagattttttgtttttcgttttttttgagacggagtttcactcttgttgcccaggctggagtgcagtggcacaatcttggctcact

SEQ ID NO: 1244744 - DNA, 4001 bp, Homo sapiens
tttaaatgaaaaaaaataagaaagtagtcatagctgatattttccttttacagcaggagagaaaacgtatagctgatgcacctaaatttctgtagggctctttctaaaatatcaatacatagtgaacagactatcttaaaacaagaatgaaaacacagctcaaagtttttatttcaaaatgctgaacaaattttagctacctgatttaggtaatgagtgaaatttgtgcacacagtgttgatcagttaaactcctctcctcacagagctgatggccattgctccaaaatttgtagcagtcctcatgtaactgcatggcgtatttgtgaaatgctggacctctagcatgttgactgtacactcgaagagcctgggcaagctgattcttatggacagtcattgtgtaattatgaggcaaatttgactggtaggcactgtgggccatgggtaaagctttttggcatcggttttctgagaattttgtgtcaatatccaaaaatccttccaagactttaatactgcttaaaatcttagatgttagctctccagtgggtgaccccaagtcctcttctttcccatcaatagccacctcatacagttttgaagctgctgagatccacttctgataagtaggaagttcaaaatgggaaggctgtgggttcctgcccacactgtcatcgaaacctttcttgcttagaactagctccacatgctgccataggaattcccgaagagtgaaatccactagctggcctgaagaactggaactgctgctgtcaatgtgaaaggaaagttgttgtcggctgtgctgcctcatcacctggtatcgcctaggcccagaaaggggtgcaggcaccagcaaagattccgggtccttcacagtacaatgactcctaagttggtccagcaacatacctactgggtcctcctcctggcttcccggtactatgtacacgaaagcttggttggcaggcacagtaaagaggcagttgatgctctgattagtcaagacacgactcttccggaagattctatagatctggtcctccagggcatgctgcagcctccttttgggagaatgtttcttgggcttgtctggatgagctgggtcttggttccgaggaggttctaccttgagggctccattgagttgaaagaggaaaaggagtctaggtgggcaaggtcggcagtttagcttccagtctttgccaactggacaatccttaatggctgttttaaggagcggcaggaccttctgtctcagcccatccagggctctgaatactcgatcataagtgatatcaaaggaacaagtgggatggaccagaagcaagatatgacagacagagaataggtaaaggagactgaggcactgcagcttctcttgatgcttccagaactcgtgtgcttctgcatgaggtaaagagagtccacctccagcttccccgctctgaagagcccgacaagcccggagaagctgtgaattgtcacagatggaggtgaggagaagatacagaactttgctttcctgactgtagtaggcctgcagaaggctgtagtcctgggagcctgcctcagttcggttaccttccgcgacagctccacttccccgaactgaacccccggctgcagccccagggtcctcggctccaccggcctcacccacggcgccagcctcagttctgattccaggtcctggatccccaggatcttggtggcgaaagagaggaaagacctgtcggtcgcacaccgtattcacaagagagaacttctcggaattcaggcgtagagccgtcttgccgaagattcccacaacgcagatctcatcctcccgccatggaggctccggtccgccagccgcgctccctccgccctcagtaggggaccctccgggactttcagagcccatccaggctgatgctcccattagaaggtctcgcaagctcacgggaccagccatagtgcagagcgttctctagagtccttccggtccgttagtaaaaccgaccggctttcgtccaattttgaaatccttcctccgcttcttcagttcctgctttcccgtcacttgagttccgcctcctcttctcctctcctagtttgtttcctcaactgtaggaattgagatatcaaaaacaaaaaacaaaaaaacaaaacaaaactgggactactgcggtggctcacgcctgtaatcctagcactttgggaggccaaggcgggcggatcacctgaagtcaggagttcgagaccaggctggccaacatggtgaaaccccatctctactaaaaatacgaaaattagccgggcgtggtggcgggcgcctgtaatcccagctactcgggaggctgaggcaggacaatcgcttgaacccgggaggcggaagttgcagtgaaccgagatcacaccattgcactccagcctgggcaacaagagcgaaaaccgtctaaaaaaaaaaaaaaaaaaaaaaaaaaaagcaaaaattaggcgtggtggcgcatacctgtagttccagctgctcaggaggctgaggcaggagaattgctcgaaccaggaggtggaggttgcagtgagccgagatcaccccgctgcactccagcctgggcgacagagtgagactccgtctcaaaaaaaaaaaaaattgcgaaatatctttgtatgtaaattataacttgcagaacctctctaactagaaggcatattgacaaatagctgccaggataaaacttacaaccagatttaaatgtataattataacgtttattattctggggttttgtaaaaaataaaaatctttgaatctaaaaaaattatctatagcactatacaataacatgactgaatctttaaaataaatgttgattgaaagaaatcagaaacaaaagtgtatataccctataattctatttttttttttttttttttttttttttggagatgcagtcttgctctgtggccaggctagagttcagtggcgcgatctcgactcactgcaacctccggctccccggtgcaagtgattctcttgcctcagcctcccaagtagctgggattacaggtgcgtgagaccacacccagctaacttttgtatttttaatagagacaggatttcaccatgttggccaggatagtctcaatctcctgatctcatgatctgcccgcctcggcctcccaaagtggtgggattacaggcgagagccactgcgccaggcctgattttatttctatagagttcaaaagcaagcaaaataaaccattgcatttaggggtgtgttcttactaaaagcaaggaaatatttattgtaccaagtaggtcagtgattacttagtgagggaagggattatgatataatatatatattatatatatacataataatatatattacacatatacataataatatatattatatatatacataataatatatattatatatattttgagacagagtcttgctctgttgcccagagtggagtacagtggtgcaatctaagctcactgcaaactccacctcccaggttcaagtgattctactgcctcagcctcccaaggagctgggattacaggtgcaccaccatgggcggctaatttttgtatttttagtagagatggtgtttcaccatgttggccaggctggtctcgaactcccgacctcacatcatccacccacctcggcctcccaaagtgctgggattacaggtgtcagccaccacacctcgcctccggcctaaaattttttttttttttttttgtgagacagagtctcactctgtcacccaggctgaagtgcagtggtgctatctgggatcacggcaacctccatctcctattccctgtctccgtctcctcaagcaattcttctgcctcagcctcccaagtagctgggattacaagcacgtaccaccacgcccacctaaacttgtatttttagtagagatggggtttccccacgttagccaggctggtctcgaacttccaaccccaggtgatctgcccac

SEQ ID NO: 1244745 - DNA, 4001 bp, Homo sapiens
tcattcaccctccgtcctggttcagggactgtgttggagagaccctgtccactcgtgtcctgtggatgcaggacagggatccccacctgcctgcctggggcgtcttgtgagtgacagccactggggtctccaggctcaccgctgtgccccgaccccgacctggcctgactcttccctactgtgcgcctcccaacaccgcaggagcttgtctccccagacaccagccccagccgaagcccccagcctctgctgagctgagaacacttgggctagtccttggtttccacatttccctgggtcattgtttttgtttctcactagatgccagcttgtttgctttgaggaaaacatatggggggtggtggctttaacgctggcttgaggacagggcggcaggaggagtaggcagcctcggctcacgggccctgcccaggagggctgctctcagtgttccccaaagaaccaaacagccgggtcctgcttccttaggggtggtgtcatgtcagcctgtgcatcacggtggcacagcagaggtcccggttgccagcgtggtccctcccagcctcacttctgtgaccttctgcccacctgagcctgagttgaaagtcagtcctccaggttcctggtttggtgttcaaggctcatcaccagagggagatctaggagtttatggggttctagatgggcccagggaggaggacccaggctgagccgtgagctgagaacaccagcagtgagtgggccaagcccctgaaaggacacagatgggcagagtcctgctgcatcctgggggcgccgcatgctggctgggcagaccctgcgctgacctcgacagggctctgccctaatcctgggaaaaagggaggctcagcaggccggcagccattctctcccaagctggacagccaaatccctcttttaagccccctgaataaaagagctgaaatgaacttgcagaataagcaggccctcggggcccctctgctgcacagcaggcggagcaggaggcgctctgagcagagcccccagccctcccctagtgcagggtcccagcagcagggagagtgcaggtgtgtgcaggaggctggctgacttccctgcagggaagcgacccagcatgtccccgaagacctctccgtgtttatggtagactgtggcccttcaccctgggggcaggggacccttgctgctccctccctgtccccccttcttctgtggccattgccactcacctgggagctcaggtgttgggggctgagcagcagtgccccagcgcggagcctccacgtgctgtcctcgtacttccttcgtgggcgccgctgctcccctgggcgcctcagcccagctcctctgctgacagccagctgctgtctctgcctggcttttttgttgttggtcgtcctggagatccaagtgtcaaattaccgtcgcgagggggagcccgaggaagccctgcttgggaacttgtcctccaacttcatgtcccggtgcctcacctctgccctgagagcgctgctcagggacaagacaagctccctctctcctcctccttcctcctcctctccctctccccgactcccacgccgtgggctgggcctgggttgggagctgaagaaagaagtcggctctctgccttcctggccaggaggaccctggggaggctccacctgagcctgtggaggggagtcctgcagcgctctcaggtctggggcacccaccctgccctcaggaaggccaccccttctgtccctctggccactccctggctggtccctccctctggcctctctcaggaacaacagtaaacagtggggagctggtggccctctcaagctgagcaggaggctttgcaaccagtccctggggaggcccttgtgccgctcagcatctgaaggcgtcttgggggagaacttggaatcctgagtgacctgggagtggcctgcgcgcccggcaaggcgcctcatgttccttgtgaggtgagggccttctgctggggctgtgaccgcactcctggcccagctgtcagggcagggctccagagtccaggggccgggccctgtgacatttgcctggttgtgcctcccagcaggctaggctgtgtggagagaaaccgaccccagccccgctgtcaatggagctctttgagtccgagcacaaaaccccagtgagtcagggcctgaggagggcagggggaggaagccagccatgtggtcacaccactcggatgccagagcctcccagaggctggacaggcggccgctgtgcgggcgcacggactcctggggatgaaccatttgttgcatttactcattggagcagagtgggggcaggagcgccctctggtggccgcctcggctgtcccagcccaggtcaggcttcagagctgcattcactcagctaaaagaaagtcagccaggccctgcttccttaccggggtgttgcaatcagccttgcatccttgagcctgcgccttggggtcgcagcccctcaaagggcttcttgcagccgcagcagtgctcacactgggaggagttctagttagagcagttaatgccagctattcttgtccctgggatgtggcaccccagacagccctgcctgtgttccagcatctcctcttgggcttccctaccctgtgccacgttcctggtggcaggaatggctgtttataaggagcctgagagagctatggcccctcttgcggcctctgcagctgccccaagggtcgacagccacccccatgcagagggaacagagatgcgacagagcctcgtgggccagccagaggctgctccctgctcccagcatgggcagaggccgctcaccccaggagggctgcagcagggttgagacagaggaagacgagaggaggactccaggcgaggctgcgtctccctggctaaaggccccacctgtgacaccctcacgggttgatgatgggacatattactacacagccgtgcctgccttagcaatgcaaatacgttttgagaaatttaacttgtcattgtgcggtcacagagtatacttagggaaatcaaacagcaattccagggaagagaaggaaaaaaatatcaagcggcacagcctcctacacacccaggccatgcgctacagcttgttgctcctagaccacaaacctgtacatcacgttactgtcctgagtaccgtatgcagttgtaacacagtggtattcacatatctaagcacacataagcatagaaaaagtacagtagaaatacagtgttagaatcgtaggggaccaccattggctgtgcagtcattccatggggcatgactgtactgtaatgcacttcagacatcacctcagccatcttcgctcagtccgtgagggctgtgcctttctgcaccatcttactgacgggaatgcatgggctttaggaggtgaagtgtgtcacccaaaagacacccttcatggcagagccagcatctacatcccattgccagaggacagaggggaggagcagaggagtaactggacagagtggggttcacatcctgcttcccgggagacccccatgtgttacgtgaccttgggaaagttggttcaccttatcgtcctcatctgtgtagtggggagagccaaacgatgcctggtgcagcttggatgagatgaggggtgtggggctcccggcatggtgccggacgcggcagtgctcgctcagctagcgattcaggctcgggtgaacagacgctggccgactgggctctccgcccctcacctctgcggtgctgcctgctccaggtgccgccatgccgccattgccaagtacttcggggatgcgctgcctgcctgcgccaaaggctgcgaccactgccagaaccccacggccgtgcggaggcggctggaggccttggagcgcagcagcagctggagcaagacctgcatcgggccctcccaggggaacggctttgaccccgagctgtatgagggaggccgcaagggctacggggacttcagcaggtaaggggccgagaag

SEQ ID NO: 1244746 - DNA, 4001 bp, Homo sapiens
cccatctctactaaaaatacaaaaaaattagccggtcacggtggtgggagcctgtagtcccagctactcgggaggctgaggcaggagaatggcgtgacccgggaggtggagtttgcagtgagcccagatagcgccaccgcactctagcctgggtgacagagcaagactctgtctcaaaaacaaagaaacaacaacaacaaagacatataagtcctgtaaatggtgtttcgagagtataaaacaagtggccttaccctaatccttgagggttagggaagatttacctgagggagtcaggttcaaacggagatacaaaggatgaggaaggactaactaggccatagagtaaagtgtggtgtgagggagagcatcccggtcaatgagaatagcatgtgcaaaggccctgtggtgggagagaacacagcatattcaagaactgaaagacacgctgagaacccaggggcagggcaggatggggtgggcaagatggctggagacaggcaggctagagcgtgcaggccccggtgcggctttgttcgggaagcttgctctggtggctctatctggattaaaaatgagctctcacaagttagcagatttgaaaaggaatttttatttcatttggttgtgtctttctctgtcaaggatttgtgaaattgctggctgggcctgtgagcctgttagagaaccttgttagccatagctccttccacctgaggcagtggagccatcctctccatgtgcttttagggttctggtcggggaaccctaaaaacaatagggtcaaggagccagaattggtctcagaccagcctccccatcttactagtctgaccaaccctaagccagatacagtattttactagactttttcctgatgggaaaggaagacaccagggcttggcccctgagccagagggaaccgcgaaggggcccaccactggaatgggggcaggtcagctcgcctcccctgctgccatctcagtccccagcaagtcaggtcactcctcttcacccgcttcacactgagtgttttctgtggaagtgagtaaaccaaacacgatggcaaataagatgagaagcaggacagcggtgatgaataagataatcactgccaggcccccctggtcccaggggttctgccagaacgcatcattccagattgtctctttgaataccagttggtccatgagaatctggaaaagagggacagaggacctgagtgcaggcagccctcccaggccctgtcccaggtgctatgctctgcccgccgactccagcctctgtagcagcctctgtgagcagccggcccgcctggcagccaggggacatgaaagggctagagtctttgtgctggatgcctgcagccagcagcaaatggcatttcccccgctctagatacaggagccaggactggcgcaagaagtggggccctggattcttcctaggggatgcccctggattctccagtccttctttcctgagtagcaagtgtgagcaaggactctctctcatccctgagacctacttggctagaatctaaaaagcatcatgatagagtctccctgtttttcctgccccaactgccaaacatttgggaggcatttgagagagcgtataggagccgaggaggggccaactccagctgaggcctcggtagcctccttggagcagctgagaatagaacttaggagtcctctagaagcggagctccttatcgcagactgcaagcccatagccaggtgagggcagcccaggtggagaaggagggagccattacctgattctgctggtagctgttctgggtcctacaagggcaattcagggtggtccttcaggctcacactttgtggagggctgagctgaagaggccgccaggtgaccagagctgcaccctgactcaaagaagcaactgttgagaggaaaaggcatgagcgtggccaagcggccctgaccagaccttagttgctgtcaccaaacaaacaaaggtgggctagggctggttgcctggcaaccacggctccctttctgcctttcacgttcccccttcagctcctttctgcccttgtgtgatgtcattttgggggtgctcagggcacgtgttcatgagtccctcctgagagaagtcagacttggggtggacggggaagagactggaccgagggcctttgccccaggccatcaggccgcctcacctgtggctgggctgggctgtcctctgtctgggtgacgtgtggactgcggacctgccccgagctcaggaagccctggggctgggactggcgtagggctcacttcctgtgttgtggggtgaatgattaactgcagccctggctggcgcctggtgcctcctggaactgtttctgggggaagtgttgctccccccctgaggcttcccattggtgcctttgtctgctccctgggcacggcctcagcaacattgtgtggttggtttctgcccactggcacaatagggaagctgggaagaggggatcaagcctgtgccctggtgcttgaaacctagtggccaccatatactcctttaaaagctaggatgtgagggcccgctatggccaggaaccatgccaggcactgtgtgtccagttgtgagatcagagaggcgggccctgccctccaagggcttcccttctagccctcgggtgcttatcccagctggtaaagatctaggagctttgagaaatgcccaggccccacctggtaccacttatatcagtctctggggttgccaggatgtcgtattgtttacacatccccaggtgattctccccaggtgtggccagggttggatgacagatggaggcagatttagaacagtcgttcttaactatcatgggcgtcactgacccgggttacctgatgttttctgtttccttgtgtgaaacttactgactaaggcccttggcatgctgaacgctcacagcagtgggccagtctctagctcaccctttgcgtgcagctccgtcagttaagtcagatgcttatcaagagtcaagtgttggttcccaaacctgttcatggcagttgtacttgtaattacataattgaatttaacatcccgggaaccaatgaagcaacaataatagctgaaaccccaattttacatgtggggaacgggcacagagaggttaaataacttagccgaggtcatcagctagtaagtaactgagttggagtttgaatccagcagcacacagtctgagcgctgaagcacctgtgctgcacctcagagcgagtggagaaagaaattctttctagaaatacctattgactactttgggatgactttggaatcactcagataatgttcctgttgaaaaagatgcagacatgataactaaacatcagggacattttgtaaaaacccagaaggttttcacacccagcttcctttgcctttaagttccaatgactttaagtttttgttctgctttaaagaaaccaaaactagaaaataacaatccaggagctgtggttggcaagcccacactcaaccaaaactagaagatagcaatccaggagctctggttggcaagcccacactcagagaaaaggccaggaaggccggccaaggaaaaggtgtatgtttccatttaatgtgagatatgtaaaaaagtaatagatgtgtagagaacttaggtgttctttaacaaaagttgctttgaccagctctttcaattaactgccggccccaattggataatttttttttttttttttgaggcagagtctcactctgtagcccaggctggagtgcagtggtgtgatcttggctcactgcaacctctgtctcccgggttcaggcgattctcctgcctcagcctcctgagtagctgggatcacaggcgtgtgccaccatgcccggttgggaggaaacttttatatactctctgccaagtttttctaatgagattcttgtatccgtggctttattgtcattttttatttttattttattttttttgagacagggtcttgctctg

SEQ ID NO: 1244747 - DNA, 4001 bp, Homo sapiens
tctctctctctctctctctctctctctttgtgtgtacacacacatctacatgtatatgtgaacctgacatttttttttttaatttggacagctgctgctatgagcagacaaatagcaaatgcatgttcaaataaaacctcagaaacaaccgatgacacagttgatgaggcacgtgtgagctcacagtggtgattttagaccatggtcacgtagagtgtcatgttcataagacagacttaagtgtatccacatttccagacatttcacacggagcactgggacactcccgggttctgctaccatgacatgtttaagaacttcttacaggccgggcaaagcccaactcctctgcccagcacactaggggcattcgccactgcccactccactcgcatacctcgaggctgcactcaccagtgagtactttcagcctttctgaggcttcctgcacagcccccaccccaccctcatctgcaccagtagcagcaagccccaggcccccagcacaaagccttgctgagatacccactgagaaggggctaactactgtgtttggagcaaaacatctctggctgcccaaacttggtctggggccatctcccaccctggatgggacctccagggggaaggcccaatctgataccctcctccaggccccctagggtccagcccagcccacagcgggaaatctgagagccccagggattgcaccaaggagggagcaggtgcaggctacacagccccagatcctgggaacccaacccgagagcacatgcctgatcaggatggaaaatcccacccaagggccactgcacacaccatggacacattctaactgctctgggtggcccatgcgcaaggtagtgactggtccacgtcggcctccgccctatccccacgtggtgtgggcctctggctagtcactgacccgaggaatctagacacggctcaaggcgggtttccacctctctcccttcacggtaagggatttaccccctgcgatggagagttcccaaaagccgctgctgatcgcgtccccctcgacccccctccccacccatccaggggcctgagttctcaatctgagttaatcaataaccagagccgtcaggcctcagtgaagcggcaacgcaggggagcgtgaatggagggtgggggtcaggcaggggtgtcgaccattccaacatgccccgcgtggctccaggcagtgctgaacagtcaggggccggacttcggcgcccaagccgttgatgtcatgggacagaggagagagggagacaggactctgagcaaacagagcctggctctaaaacagggcggaggaccaagacaggtgcagctggcaggctcagcggtcctccccccgccctctccaactccggaggggcggcaggacccccatcacctagtccgagcggccggtgaaggccccaaccccgcagacgcgagcagaggcaggcagtcggggcgaaggggcggcacccggttcggagccccactccctggcgccagcgcacgcgctcccccgggctcacctggccgcggccggacagcgagaaggtggcgtggctggcgaagcgtgcgctgcccaggcggggcgcgcggtcgggaaccccgggcgcgggcggggggctgggcgtgccgggagtgccgggcaccggggacatcccgctggccaagcccagcgcctccacctggcgcgtcaggcgctcgagctgcgcctgcagccgctggttgtcccgctgcaggtcggccaccgtgcgcgccagggggccggccaggcgcatcgcctctgccactcgccgctccacgccgcgctgcagcccccgcatgtcctcgtgcagcgcgcgcaccgcaccctccagcgccgcctcgtagcggcccagcgcctcgcgcacagtgcgcgcctcctgggcgtcgggggccggctccatggcccagcagagcgcgcgggtcgagagcgggccagacgggggagaagatccgagctccgcagctccgggccgcgactggccgtccgtggctggcttcgctcgaggggctgccggggaggcgggcgcggggcggggcctcgggggcggagccggggacgactccgggacacccccctgccctggagcccagcgggacggtgcggagggagagctcgcccagcctctcccctccccggctcttaactgagccctgcgaccccggaggagcggcgtgcggcctgcgggaggggcggcgggcccacccgaagaaggccctggcccccctggaccgtagagagcacacccgggctgacgcgttcgctcgggactctcacccgcaaggcccaggttcctccgggggcggagactcccgggctaatggggacacctacagctcccacagctgccgccccactccgcggggccctccctatgcagcggccacggctctcgcaggcacacgctcacctgtgggaccttcgcctggaatttcttgtatctgttctaagacctcagggaggagacaggtggtgaggtcccctccctgactctgcgactacgcgctgtcccctcccagtcctactctgtatagcaagatcttcgtgcccttcccactagtggtcggtagaggctcccgacccaccaaggggcctccgttaggagatcctggagaggctaagggcagacagagaaagaagggtgtgctggagctgcatctccaaatcctggaatgggcggctttgcgactaatcgccccctcccgcaatgagagtctcagtcactggcctctacccgtaggccaggggtcttacccctattccttctcaatgctctttatggctgaacccagatagttcccccttccaaatgcacaccccaaaccatcaccagaaaagggaagaagggaaacaggtgttgctttaggacgatgggatgatgggcaaagctaactctaagttttcgctatatcataaagctgatttaaaataaaaatgagaacatatcctcctttgtgcaaaaaacctttcctaattggccttctttttcccaagcctggcctgcctgaaagaggcccagaggctgggcatgcatagccagctgacctgcaggaaggagaagtctgaaaggcttgttcatatcatgttctgctcccaaggttgtttggagcccacaaaccctcctggactggccatcattgccccaaaggaactggagcagcctgacagatgctaaatgctggttctctcccccgcccccagccccaaggggacaggaaggaacgctgggttacctaatccaaggagccttccagcaattatttcatgaaaaaggcaaatgccaaaaggtgtgcatgctgcatatatgtgtgagcatgtgtgtgcattccaggtagccatctggacagggtgagccaaactgctccctgaatgctttctccaggtggaatctttagtagcagcctccagagacgctgctgctgctcttgccgcagacagcactcaaagcccctccaggtctcagcacaagaacctggagttcaaaaaccctggtctcagccacagaagcccagtcccttcccttctaagatccaaggaaggaccgtgtggagaagccttgagagggactggacaggctggtctctaggcttctctccatcctccgggagaaggcaggctggctgggccattggtgggaagcctggcagggaggaggaggtgacagatcgtagagcctgtggctgcctgggatccatccacactctccagcctcaggctagttatctggtctctcctgagccacatgggaatctctaggaggaacttctcggggacggggcatggctgcttctggggccgaaggcgggactctgtcaagggcagagatgggggctcactgtgggttctgggaaggcagatggtacaagaccatcccccttggctcctttttctcagcagtcagatctccgagtcagtagctggagatgcacccaggagaggagagaagagccaggagcatgaggaagagagt

SEQ ID NO: 1244748 - DNA, 4001 bp, Homo sapiens
caaaacatctctggctgcccaaacttggtctggggccatctcccaccctggatgggacctccagggggaaggcccaatctgataccctcctccaggccccctagggtccagcccagcccacagcgggaaatctgagagccccagggattgcaccaaggagggagcaggtgcaggctacacagccccagatcctgggaacccaacccgagagcacatgcctgatcaggatggaaaatcccacccaagggccactgcacacaccatggacacattctaactgctctgggtggcccatgcgcaaggtagtgactggtccacgtcggcctccgccctatccccacgtggtgtgggcctctggctagtcactgacccgaggaatctagacacggctcaaggcgggtttccacctctctcccttcacggtaagggatttaccccctgcgatggagagttcccaaaagccgctgctgatcgcgtccccctcgacccccctccccacccatccaggggcctgagttctcaatctgagttaatcaataaccagagccgtcaggcctcagtgaagcggcaacgcaggggagcgtgaatggagggtgggggtcaggcaggggtgtcgaccattccaacatgccccgcgtggctccaggcagtgctgaacagtcaggggccggacttcggcgcccaagccgttgatgtcatgggacagaggagagagggagacaggactctgagcaaacagagcctggctctaaaacagggcggaggaccaagacaggtgcagctggcaggctcagcggtcctccccccgccctctccaactccggaggggcggcaggacccccatcacctagtccgagcggccggtgaaggccccaaccccgcagacgcgagcagaggcaggcagtcggggcgaaggggcggcacccggttcggagccccactccctggcgccagcgcacgcgctcccccgggctcacctggccgcggccggacagcgagaaggtggcgtggctggcgaagcgtgcgctgcccaggcggggcgcgcggtcgggaaccccgggcgcgggcggggggctgggcgtgccgggagtgccgggcaccggggacatcccgctggccaagcccagcgcctccacctggcgcgtcaggcgctcgagctgcgcctgcagccgctggttgtcccgctgcaggtcggccaccgtgcgcgccagggggccggccaggcgcatcgcctctgccactcgccgctccacgccgcgctgcagcccccgcatgtcctcgtgcagcgcgcgcaccgcaccctccagcgccgcctcgtagcggcccagcgcctcgcgcacagtgcgcgcctcctgggcgtcgggggccggctccatggcccagcagagcgcgcgggtcgagagcgggccagacgggggagaagatccgagctccgcagctccgggccgcgactggccgtccgtggctggcttcgctcgaggggctgccggggaggcgggcgcggggcggggcctcgggggcggagccggggacgactccgggacacccccctgccctggagcccagcgggacggtgcggagggagagctcgcccagcctctcccctccccggctcttaactgagccctgcgaccccggaggagcggcgtgcggcctgcgggaggggcggcgggcccacccgaagaaggccctggcccccctggaccgtagagagcacacccgggctgacgcgttcgctcgggactctcacccgcaaggcccaggttcctccgggggcggagactcccgggctaatggggacacctacagctcccacagctgccgccccactccgcggggccctccctatgcagcggccacggctctcgcaggcacacgctcacctgtgggaccttcgcctggaatttcttgtatctgttctaagacctcagggaggagacaggtggtgaggtcccctccctgactctgcgactacgcgctgtcccctcccagtcctactctgtatagcaagatcttcgtgcccttcccactagtggtcggtagaggctcccgacccaccaaggggcctccgttaggagatcctggagaggctaagggcagacagagaaagaagggtgtgctggagctgcatctccaaatcctggaatgggcggctttgcgactaatcgccccctcccgcaatgagagtctcagtcactggcctctacccgtaggccaggggtcttacccctattccttctcaatgctctttatggctgaacccagatagttcccccttccaaatgcacaccccaaaccatcaccagaaaagggaagaagggaaacaggtgttgctttaggacgatgggatgatgggcaaagctaactctaagttttcgctatatcataaagctgatttaaaataaaaatgagaacatatcctcctttgtgcaaaaaacctttcctaattggccttctttttcccaagcctggcctgcctgaaagaggcccagaggctgggcatgcatagccagctgacctgcaggaaggagaagtctgaaaggcttgttcatatcatgttctgctcccaaggttgtttggagcccacaaaccctcctggactggccatcattgccccaaaggaactggagcagcctgacagatgctaaatgctggttctctcccccgcccccagccccaaggggacaggaaggaacgctgggttacctaatccaaggagccttccagcaattatttcatgaaaaaggcaaatgccaaaaggtgtgcatgctgcatatatgtgtgagcatgtgtgtgcattccaggtagccatctggacagggtgagccaaactgctccctgaatgctttctccaggtggaatctttagtagcagcctccagagacgctgctgctgctcttgccgcagacagcactcaaagcccctccaggtctcagcacaagaacctggagttcaaaaaccctggtctcagccacagaagcccagtcccttcccttctaagatccaaggaaggaccgtgtggagaagccttgagagggactggacaggctggtctctaggcttctctccatcctccgggagaaggcaggctggctgggccattggtgggaagcctggcagggaggaggaggtgacagatcgtagagcctgtggctgcctgggatccatccacactctccagcctcaggctagttatctggtctctcctgagccacatgggaatctctaggaggaacttctcggggacggggcatggctgcttctggggccgaaggcgggactctgtcaagggcagagatgggggctcactgtgggttctgggaaggcagatggtacaagaccatcccccttggctcctttttctcagcagtcagatctccgagtcagtagctggagatgcacccaggagaggagagaagagccaggagcatgaggaagagagtgattctggggtgggaagggggcgggatggagggtcagcaccaccctccgacctggctccatgacagatggaccgaggctgcagctctgttcccaggcccaggggctcctgtgagccttccctgcaggcccctcccccactctcctttagctccactcctgcccagtaccaggctgcgagggaggtgagggcccgtgaacctggctggactccctgcacattcaccagccctgatgtcagcaagcaagtggaggccaacctcccaccaaggcctgggggccctggcgcctgcccttcccactccagtctcctggctctgcccctactgctgcccaccgtcgtcctgctctgctctgagtctaggctggatgcaggatgcaggacaagctttccccagcccccctgccaatgtctcacaaaatcaaatccacagttagggaagttaccatctttgggcctgaggcggggaaactgaggccctaagaggggcagggactggcccaaggccacacagcaaggcatgcggagacagtactggaacctgggccctgcccccaca

SEQ ID NO: 1244749 - DNA, 4001 bp, Homo sapiens
ggatcacatgttctttccacgatcactgactacagacagcaacagcaacagataaactctaaagcaacaaagatcccctataaaggtttccactgactcctcccaatgtaaggacactgaatgaggggggagggggtggaatacaagtatcctccaatccaggttttccattaagaatcactcagttaatgattccctgcaattttccctagggaaaggaaaactgccatgaaagtaatatattatttaaattgcagccaacatacattcaagctaaattctcaaataccaaattcactgcaagttttcatccagcaagttcagccagtggactgggatgtgacacacaggcatttaactacaaaattagtccaaataaatctcaaagtctagtgtgggcaaacataattacagtttatccgtacacgtgcacgcacacacaaatcctctacggaaaattatctttctcaccactcacccgaatacaaacgtggacaatttatcaggggtaaatggtgaaggtaggataacgccgtgattccaattcctttacaaaccaaataaaagttctcctaaaacgggggtggcatgtccatgtaagaataccaaaaatggcactgtaagcaaaacgtacctgtaatgttaaagatttcatgcacctggaatcataaacactttgtaagtgtagtcttctatctggcaacccctccggacattcttttccatttcgaaaaaggaatggggagggtggggagagtaacagaaagtttgctcgaaagtttgtatgagcacatacttagcaatgcaccccccccaaaaaagtgtgtttttaaagcaggtctggcgttagaagttagacacaagttctgcggcctaaaaggaacaaccccaaacatgccaccctacaatcagacacttccaaaacacagtgtacaatgagcccaagccgtcggatcagacaggcacaccggaaaagtcaacctgtctcctcacctcagagacatgagtttaaggtgtgtggcccgggcagcggtggccggcggcggggagtaaaggtttttcatgcgggcataactgggtgtgtgcaaggtaacaacccgggaacacacacgcacaccctcccgttaagcgctccatctttaaggagtgtttactgcgcgcagtcagcaaccggattcaataatcctcgccacgggagctcttcatccccttcacgatctcacctgggcggtagcccaggggctgttccccgagccccgggaggcagcgtctggctccttgaccaagactttccgacctgaaatccgcctgcgatgcgaaccggtgtattctcccctccacaaaacaccaccccccgccccgagtcatcctcggctttttaaacaatgtccaaaccagagcaagtggttttccaattactctccctgaactaggccttcccattcctccgacccccaactcatcattgatcgcgaccctggcccttcccaaggccacaggcaccccccgccagctcgcccaccccgcggctgcccagcccggcccgccgccccccctcacctgtcaggcgcagcttgacgggcccgttcctccggcctccggggttagacatgtccccggcggcgggggcggcgggggcggcgggcggcacgggggcgacggcgaggcgcggcggagtcaccacagcggccggggctggggcccgagcagccggcgcctcggccgccacggccggagggtcccggatgtgccgagagtcgtcgccatgagccgcggagggagcgggacgccgagctcccccctcctcccacttctccttcctcggcccgggccgcacaacaaagcggcagccgcggccgcccgcgccgcctccgcccgcgcccccgccgcctcctcgcggccgccgaggcctttccctcctctcgtctcggcgaggcccagtagccgacggggctggtcggctgaagcgggcggtgctcgggggcgccggagcagaactctgggctcggccgcttcctcctccacccgccctcttgtctgagggacccgggacctggggccgccgccgccactcgtcggctccggggggcggggaggagacgggaggcggggccggcggggcggggcggggccggggcggggccggcgggcgcgcgcagggtgccctggcgggcaccggcagtcagggagggtgtgagctgccgccgagggtcccacgcggaacgctgggagggagcaggcagggagcaaagcggcggcgggcgcggcagctctgtggcacctggaggggtttactgtccgggccacttaagggagaacttttgtccaagcagggccaactgcattttattagacgcccactgcgtgcagggcgctccgagaggctggggcgaggaaggttagaaccgagtccgctgcctgccgggaacttggcgtctttcgggcgagggaagagaaagcattcccacgccgatggttccagcaaaaccccaggaatgctctgctcctggtcttgtagttgacacctccatccgggactcacctggtggaggagatcaggttacctgccgactcccgctcttttcaggtgcagccaaggatggggagatgatacgtcttaaaggattaacaagataaaccttggagagtaatgtatgaagagttgttcatacgctactgtatttcgttatctcaggaggagaaagagaaaagtttttaaaaaatgtgtaccttatcctttgacattgtaactgtactgctagaaatttattttttatttttttgtttttagacagggtctccctctgtcgcccaggctggagtgcagtggtgcgaacacggctcactgcagtctcaacttccggggctcaggtgatcctcccacctgagcctctggagtagctgagaccacagtgtgcaccactacgccccactaatttttgtatttttagtagagacatgtttagtagagacgtttaggttttcccatgttgcccaggctggtcacgaactcctgacctcaagcgatcagcccgcctcggcctcccaaagtgctgggattacagacctgagccaccgcaccggccctattcttgacaaataatcgtacagaagatgttctttgctatattccattaataacaaaaggggaatgagggaatagcataatagtccaggaaccgcatggttttttatgcagccatgtaactatttttatgaagatcatataatatggaagaatgtatatgtaatgcaaagtttaaaaacagaatagaagttgtatgcatatacatgcgaaagtatctagcacaatgtaaactactaaggacaatagcgtgggggattttttatgtgattcgttagttttgctttaggctattataacattaatgcaattttaaatgttttggattaatatattttaatccttattccatgccagtcatttcttttaatacatcagtgaactcacttctccagatagttacctgcgagaacatttcatcagtttggatacagccctacaattaaaagtaatccaaaaaagtatatgaagttctagacatcacactaaaaataccacagataggccgggcacagtggctcacgcctgtaattccaacactttgggaggccgaggtgggcggatcatttgaggtcaggagtttgagaccagcctggccaacatggtgaaaccccgtctgtactaaaaaaaaatacaaaaaaattagccgggcctggtggcgcatgcctgtggtcccagcaattagggaggctgaggcaagagaatcgcttgaacacgggaggttgcagtgagccgagatcacgccactgcacttcagcctgggtgacagagcgagactccatatcaaaaataaatacataaataaataaaaattaaaataccagagatagtgccagcaattcattcaacaaatattaagtggccattttgtgcaaagcaatgaacaaggtcctttagaaatgcttccttgtactac

SEQ ID NO: 1244750 - DNA, 4001 bp, Homo sapiens
agaaagatatccctcaaggtctctgctgtagaaattgtgacctgaacagacgtcgggagtgaagcccacttttgaagcagatatgatttccattcatccacaggcagatccatgctgcttttgatctataaaatgagtaagaaaataggaatcttacaaatgcacaattttagaaaatcaagagttcagccaggtacggtggctcacacctgtaatcccagcactttgggaagccgaggtaggtggatcacgaggtcaggagatggagaccatcctggctaacacagtgaaaccccgtctctactaaaactacaaaaaaattagccaggtgtggtggcgcacacttgtagtcccagctactcgggaggctgaggcaagagaactgcgtgaactggggaggcggaggttgcagtgagctgagatcacgccattgcactccagcctgggtgacagagcaagactctgtctcggaaaaaaaaaaaaaaggaaaatcaagatttcattcaaggaagcctgaaacaataaaatcaattcttgtggtcttttcctctagtttatatgctaaggaaggatctatattttctcacagcaattcactcaacatccttccattcagaaatatttactgaaagactactttgtcacaggcaccatgcaggtgatggttatacaaagacgaagcagactagatagctaccatctgtgctcttagatcctcttttttttttttttgtgaggcagagtcttgctctgtcacccaggctggagtgcagtggcaccatctcggctcactgcaccctccgcctcccaggttcaagcaattctcctgcctcagcctccgagtagctgggattacagatgcgcgcaactacgcccggctaatttttgtatttttagtagagacggggtttcaccatgttggccaggctggtctcgaactcctgacctcagatgatccgccagccttggcctcccaaagcgctgggattacaggcgtgagccaccgcgcccggcctgatccctctctagtttctctgagacacatcccagatttttctttctcacccaccccagcaactattcatttaacaaggtatttccctctcttacatagttcagcgttctgattaagtcctcaccatctcgtctggcattcttcctagagtgttataattaatgtccatgccattggcaccactccccactttcaatccagcctccaacactgagacagaagtcagtgctctgcccttaaattcatcaacgctactccaagcataccaggaagcccaggacaaaaccatccttacttgacccttgtctgactttctaattctcaggtgtcacttactcctctgcatgcacccttgcatactgaacaactcattgctatccccggcttgccaggctatttcaactctccaatgttttggcataggctactcatgctttccggaccaaccctaccctggcttatggagtccacctggaaaattcccacacgttcttcgactcggctcaaatggcacctcctccgggacggcgtccctgatttcccagctgtgattccaacacccttggggcctgtaccacgtctacctggaggtggggttactgacggcataaagtgcccccacacactgtcctcttctctaaggacgggggccgggtctgattccctttcggagaccccccacccccaccccccaccgccacggtgccaagctcagggcttggaggcgggaagtcagccccgcgttgctggacgaatcgggtcactactgcgactctatttagcagcggaggtctcaaggaacagctttaacctcctctgggataccaacccgtgcactcgccagagaccgaggcgagaacgcctcgagaaccgctcagacgcgcccggaactgcgccctggtctccctcccagcgcccgcgcagctcctggcgcgccccttggcgccccgctccgccccgcaccgcgtccggcgtcccgcgccaggcctcgcttgggaccatgggtgggtcacgtgggccgcgcctcggccaatgcggcggctgcgtagcgcccgggcccgcccctgagccgcgcgcacgtcgggggcgggagcggtgcgcgcaacttctcgggccaataactgcgcagcgcgcgggacccgggtggggaagctggagctgttgcggggtccgcggggaagtcttggcggtggagccatggtcggccaactgagcgagggggccattgcggtgaggaggtgccgggggctgggccggcggtccggggtggctgcggccccgagcctcgcggagtagagagggggaggggagcccggggcgacgggggatgaacgcgaggggaggagatggcggggggcggtggggacccgccgggcgtccctctagtgtcatcgccccctcctcaaagcattctttcgatcgtctttaaaacatgctcacatttttcctacgtaagaacaaactaaataaacgcttgcctttctctgcatcttccacctgcggacactttctgtctcttctcctttccccacccacagccaaacttcttgtctggtttcagccacttcctttcctcgcctttcatcaactctttaacccactccagtcatccctttgatcgctgtagaaaaccctggctgaaggtaccagtggcctccaagttgctaaatccagcccttttccgttttcagcttacctgagttctcagcagcgtttgcgtttaagccctgcttgcttcaggtcacaccctcttccttggtttttagtggctcagcttggcaggtctatccccgtcttatttgtaagtccctctttgtaaatttttgttgaatcaaggctccctctaggccctcttgactcccgaggcaatttctttttttttctccagcctgggcgacactcactgtcgcccaggctggagtgcagaggcgcgatctcggctcactgcaacctccgtctcccgggtgcaagtgagtctcctgtctcagcctcccgagtagctgggactacatgtgtgcgccaccacactcggctactttttgtgtttttattagagactgggtttcatcatgttggccaggctgatctcgaacaccagacctcaagttatccgcccgcctcggcctcccaaaatgctggaattacaggcatgaaccaccgcgcctggccccaaggcaattccattgccatctattaatatatgtcagttgctcacaaatttctttgtacagagccacctttactctaaaagacaaacttccgtcatctgtctgcttattccatgcttcagagggttttaagttcagtatacgtatcccaaagcaaattctttatctttctaagtctgggcctcttgatccctatctccacggatggcaccattatctattcagttcagtgctaaccagaaattgagaaatcattcctcctatattgtccattacctgggcatccagtccctcacgaagtgaagtgtattttgcctctgcgtagatctatcaagcccactggcttctctccatccatactggcaccgtctttttttttgcctgagctgctgacttccactcagcatacgttcctgccaccattcccatccacagcatactctcagcctacctctccagtcacccccacatttttttttaaatttagatttctggtatattccatactcctaccttcttccatggggcctttgaacttttttttttttttttgagctggaatcttgctctgttgcccaggctggagggcagtggcgcgatctcggctcactgcaagctctgcctcctgggttcacgccattctcctgtctcagcctcccgaatagctgggactacaggtacccgccaccacgcccggctaattttttgtattttttagtagagacggggtttcaccgtgttagccaggatggtctcgatctcctgaccttgtgattcgcccgcctcggcctcccaaagtgttggggttacaggcgtga

SEQ ID NO: 1244751 - DNA, 4001 bp, Homo sapiens
ccacctcggcctcccaaagtgctgggattacaggcgttagccaccgcacccggccttttttttttttttttttttttttttgcttttttttgagatggagtcttgctctgtcccccaaggtggagtgcagtggcatgatcctggctcactgcaacctctgtctcctgggttcatgcaattctcctacctcagcctccccagtagctgggactacaggagcccgccaccacgcccggctaatttttgtatttttagtagagacggggtttcgccatgttggccaggctggtctcgaactatggacctctggtgatcagccttcctcagcttcccaaagtgctgggattacaggcatatgccacagcacccggctctcaattttaaactcagaatatggccgggcgcggtggctcacgcctgtagtcccagcactctgggaggccgaggcgggtggatcacctgaggccaggagtttgagaccagcctggtcaatatggcgaaaccctgcctctacaaaaaaaaataacaaaaattagggcccggcacagtggctcacgcctttaattccagcactctgggaagccaaggtgggcggatcacgaggtcaagaatttgagaccagtctgaccaacatggagaaacccgtctctactaaaaatacaaaaattacccaggcgtggtggcgcatgtctgtagttctagctactcgggaggctgaggttggagaatcacttgaacccaggaaacggaggctgcagtgagccgagatcgtgccactgtactccagtctgggcaacagagcaagactccctcaaaaaacaaacaaacaaacaaacaaacacctcagaataatagggttccttccttatgggactgtaatgaggattgaacaagacagtctatgtaaagaaaatagacaaatgcctgggacgttacaagcatgtaatcactcaaagatgttagccattattgttattagcaagtcacctaaaagatctcagcggctcagaaatcaaaatttgccaaacaccctatttctagttcaatctacacaatcaagttcgtatccaaggtgtcttggccagacctggttaggtctccctccctgcctggggccccccaaccgacttacctgggctagctggtcctcagccaagaccgtccctcgctccttatacttggcctgtcagacaaagagaccagcataagttaagagagtgggcgctggaggccaggcgcggtggctcacgcctgtaatcccagaactttgggacgccgaggcgggcggatcacgaggtcaggagatcgagccatcctggctaacacagtgaaaccccgtctctactaaaaatacaaaaaaatagccggacgtggtggtgggcgcctgtagtcccagctactcaggaggctgaggcaggagaacggcgtgaaccctggaggtggaggttgcagtgagccgagatcgcgccactgcactccaacctgggcgacagagcaagactctgtctcaaaaaacaaaacaaaacaaaaaaacacagagtgggcgctgggttcccccatttgtgctgccacagctttgggatgaaaagaggaggatctctgtaaattgttttcttagggagaaggatagggtgaaggagtagaatcgacgactgtagatttgtgagtagaatcccatttgtagttaaacttgggtaaatgggagaaagggctgggcatctgggaacgctgccaatccaccggaagctggagaaattctgtgtcccggggccgagaagccagtctcagattctgttgggaggtgattaacgggtaggacactgctccgggacaattcagtctcgcacgggtcaggggcaggttgtgggtcggccttcttcctgctcacctctgcaagtttcttcttggcgatggcgccagctcccaccccgcggcggtgcatccccaccctgggcccgcgggccgcccggctgccgggaccccgggtctccacgtcccggactccgccgccggctccccaaggcggaagcccgagccgcgcgtcatctgcacgcgccggaagccacgagccgcatttcctgccgcgaggctgagtgtctccagttcctaccggcccggcgaccccgcctttagctagtggccaagattcgcaaagcctcgcggcgaggaaagcacgagtattcaagcgcggctgaggccctccttggctagtgctgggacatggagccccggcagccaaggccaaccttgtgcattccacccacgtaggcgcctggggccctggtcttcctcgactgcctctccactgcctggaggtcatcaaatgcccctggaccacctcctacgtgccacacgctgtgttggccatccaaggttccatattgagcataaaacagccctctgccctaaaggagttaacctgttggaatcacatacaaaggattctgactaccaagcgccttgaagttaagttgaactctgaagacagattgcctggctacaaagctcagttccactacatatggtccaggaacttaagacaaattattttaatgtctttatgtttcactatccgctgtagtgaaatagaataatacctactcatggcctgacgcggtggctcaagcctgtaatcccagcacttcgggaggctgaggcgggcggatcacctgaagttaggagttcgagaccagcctggtcaacaagacgaaaccccgtctctactacaaatacaaaaaaattagcagggcgtggtggtgcgcatctaatcccaggtactcgggaggctgaagcagaagaatcgcttgaacccaggaggcggaggttgcagttaaccaggatcgcgccattgcactccagcatgggcaacaagagcgagactccgtctcaaaaaaaaaaaaaaaaaaaaaaaagcagtaaattatatagtgcaatgcctggcacacaaataaatatcatttatgattgttattcattgtttgagataaaatcagtcatctgtagccgggcgcggtagctcacacctgtaatcccagtactttgggaggccgaggcgggtggatcacgaggtcaggagttcaagaccaacccggccaagatggtgaaactccgtctctactaaaaatacaaaaaattagccgggcgtggtggctggtgcctgtaatcctagctgctcgggaggctgtagcagagaattccttgaacctgggaggtagaggttgcagtgagcagagatcttgccaatgcactccaacctcggtgacagagtgactccatctcaaaaaaaaaaaaaaaggaaaaaaacgaaaaagacccaggttccttaagcgaaccaggaggtggtagttaggcttctccacatggaaaccccttagtttcactggccatggccaaaaacctgcagttgcttccatgtttgggcgctgcccaccaacggtcctgggttggaaaggaagacagagagagggagagattcccctttatggagtagaaaggaaaaggaaaaagggggaaaataaatcccaaactttgggcttacattttcctcctggctggctcgccaaaatatgttaacggtggagggtgttccaggttcttggggttttgcacaaacaactggacaaaacgcacaaacaaagcaaggaaggaattaagggatttattgaaaatgaaagtagcacgggcgcggtggctcacgcctgtaatcccagcactttgggaggctgacccaggtggatcacttgaggtcaggagttcgagaccagcctggccaacatggtaaaaccctctatctactaaaaaaaatgcaaaagtagacagatgtgttggctcacacctgtaatcccagctacttgagaggctgaggcaggagaatcacttcaacccgggaggccgaggttgcagtgagccaagaccacaccattacactccagcctgggcaacagaaggaaactccatctcaaaaaaaaaaaaaaaaaaagcaaagaaaagaaaactcagct

SEQ ID NO: 1244752 - DNA, 4001 bp, Homo sapiens
aacacaaaaaacaaaaaacctccagatgggccgggtgcggtggctcacgtctgtaatcccagcactttgggaggccgaggcgggcgaaatacgaggtcaagagattgagaccatcctggccaacatggtgaaaccccttctttactaaaaatacaaaaattagctgggcatggtggcgcgtgcctgtagtcccagctactcgggagactgaggcaggagaatcagttgaacccaggaggtggaggttgcagtgagccgagatcgcaccactgcactccatcctggcaacagagtgagactccgtctcaaaaaaaaaaaaagaaagtttcagttgtaactgtccttaaaaacactgggctggcccagtggctcacgcctgtaatccaacactttgggaagctgaggcgggcagaacacttgaggccaggagttcaagaacagcctggccaacaaggcaaaacttcgtctctactaaaaatacaaaaattagctgggcatggtggcacaggcctgtactcccagctactcgggagactgaggcatgagaattgctggaacccaggaggcggagtctgcaatgagccaagatcacaccactgcactccagcctgggcgacagagcaagaccctgtctcaaaaaacaaacaaataaacactggaacaaatacaaaaacctagacaccaagtagtaatttctagcaaccactcttctccattagattcctccccacagataccactcctcaaaagaaaaagctcagttctgcctctggagaagcagcaggaagttcctaactttagttctctgatctgggagatggatctgtacttcatccaaataaggctagagtcagtgaccatagctagttacataacttagtgttaactacattttctgggccctttcaaccacatctgaagtttcctttactttcttcacctgtaccagcaccagtagctctggtgagtacccgattgtttgctgtttacaaagtagattcatcgtaaagctttctaatatagtaacaatgcaaggctttagtctcaccatttattttctctcccatttaaacaacttcaagagacaggttaagaaacaaatcaggtgataaaagtagatggaactactgagactaccgtcccttcttactcaatcttgagcctttagtgccagatggcagaaagcaattcaaaaagctctcgctccaattataaatatcacaggtactaaacagaggaagctcccagttctgaccaagctctgtgtgatctcaaccaagcagttatgctccatctttttgtccatctctaatcgtacgcctttcacttggaaggtaagtaacaaaggcgaccacaatctaccgccaagtctcccgtgtccacgtaaaatactcgccattgcccccagtcttagccatttaagtaaatgtccccagagtcttttactacggccactctttctccattctcaacaaactaggaccgaaaggtccacatggtccttctttctttccgattaagcttggggggtaggaagtgaaagatacactttgaaggtaaactgaaaagccgggtttcctttcttggatcccgagcaagcccttgccttaatcccgggtggtaagagagtccctccctaggatgtaaagcgatgccaccatcccgagtgccactactgacgctcaagcccacgccccctcacaggagagcagcacccactccccaggccccgcccacgccctctcacctgagaacagcaccagctccccacagcgacaccgcccgcgccccaccatatagccagatcacggcttctccttccgggtgagtcgccggtgccccggtgcacgacgggagacgccccaatcccgggtgcccgggacgccccgcccctacaggcccgggctctgagtgggattcccgcttccgaatagcgcggctccgctggccaaggccccggactggagtcgggatcccccctccactcacttgggacgccggagagtgcacgcaggtgccgggtgagggacggcgaatggatatccaatccggggccgcgttccgcccactgtcaggggaagccaatcagcggccagggggcgtcagcgacgggcagccagtgggtcccgggagcagaggggtgtaagggggttgttactcttgttctcgctatgcgagggatagtctgcagtgtgggaggttcggggctttaggaagcccacatccctggatcctcactaagtcccgagagccaccatttgaacctcgtagtttgctgttccccagcggagctatcaaggggactccgattcagattcgtaaagccacggaccgattgtcagagtgaaagtcagactcgagagggtccggcgactcagattgctcacaccgaaacaaactcgaagcaatatcatgcagctagggagcaagagaaagccgttcaatgtgttggtggtcttttaacaacttatttaaagataatttcagcaagcctagcgcggtggctcacgcctgtaatcccaatactattagggaggccgaggcgggaggatcgcttgaggccaggcttgagacacgccctaccaacttagggagaccctcgcctctgcaaaatattttaaaaattagccgggcatggtgacacgcgcctgtagtcccagctactcgggaggctgagacaggaggatggcttgaacccaggggttcgaggctgcagtgagccctgatcactgcagagcaagaccctgtctgaaaaaaagagagagagctaaaaggaagaaaagagaggaaagaaaagaaaggggccgggcacagtgcctcacgcctgtacttccaccactttgggaggcggaggcgggtggattacctgaggtcaggagttcgagaccagcctggccaacatggtgaaaccccgtctccactaaaactacaaaaattagctgggcgtggtcatgggcacctgtaatcccagctattcaggagactgacacagggggattgcttgaacccaggaatcggaggttgcagtgagacaagatcgcgccattacactccagcctgggagactccattgtaaaaaataaataaataaaaaggaagatagctgggttctcctatgtgcttcccctttctctgttgtgctctgttgttttggtacattaagaaaattcagccttatatagctatgtagttgagaaaaggaagagtatttttagccttctcaaacaattctgaatactcttctttgatactacccaaattcaacaaatggtaacttttctttgcttttttgagacagggtcctgctctgttgcccaggctggagtgcagtggcaggatcacagctcactgcagcctcaacctccagggctcaagccatcctccctcctcagcccttggagctgctgggaccgcaggcgtgtgccaccatactcggttaatttttaaaatttttatacagataattttttaagtttttaaaattttatacaacatagagtctccctatgttgccgagactggaagtgtttatttatttatttttaagtacacaccaccttggagatggagtcatttcttaaaggttaagtgtgatagggagtcaagccatttagaaaatactggtacagagttatgcagatcagccaatgttgatgcatttattcaatgtaaaaaaaaatcacatttattaaattcatcactgatctcatcaggaaagtctcaagaaactgcctactgactagctgggattacaggcacgcgccaccatgcccagctaatttttgtatttttagtagagatggggtttcaccatattggtcaggctggtcttgaactcctgacctcatgatccacccgccttggcttcccaaagtgctgggattacaggcatgagccaccgtgcctagcctcacatgtcttaatattaagacagcctcaacctcctgggctcaagtgatcctgccacccaagcctcctaagtagctgggaccacaggtgtg

SEQ ID NO: 1244753 - DNA, 4001 bp, Homo sapiens
gggccgggtgcggtggctcacgtctgtaatcccagcactttgggaggccgaggcgggcgaaatacgaggtcaagagattgagaccatcctggccaacatggtgaaaccccttctttactaaaaatacaaaaattagctgggcatggtggcgcgtgcctgtagtcccagctactcgggagactgaggcaggagaatcagttgaacccaggaggtggaggttgcagtgagccgagatcgcaccactgcactccatcctggcaacagagtgagactccgtctcaaaaaaaaaaaaagaaagtttcagttgtaactgtccttaaaaacactgggctggcccagtggctcacgcctgtaatccaacactttgggaagctgaggcgggcagaacacttgaggccaggagttcaagaacagcctggccaacaaggcaaaacttcgtctctactaaaaatacaaaaattagctgggcatggtggcacaggcctgtactcccagctactcgggagactgaggcatgagaattgctggaacccaggaggcggagtctgcaatgagccaagatcacaccactgcactccagcctgggcgacagagcaagaccctgtctcaaaaaacaaacaaataaacactggaacaaatacaaaaacctagacaccaagtagtaatttctagcaaccactcttctccattagattcctccccacagataccactcctcaaaagaaaaagctcagttctgcctctggagaagcagcaggaagttcctaactttagttctctgatctgggagatggatctgtacttcatccaaataaggctagagtcagtgaccatagctagttacataacttagtgttaactacattttctgggccctttcaaccacatctgaagtttcctttactttcttcacctgtaccagcaccagtagctctggtgagtacccgattgtttgctgtttacaaagtagattcatcgtaaagctttctaatatagtaacaatgcaaggctttagtctcaccatttattttctctcccatttaaacaacttcaagagacaggttaagaaacaaatcaggtgataaaagtagatggaactactgagactaccgtcccttcttactcaatcttgagcctttagtgccagatggcagaaagcaattcaaaaagctctcgctccaattataaatatcacaggtactaaacagaggaagctcccagttctgaccaagctctgtgtgatctcaaccaagcagttatgctccatctttttgtccatctctaatcgtacgcctttcacttggaaggtaagtaacaaaggcgaccacaatctaccgccaagtctcccgtgtccacgtaaaatactcgccattgcccccagtcttagccatttaagtaaatgtccccagagtcttttactacggccactctttctccattctcaacaaactaggaccgaaaggtccacatggtccttctttctttccgattaagcttggggggtaggaagtgaaagatacactttgaaggtaaactgaaaagccgggtttcctttcttggatcccgagcaagcccttgccttaatcccgggtggtaagagagtccctccctaggatgtaaagcgatgccaccatcccgagtgccactactgacgctcaagcccacgccccctcacaggagagcagcacccactccccaggccccgcccacgccctctcacctgagaacagcaccagctccccacagcgacaccgcccgcgccccaccatatagccagatcacggcttctccttccgggtgagtcgccggtgccccggtgcacgacgggagacgccccaatcccgggtgcccgggacgccccgcccctacaggcccgggctctgagtgggattcccgcttccgaatagcgcggctccgctggccaaggccccggactggagtcgggatcccccctccactcacttgggacgccggagagtgcacgcaggtgccgggtgagggacggcgaatggatatccaatccggggccgcgttccgcccactgtcaggggaagccaatcagcggccagggggcgtcagcgacgggcagccagtgggtcccgggagcagaggggtgtaagggggttgttactcttgttctcgctatgcgagggatagtctgcagtgtgggaggttcggggctttaggaagcccacatccctggatcctcactaagtcccgagagccaccatttgaacctcgtagtttgctgttccccagcggagctatcaaggggactccgattcagattcgtaaagccacggaccgattgtcagagtgaaagtcagactcgagagggtccggcgactcagattgctcacaccgaaacaaactcgaagcaatatcatgcagctagggagcaagagaaagccgttcaatgtgttggtggtcttttaacaacttatttaaagataatttcagcaagcctagcgcggtggctcacgcctgtaatcccaatactattagggaggccgaggcgggaggatcgcttgaggccaggcttgagacacgccctaccaacttagggagaccctcgcctctgcaaaatattttaaaaattagccgggcatggtgacacgcgcctgtagtcccagctactcgggaggctgagacaggaggatggcttgaacccaggggttcgaggctgcagtgagccctgatcactgcagagcaagaccctgtctgaaaaaaagagagagagctaaaaggaagaaaagagaggaaagaaaagaaaggggccgggcacagtgcctcacgcctgtacttccaccactttgggaggcggaggcgggtggattacctgaggtcaggagttcgagaccagcctggccaacatggtgaaaccccgtctccactaaaactacaaaaattagctgggcgtggtcatgggcacctgtaatcccagctattcaggagactgacacagggggattgcttgaacccaggaatcggaggttgcagtgagacaagatcgcgccattacactccagcctgggagactccattgtaaaaaataaataaataaaaaggaagatagctgggttctcctatgtgcttcccctttctctgttgtgctctgttgttttggtacattaagaaaattcagccttatatagctatgtagttgagaaaaggaagagtatttttagccttctcaaacaattctgaatactcttctttgatactacccaaattcaacaaatggtaacttttctttgcttttttgagacagggtcctgctctgttgcccaggctggagtgcagtggcaggatcacagctcactgcagcctcaacctccagggctcaagccatcctccctcctcagcccttggagctgctgggaccgcaggcgtgtgccaccatactcggttaatttttaaaatttttatacagataattttttaagtttttaaaattttatacaacatagagtctccctatgttgccgagactggaagtgtttatttatttatttttaagtacacaccaccttggagatggagtcatttcttaaaggttaagtgtgatagggagtcaagccatttagaaaatactggtacagagttatgcagatcagccaatgttgatgcatttattcaatgtaaaaaaaaatcacatttattaaattcatcactgatctcatcaggaaagtctcaagaaactgcctactgactagctgggattacaggcacgcgccaccatgcccagctaatttttgtatttttagtagagatggggtttcaccatattggtcaggctggtcttgaactcctgacctcatgatccacccgccttggcttcccaaagtgctgggattacaggcatgagccaccgtgcctagcctcacatgtcttaatattaagacagcctcaacctcctgggctcaagtgatcctgccacccaagcctcctaagtagctgggaccacaggtgtgtgccaccatgcccgactaattttttat

SEQ ID NO: 1244754 - DNA, 4001 bp, Homo sapiens
ttagttcagcattcccgaagtgtcccctgtttggaggcagaggggaagctgaggaattgaaggagaatccacttgtggttgctatcgtcccaccaggacagctggctcctccggagaagctggagactcaggtggtactcccccttccctccaacacattccaggtccgcctgccacattctgcagggagagggcagagggaggggcctgtccgccctctttccccccagagctacaggactctctcctggttggcttcttgtgcttgtgccatgtgccacggaggagaggggcctgcgtcccctctcccgacccatgccctttgcgccctttaccccttaaagcggggcatcgtactggtccaggaactcccgaatgggccccggcagctgggtgactttctcataggagtccaggtggccgttgacggtcttccgacagagatgctgaagagtggccacgttggaggagaggggccggctcaacaccagggggatcttctcgcccccggagtagatgtaataggctcttctggggggactcccagggagtggctgggcagacggctgctcgggcacctcggaggagggttcagtaggtggcgaggggaaggagggggctccagggggcggcatgtagtggtgcaccagcttgagcacgcagtcgaagcggggcacgggctgcgtgctccggggatcgctctgcagagagaagctgcccccctcacactggatgcgcaggttcttggtcccagactgggtcttgacgctgagcgtgaagaagtggcgctggtccgagctgtcgcggatcagaaaggtgccggcgggctcggcactgagcagcaggttcgcctcgccgccggtcactgcgctccagtagaagccgctctcctgcagcttgcgcactgcgttcaccaccagctggtactcgctcttggagctgaaggtcttgaggcgcaggctggtgtccagggggcggctcatcccggcggcgggaaacttgctgtgggtgaccatggcgcacggagccagcgtggatctgcgcggcggcggctgcagctgcttcgcggcctccgcacagcggccgctaccgcatcccggggggctgcggagaggaaggcgcgagcgcgttgagtgcccggaaccctccagcgcgcccggcccgccccggctcccctgccttcgccgagcgactggggcacccactgccccgggggccctctcctgggcccgcgctccgatccaggcgcctcacggagcccgcacggctcccgcccctgccggcagggtggccccgggcagccccttcccaggcgcgcactgcaagggcgcagcgtgggaaactcgcgcgcggaagttaggtctccaggagtgtggccgggtggggagcaggagaagggcccccgggactgcctgggcgccgctcagtccagtagccccgggcggtgtggacggagggagaaacccgaggcacgggggtagggaggggacaggagaagcccgaaggccccagccggagtattccgggaacctgggatctccggcttccatccgctctgcccctacctcgtcacctccctgccgggaatgacccgggaaggggaggggaaaccgggaaaagctcccgggactgagcgagacccctccccacgccgcgctcctccttcctacctggtcccgaatcgaagtctccgtccttggggctgagccccctcgggtccccaaggcgacgcggcggcgagacggccagcggtggcccgcgctgcgcccagatgttggcggccgtgaagtccacaaaggagccttcgcgcgcgcgtccctcgagcttcccctgggcgcccgccctgccccctgcgcacccccggaccaaccgggaggggaccaggagagggaccgcggcaaggggccgcggcgggagctgggccgggcgggcggctggcggctggctgcgtgcggggccgaagcggcagcagcggagcagggagtccaagtcggagccgccgcggaggccgcgctcgcgggtatataggcggccgccgcgccccgccccccgattcctggaactgcgcggccggccttcttgtaatgtttagtcactactcgcagcagagaaaggctgagcgcggagggtgagggaggggccgcgggcgccgagggcgggccgcgagcaggggcagggaccgggagggacgcgcgcggagacaaagcgcgacgagaggcggccgaggcggccggtgggcgcggcgccagccccggcggcgcgttcctggcagcggcccctccccgccgcgcgctccgcccccaacttctcattcacactttccccccacccccctcccttctaagaaggctgatttctggcagaggcgggggcgccgcttcgggagagcgggcagttctaggaggccgacctggagagcctcccggttccccttccccttttcccggaccccgcggggacaccccctcgccgccacccgggcctccccgagggcccaactgcgggtcaggcggcccgggccagccgaaagggaagtggggctaccccacagccaggcagcggggctggggtcagacccgggagccggaggttggagacgtgcgacagtcacctgcgggcagattccagaggggagacccagggctgcaggggacgccccttcgtggcagctacccagcctcggcccactgccaggttctttgccaaccctgacgcgagtgtggagcccccctcccctcccctatgaaaacgctttcatgcactggggtctgcaaacctggttggtccggtgtgggttgggccaggtgctctcggccgggctggagagctcgaggtggaacgatggccccaacctacggcccgcgtccgccagagggcgccctggggtctcctaggggagggcagtttggtgctgcgcggcccaggccttggaataggcacgccagggatctgcgggaatggctgtctccggagctggaaaggtggccgagaagggggcattcacaccccaggctggggtcagacctgggaataaaattctagcaggagagaatttccggaaagcagttttccggggttcaggctactgccagatggcccacaccccctggaatgtgaccccctgcctctcttggggtgggggaggacttgatcactggcggggagggggtagaggggaggagaggaagtgattgaggtgaaagattggtttgctgctggtcacgttggcactgacgtagatagtttgggcttggagacccggggccagccttatgaaggatggcaagttttgtcatcttgtccccaaatgggctgtgtggtgctggggacacccgagagctgcctcagtggcatttagattttcacctctcgggatgcagacgctgtgggcctggggccctgcgctcttcctagataccaggataatgaggtgctgaaagggaaggaagagactgccgccagggacagggagcttgggatgccagaacccagaactggcccttttgccggccctggaattgataggtgcgcactgcctttgccactgtatcctcagtccgtgccatcacctctccccagcatgtgctggggactcagtgagatttggacaagacacacagtttctctgggcttccgttttgccacctgtaaaactggagccagaaccttttccttccctttggcaggcggaggcgagaggatcacttgagcatggacattcaagaccagcctgggcagcaaagtgagcacccccatctctgcaaaaaatagaaaaaagttagccaggagtggtggcctgtgcctgtagtcccagctgcttgggaggccaaggtggaaggatcgcttgagtcagggaggtcaaggctgcggtgagccatgatcgtgccactgcactttagtctgggcaacagagtgagaccctgttaaaaaaaataataataaaatgaaataaaaagggccgggcatggtggctcatgcctgtaatcccagcactttgggag

SEQ ID NO: 1244755 - DNA, 4001 bp, Homo sapiens
tgtaaaccaacgctacagatgtaacactggatgccgaagatcagtccacccctcagaaatgcaggaaaaaaactcaacgtctatgtttggaattttcatcaatcggcctagaactcatgtacctgtctctaccttgtctatatcttactggtacttagaattctcaaaaggctttgagagagcgcaaagctattttctcgagacaggctctcactctgtcacgcaagctggagtgcagtggcacgatcactattcactgcaacctccgcctcctgggctcaagtgatcctcctgcctcagcctcccgagtagctgggaccactcccgcctaattttttgtatttttttcgtagagatgggggctaattttttgtttgtttgttttgtagagatggggtttcgcatgttgcccaggctggtctcaaactcctgagctcaggtgatccgccctcctcggcctcccaaagtgctgggattacaggtgtgagccactgtgcccggtctgctattttctattctcagagacagtggtcagcacccaagtttgatatgccaagttcatctaagggaacaaccaggaaaacagtaaaactttgaatagaggtgtccaattgattgctggcctacaattgcatttgaagattctcctgtcatttgcatgcatgagtgtgaagggaggtgcggtgctggtacacagaataagcaaggcggtcaaggtgcaacaccagctttttgccccaaaggccaaacacttccagcaatctcccttccagggacaatggcacacagccgccttggaaaaacttaaaaagccatgccaggatggggatgggaggatggtctgaaaccatcttccaacaagacagatgcaaaccagctgagaagtgtcacggagtgtgcactctttaagagtgaaagctgtttccacaattagcgctgaccttatgcgagatgttaccacctttggtcccaagtctctgcctcctcctgaagaccctatcttaagaactgtcaggatcgcgatagcaatagataaaaagggaaaccaaacaagaaaaggaagtttgtcggccagcccccggccggtctcacctccccgcgtccagctcccggcccgcagagcctcccatgtctgtcaggctcgcagctgaagcagccagctctccagaaggcctcttgccggtcccatccccaccgccggagccaccgttgcagctcttggtgcgaaagaggcgactgaggcggattttgaaggagcccttccgagaaggacccgcgagtggccggaggggcccgggaggaggcgggggcgggggaggttgctgctgctgctgctgctgctgctcccctctactcaggcgccccagagggaccaagtcctgcagcgggaagggcaccggaggtaattcagggcctgggggctgcagcagaagccggccgccccctcctcctccgcgacccgggctgctgagctcctcttccgagcagctgttagtctccaggctctcggcctccgattccaagccctccaggaccagcagcgcgtcgctcgtttccgtggggtcctccccggcctgcggggcggcagcaggcggctggggctgcggagggggcggctgaggaggacacggacacgggcagcaacccccaccgactgtcttgacccccggccccgccggctgcccgagccccagagccgccaactgcgcctctagtccagccgccgggccccaggtccgctcgagcgccaagcccggcggcagggccttggggtccagggcacagcggtgccggggacacagcagttccgagggtcccggctccggggccgcctccacgtcctcctcctccggcggccgacccacgttgcggaacaccatcagctgcggcggccgggagccccgcgggccgggccgcgcgaggaagggtggcggcggggggccatggcccgggggcggtggcggagggcctggctcgggggccgcctctccatagccaaggaggcggctcaggacgcggtacgaagcggccgccgccgccgcctcgccatcccggagctcggcctcctgcatcggggagagggagggagggcgggcggctgggagccgggctggggtggggactaggccgggccccgccggagccccgcccgccgcggcccccggagcgacagcgctaacggccgccgcggcctctgcctcatagaggggggcggggggcgcgcggagcccagcgcgagcccaggccgcgctccgccaccgccgagcaccgcccccaagccgacgtcacttccggaagggcttagccacgccactttccccagggcgtgctcgcgctggcctccacggcgagtgacgccgcgcgcgcccccggcccctattggcggtgagctgtctgttggctggcgttggtctcttttcccggtccttgcttttcacttcctgggcgcccaggcccaggccatcccattcggtagagtggagaggccttggaaaccatggtctggtcctgggagcgcgccgctggccttgggagcacatatggttctgccatctacgccgcttgcgatgtgtgaccttggctgagtcatttcatcattaatctgtatctccgtccgcctggcacccagtgaatgtttgtggaatcagtacatgaatcgtgttctagacccagtgctgtactgataaatgtgtaacaaccagctctctggggggagaacgggaatgtatgcacatatataggtacaaaaatttgtcgttaagttttactgacataaaggatgtgtagttcacaatttacaattaatagtaaattggcaaattccatataactctttctcacagaatgctttcattgatttttgccaaactcttatatgggtagccaaactgtgattgcagttgacctaggagtgtaattgtaaaggtgaatgttggttgataaaactgaaaaagacaaaacttaattggattgtcaatgatgggagcaacttctttgctgagtcagaaaacggtttcaaatactggaagaatatttactcaatttttgtgctattcataatgtaacggctacagacaacacattaagtttttgctgttgttgagatggaatctttctctattgcccaggctggagtgcaatggcgctatcttggctcactgcaacctctgcctcccgggttcaagcaattctcctgcctcgctccaggtaattttttgtattcttagtagagacagggtttcaccatgttggccaggccagttttgaactcctgacctcaggtgatccacccgccttggcctcccaaaatgctgggattacaggcgtgagccaccgcgcccacgcccggccttcttatctttacacagggataaggattgcaattttgcttgcttgcaggcatgttgtgaggatcaaataagatcaagctttttgtgtggaggaggtgagactggaggcagggagcccattgaaatagtcccagtgggagatattgagagatgcaagggaaaaggaggaaggatcagctgcagaactcagtgacttctaatacctgagggtgcattgaggggaagagggtggagggttgagtcctgcaaccagagggaccttttcagaatggaaatgtgttcatagcctgtgattaaaattgttcatggcttcccattgttcttaggctaatgtgtgatcttgtgatctgacccctgtgtgatctaacccctgcctctctagccacatcccctgctaagctccaccttgttctctgttccctgcattcccatcaaccttgcggcaggctcccatacatgtgggcaagaaaagctattcccttttcttgcaagacttttctctttttgcttagtaaactcctactcatccttcagattgaactcactcctcactaccttagggaaatctccctgcctgggcccttcctcctccccaggctctgagatcattcctttgttgcacttacttgcgcaggtgtaatttgcaatctg

SEQ ID NO: 1244756 - DNA, 4001 bp, Homo sapiens
agattgggctccgaggcctggcctgatcccctgcacacaccttgaccatgtctcctatggtggacttagatgggtgggagctttttaaatagctggtcgtcgtgtgagtaccagtccacccccaaaggtttcatggggatagttccaatgtgacaagaaagaatgaaaaatagtcttaagaccaaaccagagaggggacagagaaggccaccccccacccccactctgaagagcaagcacagcaggggagatgtggccactgccatcgtctggggctgctttctggtctgtgggctggtttgcatcctcacctctgcagggctggaatgtgtgtgtggtcaggggggcatttgcccagggaagggggcattttgcggcttttcgagaatagcgcccctaggccaggcacttcctctgcagatcatgactttgttttgagcatgtggcttcctcaggggctgtggcctctcgtgggagtccagcaaggtggacattttgtgtttgggttccttacagcccttcaggcagtcgctggagcccagctgaccttgcctagaaggggagctgtggggggaggcgcccttgtcctccattttgaagacggagggtcctggctggcctcccatgcagttgccctttttagcaccccatagtcccaacaggttgtgaggcggggagggctggggtccaggagcctgggcagtggacttctctgccacctggataatggccagaggacagggaagctcttagtctgaagtgtcatttcagacgcccccatggcctcaggattcctgccaattatagagccagatgcacactgtcacctgggcttctctgtgcaggcctgaccaggaacccagggttcctcttccttctccctcccctggaatgaggcaaggttgggactggggtggctgctgaggacagatgtccctactcctgcacagaggatgctgctctcccctccagggcctggactcagctgcacccatgtcaggggctaaaactgtgccgaaaactcccattccttcaagtgccagctccctgggcaggccgtgggcaatgcacactgcaggggtgcctctctggccttcctccccactgctttgtggagatctgtcccccacacccccccacacaccagggctatcttgcagttggatcaaaccaggttcacacctcagctcttctcactaccaagttactgagtgcctggaacctgtttcttccccttcgagctgggggttcacctcctggggattccatgatgtgggtctgtgtggtggggacagccaccaccagcatagagtgtccggtgccccacaggtgctgttctgtggatgggaggctcccttaccttgttcccttcccagtggtaccagcagctggacgtggctcctatattcccaggaggagattctttgaaaccttttcttttctgagcccctgagcctgttctgatgccctgatgccataccctcaccaccccagcgtcctccctgccctgggctctcaccagcgtctgttgcctcatgcctctgcacctgaatttgaaggctgcaccagcgagccattcttcccccacctccaggcaagactgttcctcgaccagtgctggcagaggccagcaatcttcactgggtctaccccagtcttccaagcctcccaaagagaagtttctaaaacctccccaggatcttttactaagaattctctcctccaccccatacctttggtctcaaaggggtggtggggaggccgccctccgttctccgcccggttcatggtcttgttgttctccagctccggtggaggctcggggtactctccgagctcggggatgatttccgtggcatcattcttgaacgcctgccacccctggccctccactacacggaaggctgtgtgtaccagcaggcagacgagacacagggccagtgggagctgcatggtaccagccagaggagggcacgccaccttccagtagcacaggctctggtctccagccgagacacggtcgcctttttaaagcccctctctgcttcatgccagccaatgaggacaggctggggcagggctggtcccatgtttccctcagccccggagggagggaaaggggtgtgctcagagcaaaccctccccaaagacttctcctctagctcagcaaacttccaaattgctgctggcactcccaggtgacccagagagagggggcgtgtgaggcaaggcccaagcctgctctccggcacctcccacgtgctggcggctgtggttttcagatatcaaaatgagctccggcttttaattgtctgtctccctgggccctcgggcattctcaaaacaaactgtggacccgctcaacaaagaaaatgtgcagttctgagtgcttcgcggggctgagcccggcctattccatttctcaggccaagttcatttgtcaccccaccaacaaatggcccaaggcgtttctgtttgacccccatagacccagccagaggcaaaaagatgcttttaaagaaatcccattggtcccaactccacaagtctcagcattcattgtcctaaccaagaaagcctctcttggtattctctggaaggcaagagagagaactagagggtcagagcaagggtgcccgcttgggagagagggcaggattctggttacaaatcgaggatgcgctggtcactcaggctcctgtggtggacagcacagaggaaatcccagctcatgctcctcagggatcctgtgcactgtgacaggcacttctgagccagggcactcactgtggctcgcagggtgatgtgctgaagacagtcatttccccaaccagtctgtgtgtgtgagaagacaacaccaaattcctttccttagcaaaagccacagccagcgtttttagtgctgacattttattttcttgtcttccagctggttacatttttcaaaaacagttttgagtcctgtatggaaagcttcattggtgcacaccacaggatgtgttccatgaagccatcccaggaccaagtggtcacaaagaagctaagagaaaatgctgccttggccctgcatataatgagccacacagggccggggcggggggcgggggggcaggtagaggcgtgggggagaaggattcacacctgaggtgcaagaagagaaaggaaggccagaggaatctttcattgaagacagattgtttgaggacaagcagctcctgtgaagaggctgcccagatcctctggtattttaactgggcaatgaatcagcatgccccacctgcagagcctctgcaagtcctttgccacctgcctcaacttgcaagtcgctgtgtccatctgcagccgactgtcctcctttccatcatccatcatccgacacatgaatgcagctgctctgacagttttacaagccagacagaagccccctcaggaagggccctctctgatacctgcttcctaagtcagtttccttcagggcagatgaaaacagctgtggccattgttgggggtgatctatctctcccagcagagccggtagtgttgtgagaagctggccctccgcgccacctccccttgtctatgaccctccagcctccttttcccttgctctggaatgtggactgttaaccctctcatgaccagacgactgccttcttgcaatggacttgggagagagcagttctgatgcctgggttccttgagcaggtaggatggatgcttatagccccacctgctgttgggagcggctggaccgtctgcattaaacagaggcagtgggattcatccctggaacgcgtctgccacctgctggagacaaaaggaggggtgactgcaggatggcaagtctcaggactggacgtgatttcctttcctttcctttccttatttggaagtgaagtaatattaaaaggaaaaagaagaatccagtggacttgaacctctaaatgatccacacccctctgaatggctcagcgagaacctgctgtgacatcttctgctgt

SEQ ID NO: 1244757 - DNA, 4001 bp, Homo sapiens
gactcagttgaataatacaaaactgtttaatactaccaaaaatataattgtatgttgtgcggctctccctggctatcatgggaggactgcaggctgcctctgaactgtagtccaacaggagaaagggttgacagcctggggtaggggatgctgctggattaaaaaaggaggatgaggcccgtcccgtgaggtctgcgtccatgagggttagaggtgggttaggggcatgggggcaccagcaaggggagggttgtatggagtgggagagccagggggcaggtagtgggtataggtgggcagcagttccccctggagcctagggtcactctgagggagggagcacggtgagggggcttccagtttgcagtgggaagagctgcagagagaaacaagaggttagagggcacttccctgggttggaggtgagtctggccagttctgggcagacagggtagagcgtgccacccacccagccctggctacccagcccgctgggcgcagcaggcatggaagccgaccccgggatggagagcccgcggccctgttggggcacgctcgggagcgggcttgcgtgctgcacggctgttttcctcttggggagtcaggccaggaaagggcagaatgagctcggcctctccttgccctgggggctgggagaggaagctgggtcacacacaggccagaagcaggggggaaacggggcatctaactaggacacagtcgcatccaggggtcagtcacctgaccctacagggcccaccaccttcagactgagatggaaacgccctctgggagaaccctgatccgccccaccctacacaggccccggaggtactgggcctgcgcccgccacaccttggccgcgagtggcctctgcttgggtgggctcccgtcctccggcatccgcccccaccaaggctccagaagaggggcgcatgggcctccgtcttcggcccgcttcccaggcactcacccatagctgccaggcaggtaggctgtcgagtagctggggggtctgtacccaaagcctctgctcggttgggtggtcgcgtaccccggcccccagagcgggccgccgctggccaggttgcctcttccctgtccgcagcgggaaggtccggcgcccgagctcttggccttgcgccgaggccggtacttgtagtcggggtagtcgcgcaggtgtcgggcgcggagccgcttggcctcctccacgaagggccgcttctcgtcctcgtccagcagcttccactgcgcgcccaggcgcttggagatctcggagttgtgcatcttggggttctgctgcgccatctggcggcgctgagcggagctccacaccatgaacgcgttcatcggccgcttcaccttctccaggggcagcgtcccgggggccgcggggctcccagcgccctcccgctcctggggtcccgaagatgaggaggcagcagccgtggcagccggaggctccaggctccaggcctggtcctgtgaggagcctggtagcgccatgggttgggagaagccttaagagggcgtcctgaatgccctcccctcaacgtgaagcgtcgatcctgaaaatggaaaggtcttcccagtctggagtcgttgccgaggaacttgggtccttaaaaagtgtattttatccccaagcccagagcttaaaccggagcctttgcttccaacctgttcggcacactttggggagagtcgaatgcaaaatccgctgtctggtgccccggcactgaagaggtgttctgaggcctactgactgggggacccccggtccctctccccgacccgcagctgcgatcagaccgaccttccgtggagggggtaaaccataaacccctttgtggtctccggagttccgacagctgccaggcgcggataggccagacctctcccacctgggctcagcgtttgtggcaggcgggccagacctgggaacagcttttaaagactgactccgcccctgtccctcccataagactgcacctccttaagggcgccaacatcctcagcccgtaggtaaacccaggtgtcctgtttgtcccagcccccaacaccctcagggtgccacgccccccgccccccccacccaagacctgatgtcaggccttccagcccgttgctgattgcctcccctccctgaagcacaggcaatttaaagccaattctttccacaatgggatcaaacacagggggatgaagtgccctcagggcccgagttgtgctgagaggagcttgggagcatcccggaccaccaccccaacccctttcctggtgcctgttgctcctcaaatcccagaactgcccctggggcaagaaaggccgaggagggagaccatttttgtttcctgagtcattccagcaggtgcttgggccgtgattcaacccctttcccaagtgagaaaacttaagccctcccaactccagtccctaaacctatatttctccactgctattgaattatggcaagttttagcttcagtcgtccaagtcatgaggggggagccaggaaacccaggacaactccccaagttaagaggtctgtgatgcgcatgccggagaaaaagcctggagccagaacagaacaccaccaagaaggccggaccccgggctccagaggctgctgtgagggaaccctgctccccactctgcccaacggcccagcccaagccccaggcctcaggtaatcggattaagcagcctgccttggctctcagcttctacaggaacagctccagctctgagcagccctgcctagcctgtgctgtgactcagggtataggagtggcccaactccctctaccagcaaacttgggggaggggagaagcaacaaggcacaagcccccctcctctgaaccaggagggagaacctgggcctggggagtttaggaatgtcaggaattcccagaagtaagaccatctttgggacaagagacaatgaagagaagtcagatgtggaggaacagaaaacaagagccaggggccagggcaggtcagtcctagagaaacaaatggaccaaactggggacaaagaaggcacaggagccagacagccatttggatttttttattctctttttaaatactgtacagtgaaaaataaatacgccttctcatccaccagacaaggttggtcccctccccagggggaccttgtcaccccccttcatacacacccctggttctactccaaaaccttccccgtgcctcccacccacttatctcttactatccccgtcttccacagtgatgaggccccagaaatggggggtacaggatgggaggagggatagcaggggaggccccctgaacggtcaaatctgggtgggtcgaggagcaccccccaccaacaggtggagaatgggggtgttcagagagagattggggcattagaggataaaggcacatccagtctgatggggaaggagagaggctccccttaccctgggggtagggtggacaagagggagggggtatgaccctgttacacacccctccactagctcctggaggttggggggtacccaagctgctgtgccacccccctcccccctagataagagcagctccagcgcaggtcagttgggcctgtgagggccatggtgttgggcagcaagcgagatggagaagggaggggtgcaggttggaggttttatgaaaccccattcaccatactacccaactccaagggggcggagagctccccattctccgaggggcccttaggaagcttgctgacagagtcaccctgaggggaaagtgggaaagaaaacagaaaagcaagaagcggtgagtagaaattcaggtgggagacattccctaccatccaagccctcctggcatttggtgatccagaggttggttccctgatctcatgatccagtctctcttacttgggatccagaaaatgtgaaccacactttcttctctatcctattcaaagtttacactggtctaaactccatcagacacagctgcctctgcaattcagtag

SEQ ID NO: 1244758 - DNA, 4001 bp, Homo sapiens
caggcgggacggagatagcttgtccggtggggtcgaggggcgactcacccgagtgctcgccgggggagtgcacctcgctcatgccggaggaggagtgtggcgagtcggcctgcagcgccttgaagatggcgttgggggagatgtgcgtctgctccgtggcctcctctgcctccgcctgcccgttcttcaccgacttcctccgccgcggctggtacttgtaatccgggtggtccttcttgtgctgcacgcgcagccgctccgcctcctccacgaagggccgcttctcgctctcgttcagaagtctgctcggggcggggcggggggcacagagaaaaagagggagaggggtcagtgaaatccgccaaactgtcaggtcggcggggaggaggcggcgacccagaccactcggcttcctctgcacacaactccatcttccctcctgcctgcaaccacagctcataacttttcttaaaaataaataaataaataagttattgcagtctgacctgagcggtcactccccgccccctccctcccctccccttctatttctattttggaaacgctggagatgaaaacgactcccggtgctgccccctaaacgcctttgctgctcgacttaccgcccccaaccccaaccccctttgaaaactttcccccaaattacttaagctgcaagaaggtccccaattctcaccccccaccatacactcccacctatttccagtagcctccctcctcccgcctcccagttcctgccaagggtctcctccaacctcggtttctcccttgccccatctccgtggacagtggggctgcacgagagagtgcagttttaagaggccgggtaggagggaggcaagtttcacttccccgccccgattgagcttccaggcgactggagagcaggctggcagccccctccttccgtctcccaccagtcttcgtccatcctccagctacctccctcacctcttccacttaccacccccctcctccgcgtccccgcgagcagcccaagaactttgtcaaactctgagccacagttacaccccattcccactcccaaccccatcccgccggctcccggaacggcaactcccgggcgatgggaggcggggcggggcaaatcagccctgaccagcgcccccagccgccgcgatgcccaccctgccgcgccgcccccgccgggtcctacctccagagcttgcccagcgtcttgctgagctcggcgttgtgcaagtgcgggtactggtccgcgagcttcctgcgcgccgcctgcgcccacaccatgaaggcgttcatgggccgcttgacgtgcggcttgttcttgctggagccgttgacgcgcaccggcatgggcaccagcgtccagtcgtagcctttgagcacctggctgaccgcctcgcggatgcacacggggaacttgtcctcctcgctctccttcttcagatcgggctcgcccttggggaacgtgttctcctggggccgcgtgttctcggtgtccgagccggagcccgacgggcagggcgagcccgcggagtcctcggacatggtggggctgggggcgccggacaggcccttctcctgctcgtcggtcatcttcatgaaggggtccaggagattcatacgcgggcccggggcagggggctggtggccgggaaaggcgagaagccgcggcggctcggggactcgaggcgcgggctcctctcccctcggctgcccggatgcggagcaagcggctcccggggaagctggcgcgtcggccggctaccgcggcgagcacttaggaaggcgcggggtggccagttcacagctgcccgctccaagtggggggaggcgaattggagaggaggaggaggggaggaaaaagagcaaaagtgggggcgcttgcaccccttctcttctcctcctgcaaagaaaagtttccggggttgaaactggcgagtctccgcgccactgaagtttccagtcagtttcgagctccgctttcggctctccaactcccagcccagggtctctttaataaatactccgcctcaccttagagccacccgccaatcacagcacagcagtcccagggttggcaggcagctgattggacccgattttggggagggaggaggattgtggcactgggctgggtgacgaggcgggaggggaggagaggggaggggatcgcagccaaagggcggacggtagggtgggggggcggggggtgctgcggggaaggcgggggacccgggacttccaagtgtgtaagtttgtcgtactctcggaatgccagaattttagtgccttctccgcgcgaatcttgtgtgtgtgtgtgtgtgtgtgcgcgcaagtgtgtgtgtctagactaggatctacccccacctccgacatttcttttcactgctctctccgcggcaccggggacttagctggagtttgcagtattcgaaaagcagccgcttcttaatgcgtagccgagtttacgcgcctggagcgagcctgcctgcctgcaaaagtgcttagaaatagtcttttgaagcaaatgttttggtgactcaacgcccgctgttcctccgtaataatccatataaatagattaacatgctcgggttcgccggggctggtgcggctggtcaggattctgctgcgcttttgcaaagggagtcaatggaaagcaaagctaagtccccgcgaaggttggcagcggcggccgtggccacgcaggagcccggcgctctcgaggccgccccgcgccacatcgaccttgagctctgacaagtcattctccagccccctctacccgcgaccctgccgacgctcctcagtaacagggctactgctctgacgttttggtctttgcctcctggccgggtcaaaaacgtcagccgagtcgccctgtctgggggagagtttgctaactgctctggctttgagagatagaagtttgccaatgcggctgtcccgggccgcgaggcccaggccggtcacttggtttgtaaaagaccaaacaaatgggcaccaccgcagacaaaacgctccactctggcggagtcatgctgcttgcctgcttttgctggcatttacgaaacacctgaaggggtgaagcgccggtgcttctgactctagtccggtcggttcagacctgcatgtagttgggagttctgggggaggcattggtggtgtctctcatgtatttcaagtgtgatttgagcacaacctttgtgtttacacgaaatgcttagagccaggttgggtaagtgcggagctatctgctctgggatagaagaaaagtcttggtcgcttgcgggttctgtgctttcagaatcccaaataaacgcacagcattgggaaactcttaattttaaactccccccccccccccacccttttgggctcttgcaaaaattcgcctcaattaaattattgttgtggtgaatcggcccacatcataataaaaactagtttttttttccctttctaatttgcgaagtgaggacactatcacaagatccaaatcaatgtccttccgggagaatttcttaaaatcttgttttctctcgttgtcttcggaagaagcccgacatttcttataggaaatggaactcttcataaggtagtaagttacagccttgttcaacagcattttttttttaacgaatgtaacttcttcaaatgggatgtttctggtgccctatagctcgtttacaaatttaagagatttgcatacaatagcttcgtatccagggctctgtgattactttcagaaagtgtaagaacagcatcgtcctttcctaggagaaaaaagtccgcgtagtgtggacctatttctgtgtcccgggtagaagggcattgtgtgtacagtataactgtgtaattctcagacacctgattcaggagactcggagaccatcgggcagacattttagccaggtcgtctgtacttagttgtatgatattgtaattaccatgtttgctggaataaagtcagtgaagagggctatgacttt

SEQ ID NO: 1244759 - DNA, 4001 bp, Homo sapiens
tctttctcccggagccagttctccccgttgggcagtcaggtgaggatccgattattaacaaactctacttgggtctccttggcaaagagtttctggcttcagcagcctagctcaggggggttcataattatgtcagactcgctttttttcttgtagttgcttttaaccaaagaggttaagcctctgtacaaccaagaggaagaactagaattagaaaacttaccaatcgtcccagccaatgataatccatttccaacaggtattaacgcctgttagaagccactggaacactgacatcatcagcccaattgataggttgtctgatagattcgcccccttcatcgcacacaagaatttaaaacaaaacaagacactgcagttatattcattattgcagacaatgggtttctttgtgttagtaattgaaattactgctgtggtctggactccaccattatttcctttgcagcctgtgagccagccaacactctaaactttctagccctaaaaattgtatcatccagaataccaactcaatacagccctccactgtgaaactgaatgccttctggggtacagcatgaaaccgttttagacagtgcatgccagtgcaccttgaaacagtgtccatctgtaatgaaatctgtaaacgggaaacttgggccaattcattgtttaaagcagatctactggctcatacctttctctaggaaacaataagtgaacaagaagtaacctcagaagaagaaagaactttgggagaatgcactgagaaaggccagactgagtccccttggatgaagttaattaagaaacaaacatgacaggatattgcaatcaaaaccaaggaatgcagtgaggacaggtttctcagttgcccagaggagaaaacatagttccttctgaactaaaattagaaagccgctggcaaggaaacataagaagcatggataagaggctgaaaaccgtaagtcagcaatggggatggaggtgggtacaggaagagagcgagtatctattttgttttatttcttctgtaattccttaagattgtttgcgcctgagctttgggactgcagtagtctcccctacggggcgtcaagtaacaggctgggagctctggcaagaagttctcaaacttctcacaattctgctaagagcttgcagatatctagctggaagatcaaggatccaagtaaaaacattaaaggaaggtttttgcccactccccggtgagaggtcatctgcccagggagtgctctcgtgtcctgacaccatcgcccgactggggatatatcagtaaccgggctgtcgtcgatgccgagcagtgcccatctggttggcagcgtccgggtctcaagcgttccctcgcccctctctgttctccggggagccctgaatcgctggtgggcatctacagttaagagtgcaggaaggcctctcagacacggggcgaacacaagggctgttggctgcctcctcagagccgacccaggcatagttcgcccaggcgggagagcggcgttgaagtgggtcggcacccgtccgaggggtgccaggccaccccggtgcccgctcctctcgccggcccccggaagcgccgccctcccgcccggcgggctccgagggggcggggagtcgaacgcccccttccgggtgcctccgcccggctggccagccccgctcctcctccgggcgggaatcctccctcccccgcccctcctgaagccgggccccgacgccagacccagccccaggggggaacccccggcctcggctccctctccccgcggcctctgcccgtcttcctgacccttgggggccgggaagaccccgccggcagcggccgggacccaccgctcattacgacatcttcctccctggcctccgccgcctccgccgccaccgagagcctgacaccgcccgccaagcaaccgccaatcccggagcccgccaccgcccgagcgacggcagccttcaccaataagcgcttggaacattggggaccgacagcactattaaccaatcaaccagaggcgtctagagcgacgttgatttgaccaataggtctgtgcaatgtcactgatggacggtagagcgcaccaaccgaaagccaattgaataatgagtgacatgtgcatcagccaattggagggaggcaaagtcccgcccgctgggtggttgatgtacagcaacaggaagctggaaggggaggggcttagccgaagagtgcttttgtattggtcgaggttgaccttccacccacctctaacccagaggatgaatgatagatctgccctgaagccaatcagaagtccttagggtgaggcccacaaatgccccagaaatagcatatacattgcgccctaagtccagtctcgcccaggtgtggcaggagcttttacctgctcttcggcagtagccggctgccactcaaccccatgcctggtgagtggaaagccatcaaccttttatttagtccctctctcgttgtcgcctggggaggggcgactttgtacagtgaggcactggggtccggcaccatagtgggagttggggttgtttacgcgacacttctaaggggattttcacaatcggttaagcccccgttaatcctcacatggttattgcggcgacccccatagcccacggtcccaaacgtgtgcatctgaatcatccgaagctctttctaaaggcaggctcccctggccgcctctcctaatccgactcggtacttcacggggcgtgcctagaatctgcattttagcaagggcctcgcgtggacagaattgcacgcttgagtttgagaagtactgcttggcctctgccccacttacccttaccttcttgagatgaggtaaagcacttggtaggcactaggcgggtaggtttatctttgctcccaagtctcttccgagaacttgggaaggctgcctagcttagtgagggaatccattctggcttcagaccagtctgggtttgaaacctacacatcccactaacttaggcagggtaccgaaactccctgagcttcatgtcctcatcagtaaaacgaggttaatcacacctacaccttagcgcgatggcttaaaaaaaaaaaaaaaaaaaacaaacaaaaaaaaacatagtccatcaagagaaatacattttgcatacagaccagtacactgctatttgtatgagagtgtcataaagtttccgaaaacaatgcttactacttgtgacgcactgatagtttctatgcttatcctatcctatcttattctccttcttgttgatcatgactggcagtttgaaaaacactgctagaaaaggttggtgtgataatacaaaatgcagagcagaataccgggtacacagtaattgctgaataaatgttaatagcctcttccagtcttctcctctcagtgttagcctttgaaaaacaagactttagacaataatactcctctagtaaagatccttcatgggatccgtatctcctagataaagcccaaactcctttctaggcaaagtcctcccactcttttttcttcttaacctcagcatccaccagaggacacactcttactggtgtatctttcatgctttatctcctccctctacccccgttcccttcctacaaatcctacccttttccctccaggaaagattccaggttcctaaacacttacgcttttttccactagttgacttcctatgtgacccttcccttctggtaaacccctatgcatccatggccggatgtgttggctcacacctgtattcctagtgctttgggaagccagaggcaggcggatcacttgagcccaggatttcgagacccagcttgggcaacatggcaaaaccccatctctacaaaaaaaattagctgcatgtggtggtgcgcacttttagttctagctacctgggaagctgaggtgggtggatcacttgagcctgggagtttgaacttaaaatgagctatgatcacaccactgcactccagcctgggtgacaga

SEQ ID NO: 1244760 - DNA, 4001 bp, Homo sapiens
cctggggagcagctttctggccaccagatacccctggaatctgggagatacccccaccagagaaaaccaaatttccatccctctcttgactcataccagtgccaggcaactctctgactgctacccatcttcctctccatgctaggggaggcccagatagaaagttgggagggaatggcttccccagagaagagcttgacagcaagctctggaagatacaattgcacccctttaagtgatacaaggtcagagtgcaggaagaggagggcaacaagagaagtcataaccacagaacctaagagcaagaattgcccaaaaagatgacataagcaagtgcatcctaggcatggatcatttttcagaagctccccaccaccaccagaagattcttatatgcagcaaatgttgagaaccactgctccaggccaatcttcttattttgaagagaaggaagcagactgaatgacttggcacagtgacttggacaaggatgttcatttattcattcaataaaccaggtctcctaactcctggactctcagtctgttactttctgtaaaccaatctttctgtagacccttagaacgctaaagacccccaacgctttctcaaccacatatctgtggcttgaagttcactcttttctcaccacctctccctaaggcctggaagccctggtgcctcagctgggcaggtttgtgtgcctgggtcttctctactggtgggggaggagaccagtgacttagggcaggattgtttccttcctacagcagggcttagctgaccctaccatctcctgcctctgggaccagggaggtggcactgatagcctgggagagggagggagaggaggacgggggcacctactcaggctccggctgcctcaccacaagaggaaaacagggtgaagttgcaggaaaggagccccaggccggggtggggcagcacagaaggggctgagcgggagctgtgaagccagggaccctaacagcttttggtgcctgggaactgccccaggggctggaggatgggaaggctaggataatctgggctccagagtggcttctcctggcagagagctggagagcccaggcctgggatgcaatggcctgctaccaagatttcagaaacccaaagcggggtgattctcaggttctaagaccagtcccactgggtggaaaactgccctggagctggctcagtctagcagaagatgcaagactaagacccaggagaatagaggagggggcaggtcttgggggtgatatggagccacccttaggtggcaacccttaggttgcctctatggtccttgacccacctgccccagagctgagaggaaagaagggaacaggattgagtgccaagtatgtgtccggttcacttccaggcctagaaagagttcaggaaaggagagagcacagcgtacatcgcaggcttctcgctccccgaagtgggaaggcaagtcggtgcacccttatgccccattcggctctgcctctctggatcaccggctagtactcccagttctcaatgtcccggtcctctggttgtcccagtcgctccagttgccccggtttccagcctcctcggtccctccagtctctcccgtccgcccagttttccctccatcggggttctaacctctcagatcctttaggaccaccccgctcccaaggccataggaggctggggcgcgttcggagtgcgttttttcgagacaatctccgtagcgctcacccctggccaccccgacccgcgctcctacctcgaggctgcggcgggctccgggcacggctggctggtgcgctactgacggtcgctcataggccctgtgcgccggcgagctctccagcggtaaggggcaggagcccagggcgagccagacccggcggctggcggcaggcggcaggcggcggaggtgagcgctggcgagagggcggaggacggagggcgggcaggagccagcgagcgaacaaggccagctccgcccgtgactcacccgcgctctctgccttcatcctctccccagcgctgctttttcccccggactcgcggccccgcccacctcacctgcggccgcctttaacccttgagggctcggctggaccggagcccagccagggccgcgaggagggggtgggcgggagtgggggaggaaagataactagggcgtgcgccgcccgctccctcgctcctccctggtcccctccactcccagggagaggggcccgggtggggtgattcccaggttctaagacccgccccgccgggtggaaaactgccctggagctagctcggtctagcagaggacgcaggactaagacccagggggaatggataagggggcaggtcctgggggtgagacagagccacccttaggcagcaacccttaggttgcctcgatggcccttgaccctctctgaacggacagccctgccccggaactgggaggaaagaaggaaacaagattgagcgccaagtatgtttccagttcgcctctaggcctaggccgtgtgaaatttgtcttggctgccctccttcgccattcccccgacccccgacccccgtcccctgccctgcctcaccccccgcaccccgcgccgcttctctccaccaccacccttccccgtccttttttccctctcccttccggggtatccctctctgacctttctgggtgaccacctcctctcctcccctctcccagcctctgcccaccaccggtctctgcttcccccctactctggtcccaggtcccagcagctgtcactctgcccctccccttaggtagcaaccccagtgcctaagaaatccacctctcaaattcgcctctcctcgccctcctgtccttcgggaaatgctcagcctacgcacaccctcgcccccgagcacccggttctgaagaatgggcaggcgcctgaatggccctgggaagggacacttctggaaggaattgagctatcccttgccaccattcctttctaattctcaccagaataactaaacccaaggttcttaactttggggaggggtcttggattcctttgagaaaaattcacatgcccagtgcaatattctggtaaaatttcagcgcgctcgcggagctcacaaaaacttccctcaagatctggatgggtcgacatttccgagacccgcaaagcaccggtgggtagggaagttccgtcctccacccacgcattcttctgcctggccgctgaggtggccccatgcttcactcccatgccgcagtgttgatctctccatgtgaccccttttttcacaggggaatgcagattaatttccctatttctttcatttttcagattcgtctcctctgtgcgctttgccgtcggctttttaaaatttcgttttcctctttacagtcgatttcatacttgaatttaggctgatttaatctcgcctctacagcccctactcccccccgccattggtttacctgtcctgcatgcccgtttgggacacactcaaactgtaactcaaaaatagctaaaccgagtgcataagcggggtgaaaatcaatccatgtgtgtatgcgtatgtgcatggtacccctcagacacgcacacgttcttatccagaatcgacgtcggattcatctgtgcatctccctcttttctaaggctcatttccctcatccggacaacctgggtacacattggtagggtctcctgggggcttaaaggaattgatatgcctaaaaatgcttagcccaaggggcccctggtaagcgccgggtaaatggaagatatccttgttataattattaaataagtcagttccaggtaaatattggttggattaaggtgtatgcacaaagacctgtggactagaagttgacggatttaaattctagccccagccctgcacttgctaaactgaccctggcaggtcaggtgcctctaagcctcagtttcttccttggtgaaatgctgtaaaagcagccaccaagctagagaagtgacaggtatttggaagcc

SEQ ID NO: 1244761 - DNA, 4001 bp, Homo sapiens
ctccagtccccctctacttgcagtcctctgcttccagcccttttggtttcccacttgctaaatgttttcccaccgaatgacggcgcatggtctgatgttaacttaatgagcaaggtcaccacagcccattgcccatatacttattgctactcaaaattgaacaacacagcccatcacatctcctgtataaactgagatctgtcttggacttgggccatttctgctgctcttcctcattctctcaaataaatagtcagatttcccctgcaagtgtccaacccccattcctgccacccctcttcttctcaagcttcatctatagtcagtgatccactttgtacctggagaaatctcattagtctgcgtgtttatcacaaacggcatttatttactgagcacctactatgttccagatgctttacacaaatatctctaattctcatgggcatgcagcaaagtaattattattattcccgttgtacagatgaggaagccaaagatcaaagaagttaaatgatctacccaagattacagagttgttaaaagacagaagaagaaactgagttcagatctctcaggttccaaagcctgtattctgcctactagtccatctggcctcaatatggcagaattgatgaccctggaagtctggctcccctagagcctgaaggtggaggaaacagcattcttaaatgaatccctagatcaaagccatctcctatcttgagtctaatggacaaactgatcccatcttgaattgctgagacaagtcagactctacacttgtgatcccttccaaacttcaactgtcctgtagagattgcactatgagaatatcaaagctggtctagccccaaattgtctcgtccaagccctcgttttactggtagggaaaccaaaccccaaaacagggacgttagtagcaagttagaagcagagctgggaccagaccagagtctggtcctgttttcctcttctcactcactcctctcctccatttcccactcccaccttcgggctgcacttccaagcctgcaagctgatgaccctggatgccaacatattccttatttcccctcctctccccaccatactctcctgattcttagaaaaccagatagagcctaaagctggggtcaaatagttttctttcattcatcctttatttcattcaacaaacacttatcgagggtctacttaaggccaagcacaatgctggacactaattttattataaatttcaaaatccctagctaccaccatcgcttttcagtctagaagatgaacccacctgaggatagtgcatctgtatgtcggtgtgtgtatatctacaaatgtgtgtacatattatgcctgtgtgtacctgtgggcttgagtgtagggtgtcttctctcctccaccgtaaatgcagttccccataggatgtggatagtggtttctcccttactatccttgcaggtgttctgtcattcagggcagtgagtgtgtgtgccctgtatttctattaacatttatttgcccttcctttctctcgaaataaagttcccagctatgaatccctaccccacttctccactgggctgactaccccagcccagtcaaaagacctccaagggatccctttagttctccatgcaaaccccaccaagatctccctcttatctcccccttcccaattcagagagaaccagacccttctctatgacccccactttagagtggagacctgatcctctttgtggaggtcccctgtactggacagggaacagcctctcttaccagtccatggagcccagagctggcggcggcagtgagggccaagtggcggtgataaaagagccaggctttataaaggaggtgacaggcagtgccaaagggggaggtgaaggagggagcagggatgctgccaagtcctcacggcctcagaagcttttaggataatccaggaaacagtggcccccagctctcctaggggagtggtaggaggtgagatctgagtccgtgaggtctgccaggaaaggaggatttcagctgggagtgggggctgggggcacttccttccttccgcagagttggctgggcagtgggagagggacaaagtggttcttgcaggatggaggaaatgacagcattgctagggtggagagctgggatagctggaactctccaaattccatcccctcttcctgagttttcctccatggacttggtaagagagaaagaagttccatttttgagacctgaagggctcatgcccccaacaaacacacacacaccacacgtcttcaagtcagttcctccttgcagagcttcatgtcagtgttgttggcctctctgagccacaatttctctcgctcccttttcatcctctttttacatactcacttcccaacttggatcccccaagaggacccagtgtaatctatcttttggacctgggatctctcattgtcaaatgggaagggaggaccttttccctgactttggatggagtggggaagcttaggatggacaagaggtcacctaagaccagaaagaccagaggcagagtccagccaagaactgctacagacagttcaggactcctggaactccaggagggtgaagagggtaggaaggtggcctggaaaagggagaaggggcctgaaggtgaatttagggggagcccccagatctctatttatatgagcctaattttagggtggttgtaagtttaggtatactggctaacacaaacatgtcccagggcagagatggacaaaagaccaggaaggagaacggagatgaaacagaagagtaagacttgtttcccaaagctcactgaagctgtgaactctgacccacataggagagtggcctggggacttttcacgggatgacatcctgtttttgaccacagcccaatgcccttggcagaggacaggagcagttgtaccccctctacacacaccagaacccagtaccccaagacttacatgctacctccctcccaggatgagccagggagtctttacccaaaactcttctcctgctcctcccctataccctcagcaacctctagactggggattcccagtctcttcattaacttttcagcaattatcccataaaggccctgacaggtccttcctctccccatttcagagatgagaacactgaggccctgaagaggtaaaagctcagcagaaagccacccatcaagcaggagagaatagagtattagagggcttaggaggcagagctggacctctttcttcaatcttaggcaaaattgggaggacagggccagcacaaccccctgggggaacccaggcatcaggactgaggcaggctccagggaggggcttccctgtccctccccaccttccagcacagaaaatcagagtggggaggggaaacaagctgaggagaccacacaggtggagtaaataatgttaatacgggagcattatcactagggcatttcctcatggataaatgtctcaaataccaaaggatgcctccaaattatagttaattacagagttgatttgcataaattataaggtgagcatacaaattctttcaatcggttccatatgcttaggtagcaggtccagtccaaaagatgggagaatcttggggttgggggggagtttgggagaggaaaaagacccagccctcaacctggaccttcaggcccacacaccttcccctggcctctggatcagtcaggggtgtgtttagaccctgcctggacagcaatgaacacagccagcaccctacctggcaggagaccccctttcctcctctattcgcacctccagacaatgtgttttcctaacaccagtgatgggcgggagagaggagctgggaaagctatgggtgggtgccatgcggcctgtagcttggagtggggggcgggactgcagagtcctggcttctggcctttggagccagaagaggggagggggctgaggaagctgaagacccagtggggctgagggtagattcaattcaag

SEQ ID NO: 1244762 - DNA, 4001 bp, Homo sapiens
tgtccctcctctcccggcgcgctagcaccgttcccctcctgctcctccttcccctgctcgtagagactttctcagtctccatcttctaaatgccttccctcaagtctcatgctgactgctactcccttgtctctttccccctcttctcgcccaaactcctggggaaaatcgccactttctccctcccgcttgttttccaacctggtgaattggcctccctgccatcaccgcgcgctgaaactgctctgcgggtccaaggaggcccccttcgactctgtctcatgggagctctcagctgtactcatgccgtccgccacccgctgttgaaaggcttgcctctcctggtttccacgatgctcccttctcccaggtttcctcctccctctctggctgactctcctccttatcctccgtggaattcacttctgcccaggccataaacgctgatatgctttctaaggccttcctgccttgagccctcttctcttccactttgaggaaaccccctgggcagccctgctgttagccaccgcctgaaggctggcaacccctgtggcatcttccccaagacctcagaggcagctactggcaggacacttccacttgaatgccctgcaggcacctcaaacccagcacatctaaacagaaccactgtttccatcaatgccttcttctgccttgtgactttccttatgtgctttaaaacatgatgggccacacatttacccaaactggaaatatgaatgtcattcttcactccttccccatgacatctttcacccagttccaaccaatcagtcccaatgtcctgtggattccaccttccctccgagagcaccgtcctttcctaggttcacacctccatcctggcttccttcatggtcttcttgtatcatgtctcaaccactcttccaagctattctatacacatccatcagaacaaatttgttaaatgaaaagcccagccctgtgacaccttggatggctcccaccataactgccccttcgaggtccacacggcccttcacgacccttcacagcccagccctgcggcccactccctcattcacacgttatgtttcagcagtgccaccttgttctctcacaatgaccttgctttctagaacattcaccctctcctttcctctacatggttaactctgactcatacttgaagggtcttatcagaggtgtgttccccagtgagagtctcctggcatgccaccaccccccacactctcacacacccgatcttccacatcctctgtcacacgaggctggaatagatgtcagtctttcccaccacaaagttaacttctgaagaacggcggctggtcttatttatctgcatgtcttatttatctgcagagttgctggcatggagtagctgctctgtggctgcttctgaaactcaagtccacaaaaggcgtggccacagggacatgagaccttcttctcaccgcgaggggagtgagaaggaggaggcagccaacctggtggagtttgtcaagtctttgaacactgtgccaggcctttcccagagcttttccaacttaatctcatccaatcctctcagcaattgaaaggtgtggggttaatatccctaagttgtagaggaggaaactaaattgactgctacacatggactgtttttgattttttttttttttttttttttgtagaaaagtgacttaaaaggaattccatcctgagcatttcacaacagctccagagtttctctctctctctctctctcctctctcagctggtcactcttccaggccaggataaccccaccctaaccaccaccttgtttttctccacctggtctctggccagaccaacccagcgcccctgttaacagccccaggaagaagggaaagggggctcactgatcaggggtgctccccgcagagctgagaccatggtgacaatggcagcagcagcagtggctcaaaaccctgcttcagctcaagatgtcccccacaaccttgccagggccccaggcacccagtgttaagagaacaatggggaaggcaggctccaggccaacggagggccttctagaactccagctctgtgagctcatcttccacaaacagcgccaccacagagctttgactagcccacctgagcccttccactcagggtccagaggcagagcaggatatctaatcccagcccccttgcacatctctgccccacacacacacacacatacacacatgcgcgcgcgcacacacacacacacacacacacacacacacacactacactgagggatgacacttcctctcccaacagatctttcagatgattatccagggataatggtagacacctagggatggtgatggatgtacagagatggtgatgggtacccagggatgttaacaggtgtgcaaggacagtggtgcgtgtgcaaggatggtagtgggtgcccagagatggtggtgtgtgtgcagggatggtagtgggtgcacggggatgatggtgggtgcccagggatggtgatagatgtgcagggatggtggttggtgcccagaaatagtggtggatatgcaggcattgtggtgggtgcccagggacagtggtgggtgtgcaagaacagtggtggatgtgcaaggatggtagtgggtgcccagggatggtggcagatatgcagtgatggtggtaggtgcccaggcacagtggtgggtgtgcagggacagtagtgggtgcccagggatggcagtgggtgccccaggatggtggtgggtgtgcagggatgttggtgggtgcccaggcacagtgatgggtgtgcatggatggaagtgggtgcccaaggatggtagcaggtgccccaggatggtggtgcatgtgcagggatggtggtgggtgttcagagacagtggtggatgtgcagggatggtagtgttgggtgcccagggatggtggtggatgttcaggaatggcggtgggtgcgcagaggcagaggtgagtgtgtaggatggtggtcagtgtgcaggtacggtggtaagtgtgcaaggatagtggtagattcccagagatggtgatgtgtgcccaaggattgtgagggatgtgcagggatgggggtaggtgcccagggatggtggtgggttcctagggatggtggtggttgccctctgcttttccaggctgcccatctcaccatgaagctcctttgagtgccagaaagttcttccttaatgctgagccacaagccactcccttctccacctggatgatggccattcagtgtggacaggtgcagggcaaaggttaccctattgaccctaaaacttaaaggacagagaattggaaggaaagggcatgtggtgcccacgtctgtgtcccacaggagcctgagtcccacagcacagcagctagagcataggctttggggtcaggctgaccagggctgaacacaggcgctagtgacttccaggtggatgacctagagaaaacagcctcactttctgattccttgattctcaagcggggatgacaacaccaacctcacagggtactaggaaggctcaatgaaacagcaacaaagtgcttagtaccccaggtgctcaataaataatagtaattactactaagtgcagagcacagccataaaagtgtctggttgcaccatgtccaccctatctgtctgggccccaccccaggacaaccaagttaaaattgagggatggcccagcatcagcaccagtatttttttctttcatttttttattgaggtaagaacacttagtaggagatctaccctcttaacatatatttaatatgcaatccattattgttgactgtagaggacactgctgtacagcagctctcttgagctcattcatcttgcctgactggattttcttttttttctttttttcttttctttttttttttttgttttttgttttttgttttttgagatggagtttcactcttttgccagggctagagtgaagtggcatgatctcggctcactacaacctctg

SEQ ID NO: 1244763 - DNA, 4001 bp, Homo sapiens
atcgcgccattggactccaacctgggcaacaagagcgaaactccatctcaaaaaaaaattaattaaattaaattaaattaaatattcaattattcaggccaggcacagtggctcacacctgtaatcccagcactttgggaggccgaggcgggcggaccacttgaggtcaggagtttgagaccagcctggccaacattgtgaaaccctgtctctactaaaaatacaaaaaattagccaggcgtggtggtgtgcacctgtaatcccagttactcaggagcctgaggcaggagaatcgcttgagccctggaggcggagattgcagtgagccaagatcacgccactgcactccagcctgggtgacagagcaagactccgtctcaaaaacaaaaaaattcaattcttcagtcacctcagccacgttttaagtgctcaataaccatgtgactagtagttaccatgctggacagcacagattatcaaatatttccctcatcccagaaagttctattggacagtaggtattttgcaactctttcaagaaagactgctatgctatcatcatacttctgttactcaggatgtcatctgtctatacactcttctttcctcctcatacctattttattgatatcccatctccttccaaaaataattcatatgcatgaaaatgaatagatacgattaatgaaataacaaagtcatggtcaaaaaagaggaagcaaaacttcctatacagctataacagtagctgtatgtgatgatccagtttggccttgagctttctagaaggcagagcaagagggaaaatatggtaaactacatagttctcattatcagaaagaaaaggatagcaatttcttcaggaagacaatttttccaggcagttagtcctaaagcctttcttggaggaatcttatacaggagtcaagctgcttccttgacaagttttgacagcaactgaaatgcagtttctacatggctacgtctctcaaaacgtttaacaaaagtacaaatcagtgagggcaattctgcaaggagctagtttaaactaaggtgattcaagtaccctaccttccagtggtgtaacttgatcccaggagagttctaactacctcctagagtaaatggatattgcctcaatcttgcaggtgactgacctttccgtaagtgaccccatgttggaggaagagcactaatcagggtggtaggatttctcaatagtttgataaaggtcgaagggaggaggaggaggtaataaaaactaacagctaaacagagattcaagttctcactggatttcctttaaccaccctagggcacctctctgttggcctgaatagctgtaaatggatgtcaccgacgtagaagacttcattatcgttattaattattgtagccctggccctctgttcccctgagctctcaccctgggcaaacagcccagtcgagaagctgtccaggcgaatctcacctgcagccccagcttgcacagtgatggggtcagcgaggagcaagcgggggatctttttccagagttggtgagggcaccgggctgcagggtaagttcacggagaggagttctcatagatggttttccctgagaaagaaaccaagaaagagggcgagtgtgaggaagcctgggttctgccagcccgcccctcctccctccctaagaagcccaaaatgcgattagaagagtacgctcgcaccctagtcgcgcaggagcagcaaggcgaacaaagactccacaagcccccaaccccgggctcgacccaactttccaggacagtagacacggccggtgcccccgcgacagcagcccggcccagttctctccgccagagatctcccgcttaccgtctggggcgaaggcgacaggctgaggctcagttttttcactcgccacatcttcaaccagaaggcaggcctatcacgtctcagaccaagtcgaggacgccatgttcacccgccgtctgtgtttgaacctgctctgcgcttcctggttggctgcttcaggcgcgcgcgtacgctcgggggtagagcccggggggcggggcccgcgttgaccacgcccccggccctgcctgcccctccgttgtcgagcgttttccgctgacggagccctcacctcagacaccggcggtagggctggatgcgggcccggcccaggaccggtcttctgtcctcacaccggggaggaccacgcaggtagctggagagtccaggagtccatccctcctgcttccagcggacctcctcacatccatggtgttcatatccaagttgtctccgtggatggagaagaggaatcctctccctaggtctccctcagtcctctccagccgcagccttgacgggaaagagccggccagggagtctagaagccgaagcggtgccgagcggcttccctaggcttggtgggcccgcgtccgggacggcccgggccgtggttctcgacctgggctgtaatgtctccagagtttctgggcttttcctgggacttactcaggccggctaccagtttactgggctaaccgcctacatgtattgaacattgagtgtgtgcctggcgctatgccgaatgccgtgtagtagctcatttaatgcgcataaggacctacgtagtgagaaatactataaatatccccatttgtgacaggaaggagctgagtcagagagaccgtgtgtaatttgctcagcgtcacacagatagtaaacggcagagccgctcttcctccctgtcccgccagctcctgccttctgctgtcttggatctcctatgcacgggaaacctgttgaaggtaggacagccgaaaggtcagtattcagagtgagccgtttgcgaaggtgtgtgtgctttgcacactcacggcgccctgtttacactctgcaagtcttaatacatagggggaaagcagcagtccaaagaggaggaactatgatgttataaactgcagcgtcctcagggacgggctcctctagcattgtgttgtccagtacgttagccctagccatagtggcttttgagcacttcagatgtgactagtcccagtgggaatgtgctataaatgtaaaacactgtacaaactggatttcaaacacgtcgtatgaaaaaaagaatgcaaaatatcgccaggtgcggtggctcatgcctgtaatcccagcacggaggagacagaggcaggaggatcctttaagcccaggagttcgagacctgcctcggcaatatagtgagacctatgtctacaaaaaaaaaatttgggccgggcacggtggctcacgcctataatcccgcacttcgggaggccgaggcaggcggatcacctgaggtcaggagttcgagaccagcctgcccaacacggcgaaaccccgtttctactaaaaatacaaaaattagccaggtgtggtggcacacgcctgtaatcccagctacttgggaggctgaggcaggaagaatctcttgaacctgggaggcggaggttgcagtgagctgagatggcaccactacactccagcctgggtgacagagctagactccgtctcaaaaaaaaaaaaaagttaagccaggggtggcagggttgggggcacacacctataatcccagcttgggaggatcgcttgaacctagttcaaggctgctgtgagctatgatcatcccactgcactctagcctgggcgacaaagcaagaccttgtctcaaaaaaaaaaaaaaatatatatatatatattttttttttttaatactgtttacatattgaaatattttaggaatattgggttaaataaaatacattaaaattaattttcttttgagacagggtcttgctttatcacccaggcaggagtgcagtggtgcaatcatggctcactgcagccttgaactcctaggttcaagcaatcctcctgcctcagcctcctgagtagctgggactaccggcatgtgccaccacgcctggctaattttttataaagacagtctcttgccatattgcccaggctgg

SEQ ID NO: 1244764 - DNA, 4001 bp, Homo sapiens
atttatttatttatctatttatttatttatttatgagacggagtctcgctctgtcgccaggctggagtacagtggcgcaatctcggctcactgcaacctcctcctcctgggttcaactgattctcctgccccagcctcctgagtagctgggactacaggcacgcgccaccacgcccagctaattttcgtatttttagtagagacggggtttcaccatgttggccaggatgctctcgatctcttgatctcgtgatctgcccgccttggcctcccaaagttttgggattacaggcgtgagcccggccaatttttgtattttttgtagagatggggtttctccatgttgcccagactggtcttgaactcctgggctcaagcgatccgtccgccgcggcctcccaaagtggtggtattaaaggtgtgagctacaaggccgggccccactgactgttctttaactggttttcgagtcttctctgcatctagagaagtggcacaagattatggtcaagaacataggcttcgagcccagtcatacctgggtttgaaaccctgccacttaccaaactaaccatgtgacctcaggcgagtgactcatttaagcttcccagtctgtcaatgccgggtgatcccccacttagacagtcatcggagcattagagaattccagttccccattcccatcatgcttcctcctttctcagagatttcaaatagactcttctgcctgtaacgctttgcttctctctctcatttacggaattacctgttctgatctcggctcactgcagattgggggagaacctcaggtggccgctctcacagttatttttctctcagagcacttatcaagttggttattaaacttacgtgtgatcactgcatcaatgagcgccccagccccggactgtggcctccctgaggggtacccctggtccctaacggttgttcaagaaacaaggggacgaagcgtaggcaaccagcggcccttgaatacttggaaggcgtcctgcctgctctggtccccctggggcacgtggggagctgggacagggctcgtccgtggtcaaggtccgcaggtttgggagttggggtcctgcgttccgccagtatcatcccaagctgcaacacgagcagccccggggaggctcccaccgccctgcagggccgcgccctacgccggccgccgaactccagcccacccgcagggaagctactccgagaacgcaggcggagacagtggccaatcggacccggcgggtattctcatccctccaatcaacactacgatccgcccgggcagctcgggaatttaaggctacggatgggaaaaaggttgtcggagggaggcagaagggactgggttaaattaagcaggaggggcaagaacacacagaggaccctgcaaccaatgggaattcgcaggctggggtggtttcgaaggaaggtcgaacaggcctgaggaggcagagctttaagttgagatagccaatagagatgaaggcacagtagatggcgtgtcctaaatccaatcgaaatagagctagaggtgagcggggcaggaatgcggcaggttggaggcaccctaccaatcagaccaggtcagcagcggacaggcgggacggccggctaatgggaaacaaggactgcggaaggccagggtcgggagaagaggcaggaggctggcgctatctttcaggtagccaatcactgtccgctaagaacagcgggcgtgtcagcagcccttttagggactctgagggtctcggaaggggcctgtgaggggtctttcaaggttgaggaggcggcatcgtccaaagagggagaagtatggtcccgagaaccgggcgaaggaaggcggttgtgaatttgggatcctcacctcgggccttgcgccgagtctcctggtcaccgaggctgggtggcttctccatggagctcaggatggagcccagtaggtccgccatcttgggagtgactgagagggggcggtgcgtcttaaagggaagggcggaatgcctttaaggccggaaacacgtcggaggcggaaaaccctgggcccgcctggcctgggcgcagatcccaggcccgcggtgcatggcggcctccagctggcctaggccccgccccgcccccgcagacagaggccggaggctggctggtgcagcgatgtttaatggcaattcgtataaaccaagcccatgcacaagtagaaagtgcccgtggagccggcaggaggcccccgccgcgctagagaaccacaagcccggccgtgcagccctccccgcggcgccttaaatagattcttcactatactctgtatgttacagtatgtacaagacccctcccctcgggggacggggcggactccgcaacgcgttcctatgtacaccacctccccttcggccctgaggtcagtggccagagtcgggtgatggggtaagacagggccagagagggaggaaacagacgcaaacatgcggagtcgggtggggacacggtcagccctgaaacacgaggggcgtgcgcagcgaaggcagtggtgggaaccgaggcggatacattcagagacgcgtcgaacaaataaataaggcaagtcaggagggggccgagtcgggtgcaggcaggaggagctggggagcaggggcaggcagggctccggaggtcacagcggaagatgcaggtatgtggggcgcgggttttctggagccaggaccaaaagagacggggcacgaccaggagggacgaggagaggggtgtgggagcaaggcgtggggaggagggaggaggcctacagagggctccaacaaaggtgaacaggaaagctgccgacaggggctccccctgccccagaaagccctctccctgttaagactgcacgaggcgcccccagggtggtgagaaaggcggtggccaggtcatgtggccagtcccggctggggaagcccttccagctcctggttctgcttcagttccctcatcctgcagagagaaagataggagtcagaggagactggcggatcacgacgggtggcaacgcaaaagcccagggggagaagggatgagtacctgtgtcggcagcgccgcaggaatctcatgatcttccgggctgcctggtcctgcttcttggtgagaaaggagcctctggtgaaagaaacaaaagatggacctcacagaaggcatcgcatgccttcggcccccccaggaaccctaggcagggaatggcagtgaggcatgatgatcaagaggatgagtaagggggaatggcgtggatgcagtgggtgggcacagagggctggggctgggccctacttgttgcgggcaggcagggtggccgaagtccggtggggagggccgggcctgcggcggtaggagcggtagtgctgctggatgagcacagccgctcggcggctctgctgaaatcgcttctgttcatagtagcttcggaacttgctctggatcaggatggccgcctgggtcatcttcttatagagtgcaaactgcaggggtggggaggagggacaggggctgaaatagagggacggagacccaaagccctgaggctcacccaagttaggctgatgcaagactctctgtaacccacacactcaaggaaagactgaatcatcacagacctcacactcagagctcatgcctaataccttaagtgcaatccaggtcagcttgtggagagagaaggggagttagggctctggcaacattctggaatggttaggcgtgggtgtgggttggtgggttgctggttacacttttgagggagaagggtctcacctgcttgtacttccggtaacagcgctggattacagctgctgctacctcctgctgctccttcagccgccggccctgaagggagagaagtctcaccacctcatgacccacataatggcatatctgacttgtcccttcaactttcctggggttcccctgaccctttaccccatccaaggcctgtctgcacgactactcatcctccaaaagcc

SEQ ID NO: 1244765 - DNA, 4001 bp, Homo sapiens
atggagaaatcctgtctctacaaaaaacaaaaatgagcggggagtgttgtcctagctccttaggaagctgaggcacaagaatcgcttgaacccggcaggcagaggttgcagtgagccaagatcactccactgcacttcaccctgggcgacagagtgagactacgtctcaaaaaaaaaaaaaaaaaaaggcaattttgtttggcaaattcaatagcattcctttgagaaaattggatcccacaatcagaactaaaaatcatcactacagtcaagcttttaaaaaaggaaaaagaactatttaaccagatgcaaaggtatacgtgacaaaataaaacaaaaatttaatggtgttactattcagtgtcaggaaatgagctacaaacctcacatcctaaaaactcttcaagtctttttgaaaaatactatgtcattccttcaataattagttatttcgcctcctttgatcaccatgtatttaagcaggtgtgctaggtgcttgagaaacaaaaataggacacatcacctgcctttgataaggtccacagaaataacgccaacgcaggctgaaagctaaactccttgtcagtctcaagaagccaaggacctatcacttgcaccctagaactccaaaaggttcacagagtcgaggtgagggcgcccaggtcactgctcgggtgctagagttaacaggtggccaaatgcacgtataaacagcagtctaagaaggaaactcagacggaaaaagtgttgccaactgtcacctacatcttcccaaccccgccccccaatcctttttataaataaacggagggtttttgaagggaactgtccaaggttacaacctgatacggaggaatgctttggtttgggataccaacgaaattgtttatatatttattgagtactgccacacaacatctaaaagttgacaaagtgtcaaccaaggcacatagaacataaaataagacgtctttctcaacaagattaaaacgtcaagaagaaactgaccgaaagagggagatctctaacttcccaaagcaaggcaaccccctggaaaggtactggaactagcggaagttacatatccagggcagaagtgtccccctccccaagggtaaaactttgaaccgccatctgactatcccacggtggtcggaaacttccctcaacaagaagcaaccagacacccaacaatctccgcccttggccaaccccaggtgtcctcaggccaggctgccgcttcctccccgggccctgcctcctccatctcgctcccttcccaggacactcagtagccggcctcggcttccaacgccggcctggctcccggggtacctggaggccgccgggatcggtcccagggggcatcggcctcaggcccgccctccaggaggcccgtcgcgcctctagtccccgaccgggccgcgaccccgccccggccgcccccggagacggatcccgcggcccccgccctgccgccggcctcacctcctcagcgtgcttgcgcagcgccttctcccgctcgtactgggtgatgagctgctcgttgtcgtcccgcagcagctccagctccacctggtgctcctggtcctgcgcgaacaccgagtccaggttctccagcacagccaccaccagcggcatcagctctttgaccacctcctcgtcatagcgcccgataagccgctcgaactcgcggtagatggagccggccaggccggacacccgctccgacatcacggccccggagccgccgggctcctcctgatacaccacaccgtcctccagctccatggtggcaagcggacgggcgggcggcccggggcgtcgccggcagaggggcggcacctgcccgcacgggacggacccgactcgggctgggacgggtactagggctggagcccgggccggggctggggctgggcccggcggggtgggggccggggccggaggaggggaggggtggcgtaggcgctctcaccccaaccgccgctgcaccaactgccggggcggcccggccgcgcgcgccacacgtcatccgcggggcggggccggcgccgcgtcggcccgatgggcggggcgccgcgggaggccaggcgcggccgggggcggggccaagcgtcttcgggcgctggcggaggaagccatggcgtcaacacccggcgccgcgaagacggtgcgggcgccaatgggaaagactgcggtcggcgggtggggagaagtatccatccacagcgggattcgcggggcgggtcccaggggaaagggaggggttcgggaagagtgacgagttaacttagctggcatttctatggctttttaaagctcacaaagcacctactcacttcatccccacaacaggcgtaaagaggtagatatttggacctcgtttcacagacaaagaaactaggcccaggaaagtggcgttgctctcaaggtcacgcagctacaacgggaaacgggctgagccgggactcaaaccaattacccagattgagaattccgggctccgaaaaaaactggaaacagaaagggagggaaaaaaaaccataaccagggtctgcccaagtggaaaggtggtctcgaatagaatagaactgttttgtgctatggaagagcaagggtgagatgaggggaaatgggagtgactgctaataggtatgggatttcgttttgggataataaaaatgttctaaaaaatgtattatagtgatgaatacacaactctaaatatgctaaaagacattcaactttacacgttaagtgagtgaatcatatggcgtgtgaattatatctcaagttattaaaaaataaacaggaagggtgatagcattctggagaagggtgaaactggaacgttacatgtggcactttcccacatagtgtgtctgctacttctggccaacttgggacggggacatttccaggctccagccaccctcctctcctcaagtcttgaagtggggcggaaagggtaagtgggaggttggggaacagaggaggtaaggggtggagtcactggagtgaataagtcccatgacaagtgaggtttctgccgcctgggagagtgtcacgtgtggggaatgacacaacgcccacgcctagagcgggctgagtcaaggatcccggtgtgctcatctaacgtccgcaaatgggacggaagacactctcaaaagtcccttctctgtgtctcaggtgactcagctctccgtcccgactcgtttaagaaaagggggaggaaaggcaggataaacataggtttaaggggagaattggccacccaccgggatcataactacccttagcttggggtttacaagtttaagtacttcccaccaagtatgaagtagtcccctaaagtttcctacgcatgacccacctggagacccataaaaacaatatgaaggttgggcaagagtaaacctataaatttggaaggacaaagatgaaaatactaagtcttatgaagtgccagatgggactgaatttgcggcctgtgttttttcccgttctcaccctcaccccacattcacccttatgtcatttagatatttgggtagtaggaatgccgaccagctggttggctgtgagccgcaaatgccctttctcttcttaacctttcatatttgaaaactagaaaaagtcttgatctgaatctctcctcttttattttctcttcctgagggctgtcactcacctggtctacctatatgcatgcctctcttttcctgggggatcagaagagccaaaaaacatagggcaaggctttactttttctttccacaatattatcatacacatcaaaaaatttaaagaaaaaagtatcagccgggcgtggtgactcatgcctgtaacccagcactttgggaggccgaggcgggtggatcacaaggtcaggagttcaagaccagcctgaacaatatggtgaaaccccatttctactaaaaagtacaaaaattagtcgggcatggtggtgcacacctataatcccagctactcaagag

SEQ ID NO: 1244766 - DNA, 4001 bp, Homo sapiens
catataagtaactgaaaattatttactcaagtaatttaccatatatcttacaactataattaaatacaaaataataaaatcacttgatttttaaaaccacccaacggggtaagtcccatcaggagagaaaactcaggcagagagattaagcaacttgccaaagctcctacggccacgtgcaatagagcatttgcacccaggcagttcaattccaaagccttgttgtacccacttgcaggcgccgcacagcagctcacggcactgccctctcaaatgaagcctaaacccaagacatccccttaacattagtcttatattaatattctacatattcttaagttcagttgcttttaatttcttcaaagcctaaatatacagatacacgtacacaaatattttatgtactaatatatatacaagtagtaagattattcccaatttttataaatcaggaaagaaaataaaagaccaagtatctagttttaagtcattgatgaaatttaatttctgggctttcaactaatattaaacttgaactgacctatgaataaaaagaaacacattaagggaagttactactttaattcttcttaatttatctaaatctacaattagggtttaaatattttataaacatttaaataataaataaaaactatatactatgaactttcatttaaaaccatgcacaaagcagaaatctgaacaaatcagagactgctagtctgacggtttagaaaacaaaagaaaccacaaccttaagcctctaaaatacagaagatggctcttacagggtgtaagtagagtgagcaacagtaaagctacagagattaatgactacccccacaagcaggcatggatatttgtcacccaagactacaaagaaaagaaagggcaacatctgacaaaacaatagtgaataggctttgtaaagctttcacaactttgatgtgtaaataatggggaaaaaggcattccttaacctaaaagtcttaaattttttcactttaaaacatattttgttttaggaggaaaatatttaaattgtcagttcccatgagctattatcaaaaattacaaaaatgatacctgaaactctatcattcaaaggataattaaaacaaaataagcttacggcctgtatctaactgactgcaagtccaagcataaaagatatttgtccctaaatgctcagaagctaaatgcagaggttgtataaacttggagccggtgctctactcttgctcttcttttactttgaacattctgcttaaaacaagaccacactgaccttgtacttgtgtgtaagtacaatatgaaaatccttttctttagttagtggtttccaaacataaagctataatcctaactgatggtctataaattactataaattagaatcaaaaatcctagcttcaggccattttccattgtttcaatctgcaacagaaattgttacaaagcagacccgttgagctaaaaatttaataaaaaccagctaagcaggggcttctaagagagatgggagtacctgagtatccttggtaggttctgcgtcagagctggcacaccggtagaaatagaaaagtgcacaagcagcaaaacagagagagatactaagatagcagaattaatgaccaccgccccgccaacaaagccaaacacaaacagcagcatgcatccaggactcatggcgctgtgctggcatggtgaaacacccgaaccaaggaggcctacacgggggccaaaggggtatctttgtagtgaggatctgtcattcagcttgctgccacaaaaacaatgccatcagcagcagctttccactccatcctgcagcagctcccaagcgatgacgtcattccgttctccccacctcataaccatagagctgctgctcctagcatttatgcagcaaccccaagcgacagccagcctattaactattttcccctccactaagagtcctggcttagctcattggctacaatgcctgaagatctacataatttattcacactcctacaccaaacagatggctagctaaccctttcaaacatgcctctctgtaacaaaaaggacttcaaaccaattacacgggagaaataaaatatttcagcattcccataaattacaaaattttaaacctagtataatctccatcaagtatcagaaaacaatctaaatactcaatgtgctgcttatatggatggctcataatttatctttttaatggtaaaaaccgtttctacttttctgtgctattctctcctgcagcattccaaccacagtggagagctttttgaatcagcctaactattgttccaggattaaagaacagagaaaaacagaaacaaacatattatttattttactttttctcaaggcaaaatatataacaaagcttacctaattctactatgagctgtggattctagttgatcactccctgagagctgatgaagttttgttctttctaaatgttccatataattatggatcatctattttaaagaaagaaaaaatacacaatatttaaggctaatacctggaataaaatcatagtgttataacaaggaaaacattttggtacaattttcttatctatcagactactcgattccaagtaagagaatattaaggaatgaaaaaaattttaagggaaagtaatatgcaaatgcttacatttaaggatgctggtgtccacaaaagtagctaatatcttgcttaggatggcaaaaaaaaaaaaaaaacccactttttttacaatatgtgatgctattaaaataatattgatataaagaacacaaattagtaaacagacactgggaaagaagtcataaaagaccattggttaaaaataatagatggcatttgagaaagccattcactaaaatgagacacaacaaagaaattaatgtgaaacttctgaagaaaccatatccttatgtgctgatctcttccattttaaaaggaattaacagaataaagatcactttcaatttaattaatttaataccaagaaaagtttcttctttcggtatatttagttgaaagaatgttaaaatactttctcctttgactgttactggtatcattacttggtataatcatctattataacagcagcaaattaatacaaatgtaaaaaattagaatactttttgagtcttagataaggaatcatatgacagacaagctgaataagaaagtaaaaacttcaagaatataaagtacataaactgccaagaacttctaatgtcctatttgattcttgataatatatagtttcacttttaaaaagcctaaatttggaattaagacataaaatcaaaaggcctttgctagagatactaacatgatatgaataagaaaaaaatgaattttaaaaaacaagaaatagtgtgttagtatttaaagggtgtaaatattaagaggcaagcaaaggttgatgtctttcttgggaatattacttgaattctttttttttttaatgtcccttctcaccattcctaaggaatattacttgaattcttaacgctgtacatagaatagctttggaagtcactaaactttagctgtattaagatgcatttcaatctctttataacttaaaatatgcactgtagcatattaagtaacaaaataaaatttttaaaaagtttaaattcactttacaaagcttgcttttgttgtagaaattttatttggcatgtacaaatattaggaaatgtaagttaattttaagatgttatttatcatcaaataaacaaaaagctgaactctgatgcatgaaataaaacaaattaaccagactgttcctcaatgaagactagtccaaacaacaaatgttatccacaaagaatgaaaacagaatcacatgaatatagtatcttaaaattttttaattgacatactttttattttaaatttatagattttaccaccatttacacaacagttttggagaaatacacctttcatctatcagcaagtcagaaata

SEQ ID NO: 1244767 - DNA, 4001 bp, Homo sapiens
ggagtcagccacacattcatgggccagcccccgccgctgctggtggcctggcggagagagggcgagggtgaggggagctgctctgagcccatgtggcgcatacactcccgaggagggctgctcacctgcacgaacgtcatgtacaccttgtccacgtcaggccgctcctcacggtctaccttcacactcacaaagtcctcactgagcaggcggccaatctcctcattctggaaggactcctcttccatcatgtggcaccagtggcaggtggagtacccgactgaacagggccatggggagaggtcagggggccagcaacgggtcagagggaggctggccaagtggccctggctacatggaagacgtcctggcctctagtctcctggaagacccgccaggccgagaggaccctcccccatccactgccactccctgcccacacccccacatcagggaaggtgggagcattacctgagaggaaaatcggcttgttttccttcctggccttgtcgaaggcttcctgtccccaggggtacctagacccagcagggtggggcatcactcagtagcccagggggtctgggaggggcccaggaccccagcgattccaggcagggccccaggagaggtgctcaccagtccacaggattgtaggcatgttgtaggaggtatggtgacttctcgtggatcaggcggttggggaccctctggggtgtagatgaaggatggcttcctttccctccagcaggcatgggcactgaactactgaccgtcgcacttcggtccttgtcccgggaggagctacccctggcgaggactggtgcatcaggcaagccaggggcctccacccaccttctcccaggccccccagcacctgctccatttcactcagcaccccagtaggacccctgctcccagcccaacccacctttctgaaccatgggggagactgtggcctttgtgctcccccttatgttttttggggggtgaggagaggtggctcattgggggctccttgccaggttagtctcccccaacctcctgggcctggcggtgggaaggatggctgtgaggtcagggcgggtcacaatgggcagaatggttcttggggctccattcttacccctccccaggcccctcccccggcccttcctggagcagctgcttggaggcatctctctggcaggcctgggtgtggccccactggaaggcagcctactgttggtggctggacaggccaagatcagtagggtctgggactcgaccaggtgagggacaaacagaggaaaccagacatggggactccctcactcagcgcccacctgctgggactcctgtggggccaggtcctgggccagactccaggacacctagggaatcagagacctcagggagttcagcctggaagtgggactgcaggcagacctaaataacgaaaggtccatgcagcaataaaggactgtgacagggcacagggtactattggagaaaggcccttgacccagcatccagcactggggtgcaaggaaggcttcctggaagcagtgtcagaacagtccctgaggagctggcactgcactggaaggaaggggagaggagggaagggatgaggacgggagaggaggggaggagggccttacagccagagccaggtctcaggagcagaccggaggtggggtgggggaagggccaggcatgcaggggtggtccagactggcactggggaccggtgtccggaagaccctccactgggcccgcaggcaggcgcagggagtgccctaggggcccgctcgcccgcccgtacctgcggctcgcggcgaggcctgcaccggcgcggggcagcagaaggacgcggcccaaccaggcccgcgcgcccagcatggctgctcggggccgtgggcccggccgctgaggacaggaagggaagtcaggaggctgcgaggggcgggccgggcacctacggagccgcgggcgggtcttcgccgggacttgggacagtgtggctggtctccgagcgtcgccctgcggcggagcgcagaattgcagatcaggcacccgagccttgggaggacccattctgtgcataaaactgggctctgcccctgcctggggaggacagcccttctcaagggaatagggagagttgtgggatctagggctgggagatgctagggacatgggatgccagagcttcagctcattttgtccaacccctgcccattttacaaatgagaaatgagatccaaggcgaaggcgtaccttggccaggtccaccagctaacaaggtttgctttttgcagcctcctcgtctctaggtcctactcaaatcctacccactccaggaagtcttccttaaataatactgatgagcccattttatgtctcataggttacacatggcctcattggctacattcagccaatatttattaagtgcctgccgcctgccactctgcaaggcactgagtatacaatggtgggcagagagaaacaaggctcctgccctcacatggctcacagtctgttgagagcggcagatgctaattcgacagccataccgataaacacccacgtgacaagtccgtgagggtataacgtaacaagtgacctgatctggtggaaggggcaaaggatgaaggcttccctgaggaaatcacatttgtgaagccatggagaacgagagaaaggaacttggagggtgctcagggggagtgctggggaaggaggcagaggtacagtttgtgcaaaggtcccgtggcttgtcagtgagtccgggctgagcaactgcagaaagagggaagacaggcagtagatgagggcagaggcaagatcttggagacactcgtgaactgtaagaaggggatttttattttttgagacagagtctcgctctgtcacccaggctggagtgcagtggtgtgatctcggctcactgcaacctccgcatcctgggttcaaggctggtctcgaactcctgacctcaggtgatccatctgccttggcctcccaaagtgctgggattacaggcatgagccaccatacccgaccccatttttttttagccagagtctcactctgttgcccaggctggagtgcagtggatcttggctctctgcaacctccacctcctaggtttaagcgattcttgtgcctcagccttccaagtagctgggactacaggagcgcgccaccatgcccagctaatttttgtatttttagtagagacggggtttcgccatgttgcctaggctggtctcaaactcctgacctcaagcgatccatctgcctcagcctccgaagtgctgggattacaggtgtgagccaccgtgcctggccagagaaggggatttttgatgacagtagaagcaagctattgaaaggctttagtcaggagggttaccagttagatctgcgttttggaaagatcccaccagcttcccagtggagaatgaactggaaaggggcaagagtgaaagcaggggcagataggaggctatagcagcacccagggggagatgggggagcagagatgcagagaaagggatgggctggaagtcggtcaaggaggaaacgtcgtcaggatgggcggcgacaaagaaggcggtgtccagggtgacttgcaaggtggggccgttccctcaagagagggcatggggtgggggtggggggacaactcatggggttcattgtgggacctgtgggtttgagatgtgcacatggaggcagagatgacactgcttggaggacagaggagaggcttcaggagagaggattgggggtcttgactgttgagaccatgtgggtgtggagctgatccagggagaccatgcagaggagcagagaagagggctcaggtccaggcttaagtaagcctgtgaaagacacagatggaggcagggcatggtggctcacgcctgtaatcccagcactttgggaggccgaggagggtggatcacctgaggtcaggagttttagaccaacctgaccaacatggagaaacc

SEQ ID NO: 1244768 - DNA, 4001 bp, Homo sapiens
ttatataatatcaaagactaagtcttcctgaggtcaggagttcaagaccagcctggccaacatggcaaaagcccatctctactaaaaatacaaaattagccaggagtggtggcgggcgcctgtaatcccagctactcgggaggccgaggcaggagaatcgcttgagcccgagaggccgaggttgcagtgagctgagatcgtgccactgcactccagcctgggcaacaagacccagactccatctcaaaaaaaaaaaaaaaaaaaaaagactaagtcctcccttcatatctagaataattgtaatgacaagtttccactccatttccacaacttcaacaagtgaaacaagtttttccttagttttcttcttttacaatagaatttctcttgtaattttgcacgtttagccccttaacacatttcatccccaatctaatacaacgaacacttgcccactgcaagaagaggcaagatacaaacccaaaccaggtaacttctgttccaaattcacaacccaatgagacagacagaccgacacatacacaactaagcaataatgcaagtcaggccgaggtgttaactttcaaatatcgtttgtaaaaataaaacttgggaaacaggccgggtgcagtggctcacgcctgtaatcccagcactttgggaggccgagacgggcggatcacgagatcaggagatcaagaccatcctggctaacagagggaaaccccgtctctactaaaaaatacaaaaaaattagccgggcgtggtggcaggcacctgtggtcccagctactcgtgaggctgaggcaggagaatggcatgaactcgggaggcggaggttgcagtgagcggagatcgtgccgctgcactccagcctgggcgacagagcgagactccgtctcaaaaaaaaaagaaaaaaaaacaacttgggaaacacgaggtcaggtgctgcctctgttttgtttccacatcttaggcttgaagctgggtagaagagatggaccctttagaaaatattcctggtggccaggtgcagtggctcatgcctgtgatcccagcacttcgggaggccaaggcaagtgggtcacctgaggtcgggagttcaagaccagcctgaccaacaacgtgaaaccccgtctctactaaaaatacaaaaattagccgggcatggtggtgcgtgcctgtaatcccagctaccctggaggctgagacaggagaatcacttgaacccgggaggcggaggttgcagtgagccgagatcacgccactgcactccagcctgggcgacagagcgagactctagggaaaaaatggagagagggaggaagggagggagggaagggaaggaaggaaggaagggaaaggaaaggaaaggaaaatattcttggcgccatcctaggagccacaacagggattctgccactttctccaccggcgcaactcacatcctatatttagaggggcttacgagggctattatgtttctcaggatcaaacaaacagaataaacaacaacaaaatttttaagtgtaacattccacccgcgggaccattgatcctgagggcggggaccctcatttacccccaatcccagctcccaaatggacctaagtggcgttagtaatggggttggtggcattggtgtgcaaaaagtgtgctcaatctgcacgcacacacacacacaccacccacaaaaaccacggcctcaaatggcggcctgttttggctcctgaccgcggtgggagagaagaggctccagtccgagttgagacgctcttccaaaggcctctcctgacccgcccacggagtgggggcagtttggtatcaacgcacagtctttcccttctaggccctcctgccaacacgacacacaactttcgccctcagtttccctcgcctccgtcaaccgtcgtccaggcggccccgtcagcaaccgccgcccttcccgcccgcgaagaaagcgcgggaatcaggctgttcgcaggcgccgtggaccgcgcaggcgcagtggccgccacctcggcgcgatggcatcttcgctgcctgcctggccgcccttggccgggcgcgatgacgttaacgctcttccttggcgttctcacactgtggacccagggatggctccagctccttagagttttgcccagagaggaaaggagactgtcctgtgactggagagacagaggcagatctcctgcccaaccggcctcagccccaccatcgtctaaaaagtgtgccccacttcccctcaccccctggcccttagggtccagacatccgtttgttagatgctggtggccacccagagtgtgcccagagattgactcgaaggccacccgaggtgtctggctcaatttctgggtcggatcagggtcagggaatctgagtccccgggaggctggggacagagctgaagcccaggttcagatggcggccatggaaggcggagagccgtcagcgaggcagcgccggggctgcgggagcttgcgggagggaagcgcccgtgagccgcagagacgctctgcaggggaagccgcgtggtgtgcgaccctgggcgttgagctccaggcttcctggcaaagaggactgtggattcctggccctgtgaccttgggcaagttacttactgaacaccctctggacctaccagtaaaagaacaataacaacaatcgccctaaaaatactagaagatgaaatagacaatcctggcacacagtaaatgcccagtaactgttagcccttatttaatttgagtaacagtagctgccatttatccggaacttactatgggccaggtagtggattctagagctgtctgagttcaaagcccatgttttgttgttaccgtatcttctaaccatttgaagactgggatagggaagggcttagagatgaaaggaagattgttagtaaaggcctaggcctataagaccacagacattttagtagttgctttaaaactatctcaagtaaagaagagtgttagaaaataatattagatgtagactgagaccagataatagcagaccttgaatgccagagtaaggaacagctttcaaggaatagggccatcttttattttgggaagaagaagacttgaacaataaaaataaaacttgttatttatcatggttccagagaggagttacccaaaacatgaatagaagcttcagggaagcagattttgacttgatatctacatacggatgtgcatacatttacaacacacacccacccaccccaaaaatagatttttcattaaaaaaaaaaaaaaaaaaccaccttaagccgattacttctgtagggactgcagacatgagcaatatagaatatttgctagcagtttataaacttaatctgttttatacttgtctttttctgcttatttatttccacctggaaagttggtcaggatggatcacagggaaggagaaaactaaagtagtaaaagtagtttgattacataactactgaacatcacattatgtatgagacatcttatgtataatatttaacaaaaaacccttcttatcccccagtcataccatttgggaaacaacccaccttaaatttgtctcctacaaaatttctggcagggatctactggacagccatgactgtgaagtaaaactctgctctccttttgttttgttttgttttgtttttgagacggagtttcgctcttgttccccaggttggagtgcaatggcacaatctcagctcactgcaacctccgccttctaggttcaagtgattctcctgcctcagcctcctgagtaactaggattacaggcacccgccaccacgcccaggtaattttgtatttttagtagagacggggtttcaccatgttggccaggatggtctcgaactcctgaccttaggtgatccgcccacctcggcctcccaaagtgctgggattacaagcatgagaccacacctggcatccttttgttttaaactacattattttattaatacatcaggcaactctatccca

SEQ ID NO: 1244769 - DNA, 4001 bp, Homo sapiens
gtttgaaatgcctggattatataatatcaaagactaagtcttcctgaggtcaggagttcaagaccagcctggccaacatggcaaaagcccatctctactaaaaatacaaaattagccaggagtggtggcgggcgcctgtaatcccagctactcgggaggccgaggcaggagaatcgcttgagcccgagaggccgaggttgcagtgagctgagatcgtgccactgcactccagcctgggcaacaagacccagactccatctcaaaaaaaaaaaaaaaaaaaaaagactaagtcctcccttcatatctagaataattgtaatgacaagtttccactccatttccacaacttcaacaagtgaaacaagtttttccttagttttcttcttttacaatagaatttctcttgtaattttgcacgtttagccccttaacacatttcatccccaatctaatacaacgaacacttgcccactgcaagaagaggcaagatacaaacccaaaccaggtaacttctgttccaaattcacaacccaatgagacagacagaccgacacatacacaactaagcaataatgcaagtcaggccgaggtgttaactttcaaatatcgtttgtaaaaataaaacttgggaaacaggccgggtgcagtggctcacgcctgtaatcccagcactttgggaggccgagacgggcggatcacgagatcaggagatcaagaccatcctggctaacagagggaaaccccgtctctactaaaaaatacaaaaaaattagccgggcgtggtggcaggcacctgtggtcccagctactcgtgaggctgaggcaggagaatggcatgaactcgggaggcggaggttgcagtgagcggagatcgtgccgctgcactccagcctgggcgacagagcgagactccgtctcaaaaaaaaaagaaaaaaaaacaacttgggaaacacgaggtcaggtgctgcctctgttttgtttccacatcttaggcttgaagctgggtagaagagatggaccctttagaaaatattcctggtggccaggtgcagtggctcatgcctgtgatcccagcacttcgggaggccaaggcaagtgggtcacctgaggtcgggagttcaagaccagcctgaccaacaacgtgaaaccccgtctctactaaaaatacaaaaattagccgggcatggtggtgcgtgcctgtaatcccagctaccctggaggctgagacaggagaatcacttgaacccgggaggcggaggttgcagtgagccgagatcacgccactgcactccagcctgggcgacagagcgagactctagggaaaaaatggagagagggaggaagggagggagggaagggaaggaaggaaggaagggaaaggaaaggaaaggaaaatattcttggcgccatcctaggagccacaacagggattctgccactttctccaccggcgcaactcacatcctatatttagaggggcttacgagggctattatgtttctcaggatcaaacaaacagaataaacaacaacaaaatttttaagtgtaacattccacccgcgggaccattgatcctgagggcggggaccctcatttacccccaatcccagctcccaaatggacctaagtggcgttagtaatggggttggtggcattggtgtgcaaaaagtgtgctcaatctgcacgcacacacacacacaccacccacaaaaaccacggcctcaaatggcggcctgttttggctcctgaccgcggtgggagagaagaggctccagtccgagttgagacgctcttccaaaggcctctcctgacccgcccacggagtgggggcagtttggtatcaacgcacagtctttcccttctaggccctcctgccaacacgacacacaactttcgccctcagtttccctcgcctccgtcaaccgtcgtccaggcggccccgtcagcaaccgccgcccttcccgcccgcgaagaaagcgcgggaatcaggctgttcgcaggcgccgtggaccgcgcaggcgcagtggccgccacctcggcgcgatggcatcttcgctgcctgcctggccgcccttggccgggcgcgatgacgttaacgctcttccttggcgttctcacactgtggacccagggatggctccagctccttagagttttgcccagagaggaaaggagactgtcctgtgactggagagacagaggcagatctcctgcccaaccggcctcagccccaccatcgtctaaaaagtgtgccccacttcccctcaccccctggcccttagggtccagacatccgtttgttagatgctggtggccacccagagtgtgcccagagattgactcgaaggccacccgaggtgtctggctcaatttctgggtcggatcagggtcagggaatctgagtccccgggaggctggggacagagctgaagcccaggttcagatggcggccatggaaggcggagagccgtcagcgaggcagcgccggggctgcgggagcttgcgggagggaagcgcccgtgagccgcagagacgctctgcaggggaagccgcgtggtgtgcgaccctgggcgttgagctccaggcttcctggcaaagaggactgtggattcctggccctgtgaccttgggcaagttacttactgaacaccctctggacctaccagtaaaagaacaataacaacaatcgccctaaaaatactagaagatgaaatagacaatcctggcacacagtaaatgcccagtaactgttagcccttatttaatttgagtaacagtagctgccatttatccggaacttactatgggccaggtagtggattctagagctgtctgagttcaaagcccatgttttgttgttaccgtatcttctaaccatttgaagactgggatagggaagggcttagagatgaaaggaagattgttagtaaaggcctaggcctataagaccacagacattttagtagttgctttaaaactatctcaagtaaagaagagtgttagaaaataatattagatgtagactgagaccagataatagcagaccttgaatgccagagtaaggaacagctttcaaggaatagggccatcttttattttgggaagaagaagacttgaacaataaaaataaaacttgttatttatcatggttccagagaggagttacccaaaacatgaatagaagcttcagggaagcagattttgacttgatatctacatacggatgtgcatacatttacaacacacacccacccaccccaaaaatagatttttcattaaaaaaaaaaaaaaaaaaccaccttaagccgattacttctgtagggactgcagacatgagcaatatagaatatttgctagcagtttataaacttaatctgttttatacttgtctttttctgcttatttatttccacctggaaagttggtcaggatggatcacagggaaggagaaaactaaagtagtaaaagtagtttgattacataactactgaacatcacattatgtatgagacatcttatgtataatatttaacaaaaaacccttcttatcccccagtcataccatttgggaaacaacccaccttaaatttgtctcctacaaaatttctggcagggatctactggacagccatgactgtgaagtaaaactctgctctccttttgttttgttttgttttgtttttgagacggagtttcgctcttgttccccaggttggagtgcaatggcacaatctcagctcactgcaacctccgccttctaggttcaagtgattctcctgcctcagcctcctgagtaactaggattacaggcacccgccaccacgcccaggtaattttgtatttttagtagagacggggtttcaccatgttggccaggatggtctcgaactcctgaccttaggtgatccgcccacctcggcctcccaaagtgctgggattacaagcatgagaccacacctggcatccttttgttttaaactacattattttattaatacatc

SEQ ID NO: 1244770 - DNA, 4001 bp, Homo sapiens
ttgtgcaggacatctgcctttgcatcagtttgaaatgcctggattatataatatcaaagactaagtcttcctgaggtcaggagttcaagaccagcctggccaacatggcaaaagcccatctctactaaaaatacaaaattagccaggagtggtggcgggcgcctgtaatcccagctactcgggaggccgaggcaggagaatcgcttgagcccgagaggccgaggttgcagtgagctgagatcgtgccactgcactccagcctgggcaacaagacccagactccatctcaaaaaaaaaaaaaaaaaaaaaagactaagtcctcccttcatatctagaataattgtaatgacaagtttccactccatttccacaacttcaacaagtgaaacaagtttttccttagttttcttcttttacaatagaatttctcttgtaattttgcacgtttagccccttaacacatttcatccccaatctaatacaacgaacacttgcccactgcaagaagaggcaagatacaaacccaaaccaggtaacttctgttccaaattcacaacccaatgagacagacagaccgacacatacacaactaagcaataatgcaagtcaggccgaggtgttaactttcaaatatcgtttgtaaaaataaaacttgggaaacaggccgggtgcagtggctcacgcctgtaatcccagcactttgggaggccgagacgggcggatcacgagatcaggagatcaagaccatcctggctaacagagggaaaccccgtctctactaaaaaatacaaaaaaattagccgggcgtggtggcaggcacctgtggtcccagctactcgtgaggctgaggcaggagaatggcatgaactcgggaggcggaggttgcagtgagcggagatcgtgccgctgcactccagcctgggcgacagagcgagactccgtctcaaaaaaaaaagaaaaaaaaacaacttgggaaacacgaggtcaggtgctgcctctgttttgtttccacatcttaggcttgaagctgggtagaagagatggaccctttagaaaatattcctggtggccaggtgcagtggctcatgcctgtgatcccagcacttcgggaggccaaggcaagtgggtcacctgaggtcgggagttcaagaccagcctgaccaacaacgtgaaaccccgtctctactaaaaatacaaaaattagccgggcatggtggtgcgtgcctgtaatcccagctaccctggaggctgagacaggagaatcacttgaacccgggaggcggaggttgcagtgagccgagatcacgccactgcactccagcctgggcgacagagcgagactctagggaaaaaatggagagagggaggaagggagggagggaagggaaggaaggaaggaagggaaaggaaaggaaaggaaaatattcttggcgccatcctaggagccacaacagggattctgccactttctccaccggcgcaactcacatcctatatttagaggggcttacgagggctattatgtttctcaggatcaaacaaacagaataaacaacaacaaaatttttaagtgtaacattccacccgcgggaccattgatcctgagggcggggaccctcatttacccccaatcccagctcccaaatggacctaagtggcgttagtaatggggttggtggcattggtgtgcaaaaagtgtgctcaatctgcacgcacacacacacacaccacccacaaaaaccacggcctcaaatggcggcctgttttggctcctgaccgcggtgggagagaagaggctccagtccgagttgagacgctcttccaaaggcctctcctgacccgcccacggagtgggggcagtttggtatcaacgcacagtctttcccttctaggccctcctgccaacacgacacacaactttcgccctcagtttccctcgcctccgtcaaccgtcgtccaggcggccccgtcagcaaccgccgcccttcccgcccgcgaagaaagcgcgggaatcaggctgttcgcaggcgccgtggaccgcgcaggcgcagtggccgccacctcggcgcgatggcatcttcgctgcctgcctggccgcccttggccgggcgcgatgacgttaacgctcttccttggcgttctcacactgtggacccagggatggctccagctccttagagttttgcccagagaggaaaggagactgtcctgtgactggagagacagaggcagatctcctgcccaaccggcctcagccccaccatcgtctaaaaagtgtgccccacttcccctcaccccctggcccttagggtccagacatccgtttgttagatgctggtggccacccagagtgtgcccagagattgactcgaaggccacccgaggtgtctggctcaatttctgggtcggatcagggtcagggaatctgagtccccgggaggctggggacagagctgaagcccaggttcagatggcggccatggaaggcggagagccgtcagcgaggcagcgccggggctgcgggagcttgcgggagggaagcgcccgtgagccgcagagacgctctgcaggggaagccgcgtggtgtgcgaccctgggcgttgagctccaggcttcctggcaaagaggactgtggattcctggccctgtgaccttgggcaagttacttactgaacaccctctggacctaccagtaaaagaacaataacaacaatcgccctaaaaatactagaagatgaaatagacaatcctggcacacagtaaatgcccagtaactgttagcccttatttaatttgagtaacagtagctgccatttatccggaacttactatgggccaggtagtggattctagagctgtctgagttcaaagcccatgttttgttgttaccgtatcttctaaccatttgaagactgggatagggaagggcttagagatgaaaggaagattgttagtaaaggcctaggcctataagaccacagacattttagtagttgctttaaaactatctcaagtaaagaagagtgttagaaaataatattagatgtagactgagaccagataatagcagaccttgaatgccagagtaaggaacagctttcaaggaatagggccatcttttattttgggaagaagaagacttgaacaataaaaataaaacttgttatttatcatggttccagagaggagttacccaaaacatgaatagaagcttcagggaagcagattttgacttgatatctacatacggatgtgcatacatttacaacacacacccacccaccccaaaaatagatttttcattaaaaaaaaaaaaaaaaaaccaccttaagccgattacttctgtagggactgcagacatgagcaatatagaatatttgctagcagtttataaacttaatctgttttatacttgtctttttctgcttatttatttccacctggaaagttggtcaggatggatcacagggaaggagaaaactaaagtagtaaaagtagtttgattacataactactgaacatcacattatgtatgagacatcttatgtataatatttaacaaaaaacccttcttatcccccagtcataccatttgggaaacaacccaccttaaatttgtctcctacaaaatttctggcagggatctactggacagccatgactgtgaagtaaaactctgctctccttttgttttgttttgttttgtttttgagacggagtttcgctcttgttccccaggttggagtgcaatggcacaatctcagctcactgcaacctccgccttctaggttcaagtgattctcctgcctcagcctcctgagtaactaggattacaggcacccgccaccacgcccaggtaattttgtatttttagtagagacggggtttcaccatgttggccaggatggtctcgaactcctgaccttaggtgatccgcccacctcggcctcccaaagtgctgggattacaagcatgagaccacacctggcatccttttgttt

SEQ ID NO: 1244771 - DNA, 4001 bp, Homo sapiens
cgggaacttcctccatgccccactttaaggcattgtgcaggacatctgcctttgcatcagtttgaaatgcctggattatataatatcaaagactaagtcttcctgaggtcaggagttcaagaccagcctggccaacatggcaaaagcccatctctactaaaaatacaaaattagccaggagtggtggcgggcgcctgtaatcccagctactcgggaggccgaggcaggagaatcgcttgagcccgagaggccgaggttgcagtgagctgagatcgtgccactgcactccagcctgggcaacaagacccagactccatctcaaaaaaaaaaaaaaaaaaaaaagactaagtcctcccttcatatctagaataattgtaatgacaagtttccactccatttccacaacttcaacaagtgaaacaagtttttccttagttttcttcttttacaatagaatttctcttgtaattttgcacgtttagccccttaacacatttcatccccaatctaatacaacgaacacttgcccactgcaagaagaggcaagatacaaacccaaaccaggtaacttctgttccaaattcacaacccaatgagacagacagaccgacacatacacaactaagcaataatgcaagtcaggccgaggtgttaactttcaaatatcgtttgtaaaaataaaacttgggaaacaggccgggtgcagtggctcacgcctgtaatcccagcactttgggaggccgagacgggcggatcacgagatcaggagatcaagaccatcctggctaacagagggaaaccccgtctctactaaaaaatacaaaaaaattagccgggcgtggtggcaggcacctgtggtcccagctactcgtgaggctgaggcaggagaatggcatgaactcgggaggcggaggttgcagtgagcggagatcgtgccgctgcactccagcctgggcgacagagcgagactccgtctcaaaaaaaaaagaaaaaaaaacaacttgggaaacacgaggtcaggtgctgcctctgttttgtttccacatcttaggcttgaagctgggtagaagagatggaccctttagaaaatattcctggtggccaggtgcagtggctcatgcctgtgatcccagcacttcgggaggccaaggcaagtgggtcacctgaggtcgggagttcaagaccagcctgaccaacaacgtgaaaccccgtctctactaaaaatacaaaaattagccgggcatggtggtgcgtgcctgtaatcccagctaccctggaggctgagacaggagaatcacttgaacccgggaggcggaggttgcagtgagccgagatcacgccactgcactccagcctgggcgacagagcgagactctagggaaaaaatggagagagggaggaagggagggagggaagggaaggaaggaaggaagggaaaggaaaggaaaggaaaatattcttggcgccatcctaggagccacaacagggattctgccactttctccaccggcgcaactcacatcctatatttagaggggcttacgagggctattatgtttctcaggatcaaacaaacagaataaacaacaacaaaatttttaagtgtaacattccacccgcgggaccattgatcctgagggcggggaccctcatttacccccaatcccagctcccaaatggacctaagtggcgttagtaatggggttggtggcattggtgtgcaaaaagtgtgctcaatctgcacgcacacacacacacaccacccacaaaaaccacggcctcaaatggcggcctgttttggctcctgaccgcggtgggagagaagaggctccagtccgagttgagacgctcttccaaaggcctctcctgacccgcccacggagtgggggcagtttggtatcaacgcacagtctttcccttctaggccctcctgccaacacgacacacaactttcgccctcagtttccctcgcctccgtcaaccgtcgtccaggcggccccgtcagcaaccgccgcccttcccgcccgcgaagaaagcgcgggaatcaggctgttcgcaggcgccgtggaccgcgcaggcgcagtggccgccacctcggcgcgatggcatcttcgctgcctgcctggccgcccttggccgggcgcgatgacgttaacgctcttccttggcgttctcacactgtggacccagggatggctccagctccttagagttttgcccagagaggaaaggagactgtcctgtgactggagagacagaggcagatctcctgcccaaccggcctcagccccaccatcgtctaaaaagtgtgccccacttcccctcaccccctggcccttagggtccagacatccgtttgttagatgctggtggccacccagagtgtgcccagagattgactcgaaggccacccgaggtgtctggctcaatttctgggtcggatcagggtcagggaatctgagtccccgggaggctggggacagagctgaagcccaggttcagatggcggccatggaaggcggagagccgtcagcgaggcagcgccggggctgcgggagcttgcgggagggaagcgcccgtgagccgcagagacgctctgcaggggaagccgcgtggtgtgcgaccctgggcgttgagctccaggcttcctggcaaagaggactgtggattcctggccctgtgaccttgggcaagttacttactgaacaccctctggacctaccagtaaaagaacaataacaacaatcgccctaaaaatactagaagatgaaatagacaatcctggcacacagtaaatgcccagtaactgttagcccttatttaatttgagtaacagtagctgccatttatccggaacttactatgggccaggtagtggattctagagctgtctgagttcaaagcccatgttttgttgttaccgtatcttctaaccatttgaagactgggatagggaagggcttagagatgaaaggaagattgttagtaaaggcctaggcctataagaccacagacattttagtagttgctttaaaactatctcaagtaaagaagagtgttagaaaataatattagatgtagactgagaccagataatagcagaccttgaatgccagagtaaggaacagctttcaaggaatagggccatcttttattttgggaagaagaagacttgaacaataaaaataaaacttgttatttatcatggttccagagaggagttacccaaaacatgaatagaagcttcagggaagcagattttgacttgatatctacatacggatgtgcatacatttacaacacacacccacccaccccaaaaatagatttttcattaaaaaaaaaaaaaaaaaaccaccttaagccgattacttctgtagggactgcagacatgagcaatatagaatatttgctagcagtttataaacttaatctgttttatacttgtctttttctgcttatttatttccacctggaaagttggtcaggatggatcacagggaaggagaaaactaaagtagtaaaagtagtttgattacataactactgaacatcacattatgtatgagacatcttatgtataatatttaacaaaaaacccttcttatcccccagtcataccatttgggaaacaacccaccttaaatttgtctcctacaaaatttctggcagggatctactggacagccatgactgtgaagtaaaactctgctctccttttgttttgttttgttttgtttttgagacggagtttcgctcttgttccccaggttggagtgcaatggcacaatctcagctcactgcaacctccgccttctaggttcaagtgattctcctgcctcagcctcctgagtaactaggattacaggcacccgccaccacgcccaggtaattttgtatttttagtagagacggggtttcaccatgttggccaggatggtctcgaactcctgaccttaggtgatccgcccacctcggcctcccaaagtgctgggattaca

SEQ ID NO: 1244772 - DNA, 4001 bp, Homo sapiens
aaggaggaaacacagtatttagccaccgggaacttcctccatgccccactttaaggcattgtgcaggacatctgcctttgcatcagtttgaaatgcctggattatataatatcaaagactaagtcttcctgaggtcaggagttcaagaccagcctggccaacatggcaaaagcccatctctactaaaaatacaaaattagccaggagtggtggcgggcgcctgtaatcccagctactcgggaggccgaggcaggagaatcgcttgagcccgagaggccgaggttgcagtgagctgagatcgtgccactgcactccagcctgggcaacaagacccagactccatctcaaaaaaaaaaaaaaaaaaaaaagactaagtcctcccttcatatctagaataattgtaatgacaagtttccactccatttccacaacttcaacaagtgaaacaagtttttccttagttttcttcttttacaatagaatttctcttgtaattttgcacgtttagccccttaacacatttcatccccaatctaatacaacgaacacttgcccactgcaagaagaggcaagatacaaacccaaaccaggtaacttctgttccaaattcacaacccaatgagacagacagaccgacacatacacaactaagcaataatgcaagtcaggccgaggtgttaactttcaaatatcgtttgtaaaaataaaacttgggaaacaggccgggtgcagtggctcacgcctgtaatcccagcactttgggaggccgagacgggcggatcacgagatcaggagatcaagaccatcctggctaacagagggaaaccccgtctctactaaaaaatacaaaaaaattagccgggcgtggtggcaggcacctgtggtcccagctactcgtgaggctgaggcaggagaatggcatgaactcgggaggcggaggttgcagtgagcggagatcgtgccgctgcactccagcctgggcgacagagcgagactccgtctcaaaaaaaaaagaaaaaaaaacaacttgggaaacacgaggtcaggtgctgcctctgttttgtttccacatcttaggcttgaagctgggtagaagagatggaccctttagaaaatattcctggtggccaggtgcagtggctcatgcctgtgatcccagcacttcgggaggccaaggcaagtgggtcacctgaggtcgggagttcaagaccagcctgaccaacaacgtgaaaccccgtctctactaaaaatacaaaaattagccgggcatggtggtgcgtgcctgtaatcccagctaccctggaggctgagacaggagaatcacttgaacccgggaggcggaggttgcagtgagccgagatcacgccactgcactccagcctgggcgacagagcgagactctagggaaaaaatggagagagggaggaagggagggagggaagggaaggaaggaaggaagggaaaggaaaggaaaggaaaatattcttggcgccatcctaggagccacaacagggattctgccactttctccaccggcgcaactcacatcctatatttagaggggcttacgagggctattatgtttctcaggatcaaacaaacagaataaacaacaacaaaatttttaagtgtaacattccacccgcgggaccattgatcctgagggcggggaccctcatttacccccaatcccagctcccaaatggacctaagtggcgttagtaatggggttggtggcattggtgtgcaaaaagtgtgctcaatctgcacgcacacacacacacaccacccacaaaaaccacggcctcaaatggcggcctgttttggctcctgaccgcggtgggagagaagaggctccagtccgagttgagacgctcttccaaaggcctctcctgacccgcccacggagtgggggcagtttggtatcaacgcacagtctttcccttctaggccctcctgccaacacgacacacaactttcgccctcagtttccctcgcctccgtcaaccgtcgtccaggcggccccgtcagcaaccgccgcccttcccgcccgcgaagaaagcgcgggaatcaggctgttcgcaggcgccgtggaccgcgcaggcgcagtggccgccacctcggcgcgatggcatcttcgctgcctgcctggccgcccttggccgggcgcgatgacgttaacgctcttccttggcgttctcacactgtggacccagggatggctccagctccttagagttttgcccagagaggaaaggagactgtcctgtgactggagagacagaggcagatctcctgcccaaccggcctcagccccaccatcgtctaaaaagtgtgccccacttcccctcaccccctggcccttagggtccagacatccgtttgttagatgctggtggccacccagagtgtgcccagagattgactcgaaggccacccgaggtgtctggctcaatttctgggtcggatcagggtcagggaatctgagtccccgggaggctggggacagagctgaagcccaggttcagatggcggccatggaaggcggagagccgtcagcgaggcagcgccggggctgcgggagcttgcgggagggaagcgcccgtgagccgcagagacgctctgcaggggaagccgcgtggtgtgcgaccctgggcgttgagctccaggcttcctggcaaagaggactgtggattcctggccctgtgaccttgggcaagttacttactgaacaccctctggacctaccagtaaaagaacaataacaacaatcgccctaaaaatactagaagatgaaatagacaatcctggcacacagtaaatgcccagtaactgttagcccttatttaatttgagtaacagtagctgccatttatccggaacttactatgggccaggtagtggattctagagctgtctgagttcaaagcccatgttttgttgttaccgtatcttctaaccatttgaagactgggatagggaagggcttagagatgaaaggaagattgttagtaaaggcctaggcctataagaccacagacattttagtagttgctttaaaactatctcaagtaaagaagagtgttagaaaataatattagatgtagactgagaccagataatagcagaccttgaatgccagagtaaggaacagctttcaaggaatagggccatcttttattttgggaagaagaagacttgaacaataaaaataaaacttgttatttatcatggttccagagaggagttacccaaaacatgaatagaagcttcagggaagcagattttgacttgatatctacatacggatgtgcatacatttacaacacacacccacccaccccaaaaatagatttttcattaaaaaaaaaaaaaaaaaaccaccttaagccgattacttctgtagggactgcagacatgagcaatatagaatatttgctagcagtttataaacttaatctgttttatacttgtctttttctgcttatttatttccacctggaaagttggtcaggatggatcacagggaaggagaaaactaaagtagtaaaagtagtttgattacataactactgaacatcacattatgtatgagacatcttatgtataatatttaacaaaaaacccttcttatcccccagtcataccatttgggaaacaacccaccttaaatttgtctcctacaaaatttctggcagggatctactggacagccatgactgtgaagtaaaactctgctctccttttgttttgttttgttttgtttttgagacggagtttcgctcttgttccccaggttggagtgcaatggcacaatctcagctcactgcaacctccgccttctaggttcaagtgattctcctgcctcagcctcctgagtaactaggattacaggcacccgccaccacgcccaggtaattttgtatttttagtagagacggggtttcaccatgttggccaggatggtctcgaactcctgaccttaggtgatccgcccacct

SEQ ID NO: 1244773 - DNA, 4001 bp, Homo sapiens
aaaaaaggagatgaggtctcagtatgttgcccaggctggtctcaaactcctgagctcaagcgatcttcccatcttggcctcccagagtgttgggattacaggcgtgagccaccatgcctggcctaatttcttacctcaaattcatatcttgtatgtccagactcttaagtgtggctgccacggttctgcctgtctgacccctgtctccctttctagtctgtcatctctccataccccactctcctcgccctattcatccttcatcctttcacccaaatgagaaacctgggtcatttgtgactcctcctccctccgcagctactgccctcctacccctgatgctgtcctcatctcccagtaccagagccagcacacacccatgacttcctaccctttggcacttggtgctgagtgctttgcacattcagtcttcatacctaccctatgcccagttggccacggctctcctctcacagatgaggaaacgtgtatgaggtcatgcagctattaagagcagcacacgacccaaaggcaggtctggctggctccaaactctgggatgctactcactgcactgtcttaaatctctttagtcttccagtgggaccactgcaactatgtccccctccaacctggattttcaatgacctcagagtgagcctgctacatctcacttgtctccggttacccccagactccatgtggcctcttggtctgatctctaccttcatttttcatctcttggcatccagcttcctgtccctcaccctaagccgaagctacccccagagtaccgcaggcctttctgcacccagtgcctttgcaaatgctatttcttatacctggaaagccttcttctggcaaagtcctactcatgcctgaaagcccaattcaaataatcagtgtaatcctctccatgacagacctggctgtctaatctacgttttaccttacaggcgtgagccactgcacccgacctctggtttttttttttttttttttgacagggtcttgctctgtggcccaggctggagtggcagcatcatagctcactgcaactcctgggctccagtgagcctcccagctcagcctcccaagtagctgggactacaggctcatgccgccacacctgtctaattttaaacatttcctgtagaggacaaagtctcgctatgttgcctaggctgatcttgaactcctggcctcatgtgatcctcccacctctgcctcccgaagtgttgggattgcaggcgttgagccatcatgcccacctaatttttgaccgtttttaatgctggcccatgcccttctgggagagaggatccccaaaagaaagccaccatttcagtgggggatctgacgcccctatgggaaggggagacacagggcactgggggcaaacatctttgctcattggttcagagaagagtacaaggcatcaacgaagcgctccgtaaaaatgtgctgaagactgccgctcctccctgcaaagcctcaagcatcaaggagggacaactggatgtgattttttggatctgcagttcaggataattcatgagtcgtttcctgtgcacaaggccattgctccttctgtggtctcagaaccccttcaagaaccactgactctgcagtccctactccaaggcgcgcatgcgtgtccgtgagagcacatgggtgtgcaccgcgcaggggctgaggctgggagccgtagtcaggggcaccgggtgggctttggcggcgggtcgacctgcctttcaggtgccgggggtttgggagcaggggaacgggccctgggcggattcctgaccgcccccttcgcgcccctccccctctcactttcgctttccccgcctgccccaaccctcgcccccgggcgctcggccgctcccacctgtcacccccatgcagaccgaggctctgtcctggaggcggggagcgggctggtggatgctgcctctccgcctccagtgtgctctttggctgagggactggtgggcgctggaaatattagaggcgccggtgcctgtgatgtcgccgcctctgtgacgtccccgccgcgaccccacaggcagggagccgcatttaggtttcgggcgggcggacgggggacggcccgagtgaggcgtcctccgaaggctgcgggcccgaagccagaactccttcctctccgaagacctcgggggtggggctcgcgcttccgcagcgggcctagagcgagaggcaggcggcaggtaagcctggctgtgctggacaggacttgcacccgctctgcacgccagcggctcagggctgccgcccttttcgtggtcccagggcccttccaagaaccggctaaaccaacccaagccgcgcgcacacacacttgtgcacacagggagtgtggagccagattcgataaggcaccccgtgtgccccagctccatgaccaaggaactcagcaccccgtgtgccccagctccatgaccaaggaactcagcaccccgtgtgccccagctccatgaccaaggaactcagcccacaaaggcatccctggccccatgcagggctcaggaggcagcggaaagggttaagagtccaggcctcaaggacaggaggggagggtggagggcctgtggtgtgcatccggcatccctggatggtcagggcccagaacccatccctatttcccttctggtggtagggggctgcctaacttgggcagtggcacaaagcatgcaggctttgttgtcctcctcctccacccctcagcctggcatattttggcgagggacttccctgatgccaccgggcaaggtatcttgcctaactggtctgaatgactagcccagcgttgggactagaagcagccactgggaggagtggtgggaaagcagccccactcaagggctgaaacagtccttgtccaaaacaagggggacttgaaaagatctcagcaagaaggcaaagagaggcagctgttagggtcgtgaggttcagcaggccggcaggcaagagagaggacaccgatggcctggaaacatttgtcatcaccccaaactttattgcttacaaagagttctctacaacccagactctgcagtaccaaggctgcagttctttatgtgctgggggccggggctctctccccgggagcagtctgactcaatgtggacagctggacaaaggctgtcttggcaagatgtgggaatgagcttctcccacggagtctcggcgtcccctgccccaggaggttgaggctagcagacaccccctgacgattcacagctgatttaatgctacgtgagtcctgagtagctcccctgggagaagaggctaagctggggcaatggggaagggggtgctattcttagagaaatctggaagaggtttgaggagtcacatgcatgtggacagctcaagactgtgtcccttcaccccatctcctggcttgctatgctcctacagtgtcactgccctgccctgccctgccagagggcagccatgaaagtgctttgaggtcatcagagtgcaaagtgccgtcggcagtaccctctggccaggggcagggcagggtgagtgtcagtgtgatgctgagctgtgctctggggaaccagcacgctggacactgatagtggggctggggcgccggagcgtctctctctgctgctttccttagcactgatcatgtccatccacagactgttcctgtcaggcatatcctgcatcacccttcacctttacagatgagggaactgagtgccagcgagtctggggcagtgctgggcctgaaggggctcggggcctgctgctctggggaagagtggtagccagcagcaaaggggcacatgtctggggactgagaaccacttcacttacacaccttctttggtccttggctgaaccagaggtcaactcaggacctgtgttgcaacaacctgaaaagtgtggtgtattctaccagggagccttcccagggtcaggcattcttttcccctacacccaaaaggggtgagctggccagg

SEQ ID NO: 1244774 - DNA, 4001 bp, Homo sapiens
gatgggagaggagagaaggactttcactgggcaaggagggaggctcccgctctgagattcccctgaggagaggccgaaggaggcctctggtgtcagagtctacaggatgaagagctgtgaataagccatgatgtcctcccatcagacaggaagggaccactgcagaagtcataatagaattcccatcattgcttcctgagatagtcacagctgggtgtgcccatggccttgttatccccctccacggatggagacacttaggtttagaaaagtcatcaagagacatagagtttcagagggtacagctgaaaccaagctttcttttatcttttattttattttattttatttattttatgacagggtctttccttgtcaaccaggctggagtgcagtggtgcaatcatagctcattgcaacttcaaactcctgagttcaagagatcctcccgcctcagcctcccaaagcaccaagatctcaggcatgagccactgcacctggccagaaaccaagctttcttatttcaagtgcagacctttattaagactagcctaatcctctatctcctaagcatcctcctcctgcatggagcgctcatcccccaggagggcatattcttcttattgggaaagtgtgattattgaaagattccacttttttaaaagaacagggttggaggtgctttttggggtatcctcctaccaaggagcctgttgaaggcctcgtggtgctcagggagcacggaggatgctcgctttcgcttcagcttcatcttgagcccacacagcgtctccaccacccaggtgtcctcgggctcaggggcgcgctccaactccagctcctcctccagctcctcctcggattcgtctgaccattcgctcttccttttcaggccaagggattgaggctgggggctgggatctatccaaggggctgagtgaagaaaccaggccatggtgtcatgtttctgccattgatcaccttagacgccccgacccaggaacctcaaactactcttccatcctcccaagcctcgcagactgtcagcttctccaagccatgtttccacctttctcctttgctgatccccatctgcctctccctcacctccccattcttccggctctctgtcctcaaaacatttcctcatcacagataagaactttcaattggagaaaaatggaaaccttcccttgagctctgtctgctctctctctctctctctcttttttttttttttgagatggagtctccctcttgttgcccagaccggagtgcagtggcacaatcttggttcactgcaacctccgcctcctgggttcaaatgattctcctgcctcagcctcttgagtagctgggactacaggcacgcaccaccatgcccaactcacttttgtatttttggtagagacagggtttcatcgtgttaaccaggatggtctcgatcttctgacctcgtgatccgtccgcctcggccttcctctctcatcttttgagcacatctcctgacccccttcattgctccccagactttctttacacgtggccatgcttggccccattccctgcaccctccttccccgatccctggcttcctgagtccgtcgtttctttcccacacaccctactcaggtgcttcagattcccagtaactggcccccttccctctcctcagtcaatcatctcccatcgcttctccctccagtcacctcacctgatggtcctggcacttcatcatccaccaccacctcgggggaccgtaccgttgtgctaggctgggggctctcctcctcaaacggggggcgcgcttgaccactggccataatctctcccaaacactttgtttctgtccacaaaacctagtccctgttctgtccaaagccttcttccagactccgttaggacccagaagagtgcgtttctcttctagaggctcgggagaagttaggagtgaagagtagttctgagaagttgctgttgtccacctgaactcccaagcaaccagagtccggtccttccaatcaggaaagtcggaatctctgatgtcatcggtcattccaaactggcaactactttgaagaaaaacacatgtaactgccagactgatctcttttcttggagatccggggtgaacggtatctcctggcaatgtcccaacctctgagcattgtccaaaagcatcctcagggtctccacattcctcttttccctgtcccagcagaggctgtgtcctctccactctaaacttgagggggtgttgggctctcctccccgcttctccttcccatttcagagtctagtctggtgagagagggaggaaggtggaaggaaatttagggtaagcagaatgatgagtccttccaagagtgagattaacatatacaggagatcctgggtaaattgacttgttgaatggagacgttacgtcgaagtactcaatgtggcaaagcttttttgctgaatgtttactgatattcactatcctggatcctatagtaggggaacatgcatcctttgctctcaggcatctttgagtccaagagacattttgaggaatgaaaatcacaggagactgtccatggtttcgtacagattttcaatggtgtccacaagttcagggcatccatggatcacctaaagcctgccctccagttcagctaaggaactctggtctatatatcaactattacaacatatctatttcacttgaccccaaaatttgcctactatttatgtattttatgaataaaatatcctgtgtataaaaagactaaggggaaaatctcagccaggcccaggggctcctgctcataatctccctcctttgggaggccaaggcagggcgtcacttgaggttaggagttcaagattagtctgggcaacatagcaaaacgtcatctctacaaaatataaacaaagtaatcaggaatcgtggcacacacctgtggtcccagtacttgggaggctgaggcaggaggattgcttcagcccaagtgtttgaggctgcagtgagctatgattgcaccactgcacaccagcctggaggacagagtgagactcagtctcaaaaatatttttttcggaaaaaataaaaatgtaagagctggatactatctcagataccatccaaagaacctgtgagttctggcacagcttcctaatgggctcctaggagtctctcgctgatgggaaaggcacaactgaatgaggaggcagatcccgtcgctgtggaagtccaattgttaggaaactctgcttacattgagtggaccttcgcattcacgatgctttcaaccatcagaactggttggatccttttacaacaaaacagaaaatcatctttctctcctatttaataggctttcaaacattagaagatcaatattctgttgccattaaaatttctcttctgtaccacgtaaagttctgattaatcactcttcaagccagttttacatattcctctgtcttctaggcaccttctgtagacaggctacaataaggcagccatcttaaattatgtcaatacattgtccaaaaatgagctaaacagttcaggtttcatctgatatgttcagggaaaagcaaaactatcacttctccccttctcttttccttcagtgatgcaggttaatacaacaatggctgtagctatgcaccaaagatatcattagagtgaaacagaagggctttattggctggcatggtggctcctgcctgtcatccctacactttgggaggccaaggctggagaatcacttgaacccaggagttggagatgagtctgagtaacgttgtgagactccgtctctccaaaaaaatttaaaattagcctggtgtggtggcacacacctgtagtcccagctagttcggaggctgagtttggaggagaagaagtgctttgcaaataccagcctttcagcctaaggatctcaactaggaacattaagatacagatgccaggacccagccccacagattctaattccaaaggactgagg

SEQ ID NO: 1244775 - DNA, 4001 bp, Homo sapiens
agttttggaggctgggaagtccaaggcaaggcaccagcagattcagtgtctggtgagggctcactctgccgcacagaaggtgccttcttgctgcgcctcacatggcagaaggggcaagggagctcctcaagcctgttttgcacaagcacaatcccattcatgagggtgaagccctcatggccgacttcccaaaggccccacctcttaatcctatcacatggggttttaggttccaacagataaattttggggggtacatcaacattcagacaatagcatccaccaaattaaatgacggcttgcctgagctcggctgagccacgctgaccccttaccctgcagcgtagccaaacaggactcttctctgcacttccaatgaaacttgcggttctcatcttggggtattcaccaatctgagggcctccctgtatgaatgttttatcccctccttttaggcttatgccaatcaagactttcttgcaaaaacctttctgatgagatactcccagctctaaacctccagaaaatcgtctctcttctggaactcctaggtctgtgaccactgcccaccccttgggccagccctgcctctcacccgggtgctgcagcctcccctcactggctcttggcttctgctcttgccccttcttgcctaccacttaatgcccattcagcagccacaggagtcttttcaaaacacaaatcatgaactgtccacttaaaaatggttaagatggtaaatttcatgttatgtgactttttttcactaaaattaaagtttcaaaattaagacacgtacacaaaaatcagatcacatcactccctacacagaaccccccagtggcttctcactgcattgggagtgaaagcccaaggtctttgtcccagccccaagctcctaggcttcctggccctgcccacctcctcgcctagctctgatcactctcccctgctcactgtgcttcatgtgggccgctcccagctccctgagcatgtgcagctagttcccaaggaagagctctgaccctgctgttccctctgtccagaatgtccccccagctcctcacacagtgggctcctttctcctaggtcagtctctgctccaaggtgcttcctctaggaggcgtctttcttatactctctagagtagctctcccaccccaccaaacagcccctggtttatttcttcagagcctttatcaccaaatgaagactctcactgccatcgattatctgccattgattttctgtcatgggttatctgccttcctgtgctactagggaaggtccgtgatagcagggcctttacctcccttgttcaccattgtgttcctggcacataataagtgttcaacaaatattagttaatgaatacttagattctggctttcactgaaaacatgcatatgggtgcctccctggccctgccccaccagccagggagcttctacaaaggtacacagtcccagcaggcaggagccactcactaaataggtgctgaattaacgggcaagcacaaaagagaactggaaggcaatgacaatccttctcccataatacttataaatatctctaaatggttgaaaaaaaataataaagtccccagactgctttcaggatgagagccccatggatgtgaatatagagccttccagcactactaccttgaaaacattcatgctgatgtgtaagcatcagtgttataaaacttaatattcttaactcacagtcatgcttgagaaataattcctaaatttattcctgagggatggcttttaaaacttttggtttacaccctagtttcacagaaatagtaaacaatactttacatttctatggtttcagatttaaccaggcatcttcacagaaacataataaatgaatttatgttaataaatgctttgtaaagtatgaactgatggtaaccatagacttaggaacttgataatttaaagtatcaagtctgagtaccttatcttttatccaaccttttctgcttctttgttcctaacttaggggcccctaagccaagcggggatatgggcacagccctgtgatgtcaggagaacagcttcccaggcaacaggcaggccagttctgttgcattctattctatttcctctggaaacaatgcaagaactgcagggcatgctgccccacccacccagcaaaacctctgtgtgctctaccaacatgcttccgtgcatttgaacgatgaggacctgggaggaaggggacaaaccctcttcccccgcactgctgagcacagacgcaaaaaagggaccctccataacgagagcccccacccatggatggagaggtctggcccctcaccacgtccactgcccctccctctgctcactatacttcagccactctggtccagaggaagataaaatcaaggaggagccagcccagctctgcaaactcaggagaggcaggctacacatgccacatgcccctggtgacacatactggctgtatgggacccaacaagagaagccagagggtgatctcataagtcccctagtggcttaattcaatgcacagaagccttaagtcatgagcagcagggtctcaactggacccaaccacactgagtgctgtggcctcggcatgtgaagaggctggctgaggagggtccctggcagtctgtctgtctgtctgtggaagtgaagggtctcctgggataacacttggcctagggggagagacaggaggtgggaacagggccatcaaggcaacatggaaagagctacttccccaggaaaattctgaggcctccaccatactcatcatggcttctggggcgtgctgaagacttggcactatggcacctcacagccacagggcaacaaggcagcagtggtgcccagggtggcggaggcagcagtgggactgcaggcagcagaggccttcagtgtcatggacatgatggcagcagccatcccagaaagtgcctggccaggtagagaagggagagagagatggcacattagctaggcctattcatttgcttcactccttggggacatcaggaagaaaagaggggaacacagaactttgctggagcttctctagttgcagaggatgcaggaacaaaacctggatcatcgccgcatggccctaactcacatctgcatcccgccgtgggtacccagagtcgtggtggatatcccctccactgaacagggaatatccatccactcgcacatgcagcgggagtccgccattgctcagagcaccgtgagttctggatttccttattgttgccagattaagttaaatcactgaatgtggctgatttcttttttgttctcgcattcctgagattttcttttctaacccacaggctttagcaatattcctgcagtgccagctggctaatgaaagcaactgctgtgctttgcagggttaatttattcagtgcctggaatatgccctatccttcgtcagcatcaatcgcttctagcattgtgttttaaatatacacaggaaccacaaatacgacggataattttgcaggctgctcctgggattaccttgtcattacacgttccttgcacaggagtaagtctacaaggaacagcaagtacagcaactgctgtgcgatctgtttccagcgtgagggacagaaacggttatgtaacagcacttccgctgccccctatggatgtgccctttatgacacagacacatctgactttcaaaataaagagggacagttacccccgaccctcaaagagcacagcctgagccatgccatgaagccacctccacctcctctttgttggaggataaggcacaccaagtgctcaggcccctgctcccttctgcccactcctgccagctgtcttgcactttgaccccaggcacagcaaatgaccagcagctgcagggatgctgagttctatcatccagcctccaggcctgcccaaggccactctaagcccagaacaggcttcccagcctgaactcctgcttttcacttaccctctact

SEQ ID NO: 1244776 - DNA, 4001 bp, Homo sapiens
ccagcatttaaagtttttaccacgaatttctagccaggcaaggtggcatttgtctgtagtctcagctacttgggaggctgacggaggagaggtgctggagcccaagacttcaaggccagtctgggcaacatagtgagacaccatctcttaaaaatgccctaaatccggtatcttcatttgcagcaaatcagagttcccattctgaaatgatatgcattctttgaaaaatacaataaaataagtcactggcataaacatattctttttatgtcctatccatcacagtgctttaaaaagtaaggtcactaaaaaaattggaacacaggcatccaatcagtcttaaaagctgtaacaagagtaactcttttcacaattttaacacaaaggaaataatacacaggggttttcacaatacctggacaagcatgtaactaatgagaagtgtttttaaaatgttaccaatcctttaccgaaccaatcctttaccaacagggttatttataacaagtatattatttttattttatgcatatttcattttatgaatatgcttattgttggttattctgcccaaaaaatagtctgaacaagtgctgtgtaactaaagtcacctctaggcagtaagctggcccctgaaatttttcttcatagtattcctgtgaagaaacttggacagcccgtccaagttttccatcctggctgtggtaccagtccaatgtaccccaagtgtcagggaggcacccgcctccaccccaccccgaggatagggccaaggtggggcggctggggcgctgggagatgaaggagaagcaatgcgcagaggccaggacgacccagcgtcctacagcacggcacccagctccggaaaaggtcactcggacaagtcgcttcacctctcagagcctcaaagtcctcattcaaattaaaattcaaatattacgcctttggaaaatatttacagttctgactctcccacagaaacacatacctgtcaccggccccccacccccacaaggactccagagtcaggtcaaccacctctttcctatcagccaagatgccatttttcaggcaaaactaaatcccttttgcttcacgtgacagtccagaaatgtttcgttttgtttttaaaagcaaccctgcttatcggcatctaactctgctgggggccgacatgagctaccagaggacgaaaactacggcccaactgactccacgaagctcactcaggactgaggaagtaaaaacgggataaccagaggcgcgcccgacaccccagaacaagcacggactattctgggttaggaacagtcgcggggcagccctggcgtgagtgtgaggggcagagccgcgggcgccacaaactgcggggccggcggccgacagggagaggccgcggggcacgccctccccgcaaacgcccggaaagtccgagggcggcctgcgcgctcaggagacctggtctaggcgcaggccaggcgcggagtggggaaccccgcggcagggacccagcggtgcctgcccggcggccccggcgcccaggtgcgcgttcaggacgagcagcgttttctggtcgcggcgtcggcacaggtaatttcacaatcccaagcggcgcattccaacgacaagaatcacaccccaggaccttagcctttcgctcgccccagtcggcgccgcgagccggaggcggtgggggaagggcgcctggagggggggtggggttgcggctgcggcgcgacccccgccagccgcacagacctggttccggatcctcgggccgtcctgagtggttgcccatgcttggccgactcgggcaccagccggcttgccggcctcggaccgggtgtccaccgtgccgagctcgcgctggctccggctggcgaggcggttgcgtccggcgggtccgctccagtcaaagaaaggaccgggcgccttccagttcccagcagctgccggcggagccgctgctctcccgcgcccgtgggccccgccccctcatctgcatcaagcccgccctcgcggcccgcccccttcatctgcatcctgccggaccacctcaactgcacaccgcccgccaggcgcggcccgcccccgtcatctgcatactgtccgcccacctcatctgtatttccttcttggctgccagaaggccccgcgccgtgggcgggacgcaccggctgaccggctgcaggcctccgcccgcggatgctgagaaccgcagctgcacaaggtaggctggaaaaaccccactgcggtgaggcggaagcctagtgccgccggaaaggcaaaatcctgctcgtgtgaagctagacctatcaggacaagagaaacctaggactagcgcaggacaggcgcttaataagcatttctttgggtgaatgaatgaatggatgaacaactcgaggaggtggtgaagaaaaataacgctaacaaagacgtactcacccaaaatgaatactatggctaataataaaaatgcataccaatcgtaagtagaaactgttctgccgctgtcggaaattactaaaatggaaattaccctgaacgactttcatccttcatctgacagtgaaaacacttagaacaacgaaatcttgcagtaaaaatatttaggactaaaaaaaccattagtggtatgactggttctatctcgtgcatcacttgaacactacggtccattctcaggtgtcacgcatcaacatcgtaggacaccactgattactcctaacgcctccaaacagtgtgttcacttggttccaggatgctaccctctcctagttttctgctcactcccctagaagcctcttcccagtcccctttgttggttcctcctcatcttgacccaccctgggcactaaagctcagccaacagacctctttcctatatactctcttggtctttgatttaccaacttgtggctttcaaataccatctacatatctccaggctggttccctcttctaactccagactcatttgtccaactaccttcttgacaccttctcttgacacctccacttaggttttttaatagtcctctccatctccataagtggcagttccgttcttccagtgactcaggccagaaacctcgactcctttcacatgccacatctcgtccctcaacaacgcctgtcagtatgtgtatcataaatagccctacatctcagcacttctcacctcctccactgctacccccgatccaagccgctgtcatctcctgccaggattactgcaactgcctcctaaccagtctcacttctcctgcccttgcctctttatagtccattctgcacatacagtgagagtgatgcttctaaagcctaggtcaaatcatgtcacacccccacttgcaacgctccagtgtctttctgtctcacttggagggaaagtcaaagcccttacaatggcctccaaggccctgaataatcctcctcttcccccatcagtgaactcaccttccccttctcacattgctgttgctacaccggcctcctcactgttcctcaaataagcggggcatgttcccatctcagggcctttgcacttggtgttccctctgcctgcaacattcttcctcccgacacctacactgcatagaccttatgtctcaccctctctcactccctgggcctttgctcaaatgtcaccctactaagggggcttctctcatcgcaccacattaaatagtaagccagaccctcagcacacaccctctcctactttgctggcctctgtgacactgatcaccattccatatactacatgtttactaattattgttcctccactagagtgtaaactttataaacacagagactcggaacaaatgaatgaaaacaaatgaatgaaccaatgtataggctgcaggcagcagacacaaattagcccttaaatacacattacttctttttagtggtagtatagtaccatgagttggtttctgccacaaaactagcgtgtcaaagacaagagtcacagttttatttctgtaatctat

SEQ ID NO: 1244777 - DNA, 4001 bp, Homo sapiens
aacagaaaaactgagaaaaataaatgatcatgaaaaaaatgaaaaggtaattaaatactgatattaactgcctaaacaacaccagcagcagcccaggcagtctgcagtcaagttctgccaaacttgagggaacagataattcttctattccagagcatagaaaatgatggaaagtttcccaatttaatcagagaggacagcctgatccttgttatgaacacagataaaaatggggtaaactatatgccaaactcagataccaaaaccctaaataagatgctagcttattgatgtgaacaatccaaaagtgcattttaaattagcccagggttttagagaaagaaaatctagcaatgtgaccaccacttatgttaacaattttaagacgaaaatctacatgatcatatcaatgcatgctacacaaaagcatttgggcaaaaaacccaacacccacccttgactttttaaactcttagtaattaggcataaacagaaatgtacttaatgtgatagaatacactcggtgaagatacagagggaatgctccctaaaaccaagcccaagacaaagattcctatttaacctcaatagtcaacactgcagcgagagtaatctatggaagacaaggaaaaaagtaaaaacatgagagacatctgttgtttaacagacaataagatcacctacttggaagaggcaaacgaatcaagcgaaaaactattaaaactgagacaggctttagtatggaggctcagcttcagctgtagtttgggctaccaaattcaactcgcttgcttggagagttaatcctgcaaagctaatttctgttgaggtattaggattgacaagcctgtgctcctccctcctcccccatcttcaacactgaaataacacggtgtttggaactggataacagaatcttccaaaaacaaaaattgtcctgaagggctgacttgtgcccttactcaaaaaacactttatctgctgcctgcagctcctacagttgctggtggataagcctgccaaccagctcggcgtaattcttcctgcagagggcaaggaagagcactttcacaggaaaatttttttccgaactgtatgccgcttattacataaacttacgtgctggcaaatggagctccagcaaaataagatattcagagtcaaacttccttaggaaaaaaaaaaaaaaaaagcaagcacataacactaatttccttgcatgggcactggggaaggaggtcgttacttccgcacgcccgcaggtccgcaccaccgggaaacccacgggcaccgcgcgctgcccccgggccttccaggtgcactgcgccgcggcgccccagctgacccgggatgcgcagccctagcccttcccctgtcaccccggccaggaaggggcgggagcgcggcggacgccgagggcgaagggcttctcggtcctctgcaccacgcagcacccccaaggcacaacagggagggtgcgggaggctcccgagacccaggagccggggccgggcgtgcccgcgcacctgtcccactgcggcgagggctggggtcgcctccagggccgcagctgtcgggagccacctggctctcagtcccgggtccctgcgacaaccctcgggcccggaggggaggaggcggccacctgccgctgccacctgcggcaccggtcccaccgctccgggccgggcaggacaggccaggacgtccctcctgggctggggacaggacacgcgacgaggggaccggggcccccgcggcgaagacgcagcacgccttcccagaaaggcagtcccgtgcccccacgacggactgccggacccccgcgctcgcccgcccatcccttcagaccacgcggctgaggcgcaaagagccggccggcgggcgggctggcggcgcggctagtactcaccggccccgctggctcagcgccgccgcaacccccagcggccacggctccgggcgctcactgatgctcaggagagggacccgcgctccgccggcgcctccagccatcgccgccagggggcgagcgcgagccgcgcggggctcgctgggagatgtagtacccggaccgccgcctgcgccgtcctccttcagccggcggccgggggccccctctctcccagctctcagtgtctcatctccctatctgctcatcctctggtcgcacataatcgatgtttgggcgtcccaagccagatgtggaccccatttccgcactctacactggaggttttctaagggtggtgcccggaccagcagcttcagcctcatctgggaacttgagaaaatgcagattctccgtcccacccagcctattcggtttttcctgcactaaaaccatgaaggtggggcccagcagtccacattctcgcaagcccgtcaagtgattctgaggcgccctccagtttgagagctatgctcacggcctcacctccgccccgcaaggagcccggtcttgcctgtggcgctagccgcacacggacacctcatcctgcggggcccgcccccccgctgcaccctcaccgcccaacgcctcctccgggatgcagcggaggcgcctggaagtcggcaaggtcaacatccccctcagcatcttccctaccctcacggctcctcctccaggggtgcctcatggccaggggttagaaagagccactgtgtttcttgacatggaagtggcctaagaccttaatgaaaactgcaggagtggaatgacagaacctttggtcatacttgagggcgtgaagctcaaatgaggaggaaggaaaggatccagggagaataaccaaccctggcaagttgtggcgcccaggtagaggggcgagcctaggctagcggttctcgaccagggccggtgttgcccctcctcgccgccccgcgtacatttggggaggtctggagacatttttggttgtcatgatgcgggagttgctactgttgcctaagtgggtagacacgagggtgctcctcaacatcctacctgaaggacaggactgccccacaaggaagaatgatccggccccaaataagaaaccctgggctggtcagcaacaacccctttgttctgagaagagaggaggaaagaataaaagaagtggggtgaagttttggtttggtagaggaaacttgaagacattttcactggaaaggaagagaggaagaggagggagatgtctgtaaggacgagcaaaccgggtgacagctgatttcctcatattgaagtaatgagtcctagttataataaattcctaataaaaacccagtttatccctgcaataaacttgtcttttttttttaaatatactgcttgattctgtttgctaatattttatttacaggctttgcattgatatgcaaaaatgagatgggcaataattttctttttgaatgtctaatgttgtttggtttcagaatcaatgttatgctcacatcataaaaaatttggaaccgaggcaggaggagtgcttgaggccagaagttcgagaccagtctaggaaacacagtgagacccccccatctctacaaaaaaaaaaaaagaaaaaaaaatgggcatgtttgctttttccttttactctgaacaatttaaggagcattaaaattatctattctttgaggtttgatcatttcccagttaaaaatgttcctcccagcctgatgctttctttggggagggtaaatcttttaaggctagaaaagtttcttctgtggcaattttattatttacattttaaaaattattctagagttaattttgataaagcatgtatttcttaaaacaaattatcctttttttccagatgttcaagtgtatttgcataaagttgaggaaagtagtcttttgtgaatcttttaacttctcccaaatatcttattttgtgtatttttgcttctttattttgttaacttttaaaagtgtatttttttttcaaagaatcagctcttaggtttatgtttttggttatactggagcttttttcttcttctttttaaaatat

SEQ ID NO: 1244778 - DNA, 4001 bp, Homo sapiens
tagtgaaacccaatctctacaaaaaatagtggtgcggctggggtggggtggctcacacctgttatcccagcactttgggaggctgaggcgggcggatcacctgaggtcaggagttcaagaccagcctggccgacatggcaaaaccccatctgcactaaaaatacaaaaattagcagggcatggtggcacacgcctgtagtcccagctactcaggaggctgaaggcaggagaattggttgaacctgggaggcagaggttgcagtgagccaagattgtgccattgcagtccagtgtgggtgacaagaataggactctgtcttaaaaacaaaaacaaccccccccacacaaaaaccaaccaaccgaacaaacaacaacaacaacaacaaactagtggcccatgcctgtagtcctagtgactcaggaggctgaggtgggagacagttgggactgcagtgaactgtgattgcaccactgcactccagcccgggcaacagagaagaccctgtctcaaaaaaaaaaaaaaattgaaaacaaggtagaggcaggtaagagccttggaacccagaagggcctaggaaaggctgaggacagggacaggcctgtggggcaaaaggttaatgagggtcctcagggctcagggccctgtggctagggagagcattctcttcacagccacagcttctaggtgctgtgtgggccctggcaccccagcaccaccacagatcacctcctctctcctttttatttttttccagtcacctcccagttagggaacggtacacccaattcttgcttgtctcctcggcagtgctggatccagaggctagggggtagcagccggacagggcctccacctcccgggtcagttcccgaagccgccgtctcatgtcccgggcatcatacactattcggcctgaggagcggtgccgggaaaattcagggatgactgctgggcccagggtgggagctgggacaggctggtactgagccgcctctgcctctggcaccgccccctccccaccgttcttgtggctaggagcctcagggctgggaggtggggggttcacaggatacacataggcccttaggcccagctcggaccatatgcctgttttgaggggcctttcctctacggtaggctggaagcggatggtctggggaggggactctggggcatcctgagaccagggaacccaggtcccctgagtgtgttggaagccttcccagtcctcagggacatcccagtggtaggagcagatggctgggtactgatgaggcttctcgtcatcagtgtcaggagcccaagctactgggcagtgagcacagcgtgtgggagagcctcgacggcgatggcggtgagctgggggcggggacacagtcatcatcacagggtccatggtgcaccgaagatggactgcaggagaactctgcttcttagggggctgggtctgctttctgagtaatgatgacttgggagcttctgtggatgggggagaggtgagactagtggggaggccagctcctacaggcatggagaggcagggcccaggaagggcagccacacagctatgttgtctgagaggggcgagcaagaagggaaggggctaatttagggctgaggctagagcacttggtttctgcccctcctatgtcccagcccccagacctcttacctttctcacaaatggtatcatggaacacttggtataagacaccacggaatcggctccagagctaggtgggggaagacacagtgatcccaggtaggccctggccggcaggcctgccccccactatcccaccagctccctcccatctggccccaccctgaccagggtcactatattgatgctaatgttaatgcagatgatgaggcccagcagcaacaggacagagttgcccaggtcctggcagctgttgctgttgcagttgtgatacgaggcccactcgggcctcggccgctcaaccatggccatggggtccctaggaccaccggggcccttacgcccccagcccaccgtgccgacagtgtccactgactgcctgcctgtccctgagggtcttgggagtgaacgggtcacaatggtgccaggccactcccttccagtgtgccaaggggctaccctgagtcctggacccgtggctgaccctctcgcctgagtccaggccttggcagaggccatgcctctcacctcacatacctctgctgagctagctgcctacaccagcccactgggcctctggcctgtttgacatctgcccccatcagcctttgtccttccattatagaacgacaccaggctccagtctcggcatagacacgggtcctgacattcatttgccaaacagacccattaccatggcaaccagaccccagcacacactcccccttcctctcagacctcagagctggtcactgaaaagacccctcctccctcgtcacttccccagggcttgtttctttagagaccgccctccccacaacagagcaggcacaaccaacagttaaacttttatatttacaatattctcttcatcttttgccaggtttaaaaatgtgtacagagccgcaaagggttggggtagggataagggattgtcgggattgttttggggagaggagctgggcattggagtccgtggctgaatcatggggtcccccagcccccctcccatgccccaattctgagggcatctgtctacagggttcagggcccaggtctctagcatttggagggcatggctgtttggagaggagctagaccaggcaggggaaaggatcagaaaataactaattttccatggatggaggtaggaagagaagggacagtcaagaggcaaagttctggggactcaagaccagggattctggatttgggtgtcagtggaagacagcaccccagcccctattcaagtttggcactaacaccccacaaaatgccagcagatgaggactctcccctcgtccactgtgtcccttaagcccttccagacatcattcttttcccaaatgcccaagcccaaggccctccggggagtcacctcacacatttcaaattattcctgctggtgtctgcccaagccctgtccccactgccccctccatctgttccccagcaccgctgacctcattctcccaacctgtccggtgagacctttctccccactgcctccctccaccattcaaggctcctttctttcagacaaggagggggcgtgggtcagaggagggtggtcagctgaggagaaggctggtctgacactgagatggggacagcttcaaagagggggacggagatgaaggggaacggagaactgaggcagggtgggggagacatggtgaggagaaggggcacaggcgggagccccctcacctgccacatccctcgccctgtatcctgcttgcccttagtttcccctgccctgcctgggactgggaaattcttggcacattttgggagtctttccgctcaaatccacctacccagtttggcacggatgagcaatgctctgaggcctggggaaaaggctgtcctcggaccacaatgagggctttggtcaaacatgcgtggcctctgcggggggcacgttgccacaccccctccccccaactcgggagcaagggccgggcctccctcggggtttgttcaccctcctcagctcctgccaactagaagtctgtgctcacctgccatgtgaggaggaactgggtgctgggcctgaggcctgggggaggcagggaagtgctgggaagagaggggccgtctgcctggggaaacacacatccacatgcaagaacctgtttccactcagagaaatgcgtcctggccacgggaaaataagcttccaggcagcatcaggatgcgtggactcctccctcccccagcaggaaatctgtgtctgtcctctctggaaggtgagggcctccccggcagaacgtgcttcatctgacttgtgccaaggggggcgtcggggggaacatgcttcgccggggtaggggc

SEQ ID NO: 1244779 - DNA, 4001 bp, Homo sapiens
gaaatggaaatgatctcagcctatgggagcttagacaagaaaacccccgcggtagaggagcactgacgggaaacaggcctactctggccctgggctctcacccagcataatggttcaaggaagctgccagcgcgttgccagagcctgctgggaggctacacaggggcttctggatggcggtctcccagtcaggccgctccatgagcccgttcaccacctgttgaagcacacgtggcctcagcctgggacgcaccgcgccaagccccaggcctagccgcgcagtgcggtcctcacctcgtgcatcagcccgtctccagacatgaccaccagagcgtcccagcggcccagctcctccgaccgcaccagctcccgcgcgtggttccgccgctctgcagggagaccggcagctatcaggactgggggggtcccctgccaggggatgctcccgaaaccccctccgagaggtactcaccagtgagcatcagcgtgaaggagatttcagcctcagccaaaaggggctgcacgtgactccggaagagctgcaaggccttgcccttgccgccgcgcgggttcagcagcaccagcacgcggcagggccgcgggagcacgccccgggggccgcccgctgagaaaacaaaaccaaagaggccacgtccgcaaccgaccactagggggccacgggtaacaatggggcactagtgtgggaacttggtgcccgaaacaccccggtaattgaccctggccagaggagcggcctttgctgggagacctggggtggggacgcggcgcccctgccacccccttccttggctcagattcggccggcttctggcctcgtgagggataatgtttctcccgatcgtccacagcccctttcgtccagctgggcgttccatcattcctggcgaggaacaggaatccccctacagcccttcccagcaggaaccccacaaacctggatccataacctcgacccgcggctcccgctgccagggggtccctggcgctgtgggggcgctgcccgtggcggcggctcctgccttcagctccttatcggtgctgcccaggcgggcgtcgcagggccggctgtggggctcgccttccccgcccggagccgtggctgcaggagcaccggcgtcattccctgcggcggctggacctgagggagagaagacagcgctggcggagtccggggccgcagctgccagaggtggggagcgcccgactaaatcccgggaccacgcgcggggagccaggttcccgggaagtccagagagctgaggtccggtgcctccgagggcgcccccgccgtgtgactaagcctacaatccctgagaagggcgcctgctccggggctttctccctggggcttggggttcggttccggcccgacggatgagtcagagccccgtggctccctccgacggactagctcctcacccctcggggctgccagggggaggggagtccagctgcgtaaaaatcccagaacttgagcggacattgctgggcacgaagttctgggagaggatccctgccccagccatccaggttgccgtgtcccctgcccggagctccagagcggtgggagccgcggcgcgcgcttctcagggccccgctccgttgcgacgcgcgcggcgctcgtgggagccgctcccgggtcgcgccaaagccaagcccgaaccgggccaccagctgccgcctgctctcgcccaagcgacaagtggcccagttcccggggccccgcgagggcgggccgcacaggagccacgagcggcgcgaaggcagggtgggcggccctacccagtcggtccggtttgctggggaggcgccaccgccgttccctacagtggcctggggcggaacgcagctcgtcccaagctcagcccacgtctgagggactggagcgccccgctggagcggactccccggcctcgctccctccggcctcaaacttttcgctcaacttcgcagccggcgccgcggagcggggagggcactgagcctcggcgccggcctggctccgccccgcgctcccgggggtggaacctgagcccggcgcggcctcggcctctgcccgcctccggcctcagcgcgccgcctccggcacggcccgcgcccacggccgggccacgagctggttcccgcccgggtcctaggaagcggcaagcgcgcccccgccgctcgtcctaggcgtctggctagaaggcggcgccgcgacctggccgggtgagctgaggcggcaggccgcgaggcgcggagtcccgggcccggccgcgagcgcagtgtctggggcgcgcgaaagcgaccgcgcagcgcagacggaggcgcgggctccgcgcgaactcgtgtcggagcgagcgccgggcgcgcgcggctccgctctcccgggggacccttggtttcacctcgacgccacgacctcgcccccgcgggtgctgtcggcgccgggatgcagcgccccttttgcgcgctctgccctagcccacccgaaattcgaggcccgcacgccacccggggcgcctctccaggccggggcgtctcgcccgccgcccaccagcttccctctttcttcctcccccgcgctcccacggaggttatttttaacttcccgacgctgcagctgggctaccgagcctgaggccgcctagcgcgctgtcccgggtagagcaggcgacaggccgggggctccgagccggagaggaggcttgacagtgtagatgggcctgggggcccccgtcgggattggaaagccaagcatgtggtacgtgccccccgccccctctggctcagcgtgaagaaggggcgccggaaacgcgctcagaagttgtcacttctttggaggccagtagggacgcgtttgtcagtgtgtttgtgatacacttatcgcggcaagccacagaacgtgtccgcgagcacctcgagttagatccctggggggttacggcggagacggaggaagaagttgccaaggcccattggtgacctgcccaggtagggccagagttaggagaaaccaagcccctgcgggaggctgcggggctcgcgcgcccccgccggccccacccgcccccacacacctctctcatcgcttcttaaagtcgagaagaggcaggtccaggaggagcacgcagccaattagccgggcggcgccctgaactccggcacgcctccgcggtgtcttctcttccggaggacccaggcagctcggccccgtttcccaacacttggggggtcagacgggcgggacccgagagtccccgggcgggtcggggggcactggctgggacgcggggtccctggggccgcagctccgcgcgcgtatcggcgggtgcgccttcgccttgcgcggcccccgggcagtccccgctgggtccagagcgtcccgagcgcgttccgggaaggtgactcagcgacgcgctcaggggtcgaaaaactccgagaaacaggaacgaggggagggagcaggggcgtcatccccgactcctggcgtcgcggcgcgtgtcggaatgatgggtcctgcacctccgagccccccacccccttgctccaggaatccggcgcgggcgggggagagagccctgcagccgcagtgccgcggtcatgcgctgcggggacgcgagcggcggctgtgggaggagggggctccgcgcgggagcccaggaccagatccgtccgcccctcccctctcctctgccttcttcccctcctcttcctccagcgagggactttggtgcctagaaaacgcgaatcggaggctgtgctccccgagatctcagccttcgagggtactggctgcggagattagctggggcagccttccccgtctgctccccgccccggagagcatttccaccaaatctgaaaagctctgtcattagccatagagtctgaagaggggaaactgaggcacagggaagcactgtgagttcgtggtgataaagcccacctggttcagggtcccccctttttttttcctcctggggccccagaaaggtcgg

SEQ ID NO: 1244780 - DNA, 4001 bp, Homo sapiens
tagcacaaagtcctcgtcgggcaccactgtccagtgagagggcactggctcctccagtggcacaaggtgtgcatctaccgggccctgctggaccacaacgggggaggcaggtgtcttggaacccactcttcctacagggaggtaggccagtcggccgcggtaggtgcgcagggctgccagacgcaggaaggtgcccagagtgaagcgcatctcccccagacgccgatacttctcactctctaggtccacatcagcaatgaagccccaggccaggctgagcacagagaagaggcgcagccccgaagccgtgtgcagagacagcaggttcatgggtgacagcagccggcggcacagcaatagcgtgcagttggtcaggaggtcttcattggtgacctgctcatagctgcagggggaaaaagtcagataaggcaggacaggagcccccatgtatcccccgcttcctcctcccggggagtgggagctggcaaagcgccatgtggtccctggggagttggcaggactggtaggtgacagatggagcaaatggaagcagtcagctggggtcaccaggagagggccccaggactaagggagaaggggaaatggaaatgatctcagcctatgggagcttagacaagaaaacccccgcggtagaggagcactgacgggaaacaggcctactctggccctgggctctcacccagcataatggttcaaggaagctgccagcgcgttgccagagcctgctgggaggctacacaggggcttctggatggcggtctcccagtcaggccgctccatgagcccgttcaccacctgttgaagcacacgtggcctcagcctgggacgcaccgcgccaagccccaggcctagccgcgcagtgcggtcctcacctcgtgcatcagcccgtctccagacatgaccaccagagcgtcccagcggcccagctcctccgaccgcaccagctcccgcgcgtggttccgccgctctgcagggagaccggcagctatcaggactgggggggtcccctgccaggggatgctcccgaaaccccctccgagaggtactcaccagtgagcatcagcgtgaaggagatttcagcctcagccaaaaggggctgcacgtgactccggaagagctgcaaggccttgcccttgccgccgcgcgggttcagcagcaccagcacgcggcagggccgcgggagcacgccccgggggccgcccgctgagaaaacaaaaccaaagaggccacgtccgcaaccgaccactagggggccacgggtaacaatggggcactagtgtgggaacttggtgcccgaaacaccccggtaattgaccctggccagaggagcggcctttgctgggagacctggggtggggacgcggcgcccctgccacccccttccttggctcagattcggccggcttctggcctcgtgagggataatgtttctcccgatcgtccacagcccctttcgtccagctgggcgttccatcattcctggcgaggaacaggaatccccctacagcccttcccagcaggaaccccacaaacctggatccataacctcgacccgcggctcccgctgccagggggtccctggcgctgtgggggcgctgcccgtggcggcggctcctgccttcagctccttatcggtgctgcccaggcgggcgtcgcagggccggctgtggggctcgccttccccgcccggagccgtggctgcaggagcaccggcgtcattccctgcggcggctggacctgagggagagaagacagcgctggcggagtccggggccgcagctgccagaggtggggagcgcccgactaaatcccgggaccacgcgcggggagccaggttcccgggaagtccagagagctgaggtccggtgcctccgagggcgcccccgccgtgtgactaagcctacaatccctgagaagggcgcctgctccggggctttctccctggggcttggggttcggttccggcccgacggatgagtcagagccccgtggctccctccgacggactagctcctcacccctcggggctgccagggggaggggagtccagctgcgtaaaaatcccagaacttgagcggacattgctgggcacgaagttctgggagaggatccctgccccagccatccaggttgccgtgtcccctgcccggagctccagagcggtgggagccgcggcgcgcgcttctcagggccccgctccgttgcgacgcgcgcggcgctcgtgggagccgctcccgggtcgcgccaaagccaagcccgaaccgggccaccagctgccgcctgctctcgcccaagcgacaagtggcccagttcccggggccccgcgagggcgggccgcacaggagccacgagcggcgcgaaggcagggtgggcggccctacccagtcggtccggtttgctggggaggcgccaccgccgttccctacagtggcctggggcggaacgcagctcgtcccaagctcagcccacgtctgagggactggagcgccccgctggagcggactccccggcctcgctccctccggcctcaaacttttcgctcaacttcgcagccggcgccgcggagcggggagggcactgagcctcggcgccggcctggctccgccccgcgctcccgggggtggaacctgagcccggcgcggcctcggcctctgcccgcctccggcctcagcgcgccgcctccggcacggcccgcgcccacggccgggccacgagctggttcccgcccgggtcctaggaagcggcaagcgcgcccccgccgctcgtcctaggcgtctggctagaaggcggcgccgcgacctggccgggtgagctgaggcggcaggccgcgaggcgcggagtcccgggcccggccgcgagcgcagtgtctggggcgcgcgaaagcgaccgcgcagcgcagacggaggcgcgggctccgcgcgaactcgtgtcggagcgagcgccgggcgcgcgcggctccgctctcccgggggacccttggtttcacctcgacgccacgacctcgcccccgcgggtgctgtcggcgccgggatgcagcgccccttttgcgcgctctgccctagcccacccgaaattcgaggcccgcacgccacccggggcgcctctccaggccggggcgtctcgcccgccgcccaccagcttccctctttcttcctcccccgcgctcccacggaggttatttttaacttcccgacgctgcagctgggctaccgagcctgaggccgcctagcgcgctgtcccgggtagagcaggcgacaggccgggggctccgagccggagaggaggcttgacagtgtagatgggcctgggggcccccgtcgggattggaaagccaagcatgtggtacgtgccccccgccccctctggctcagcgtgaagaaggggcgccggaaacgcgctcagaagttgtcacttctttggaggccagtagggacgcgtttgtcagtgtgtttgtgatacacttatcgcggcaagccacagaacgtgtccgcgagcacctcgagttagatccctggggggttacggcggagacggaggaagaagttgccaaggcccattggtgacctgcccaggtagggccagagttaggagaaaccaagcccctgcgggaggctgcggggctcgcgcgcccccgccggccccacccgcccccacacacctctctcatcgcttcttaaagtcgagaagaggcaggtccaggaggagcacgcagccaattagccgggcggcgccctgaactccggcacgcctccgcggtgtcttctcttccggaggacccaggcagctcggccccgtttcccaacacttggggggtcagacgggcgggacccgagagtccccgggcgggtcggggggcactggctgggacgcggggtccctggggccgcagctccgcgcgcgtatcggcgggtgcgccttcgccttgcgcggcccccgggcagtccccgctgggtccagagcgtcccgagcgcgttccggga

SEQ ID NO: 1244781 - DNA, 4001 bp, Homo sapiens
gagccaaggggggttgaaagcaggaatggggggagggggaagcctctgccctcccatcagaattcttcccttccatttgacacaaaactccattcaacagacggggagactgaggcccagagaaggcaccaggtggcatgtggtttatgcccgggctctcttccctcaattgccgcaaagttctctttagagtctgtccaaaaataaatccttccctctctcctatctcctctctctctctgttgtgtgtgtgtttgatagctccagattttactaagctatagttacgcaggttctgggccagcatgccaggcacacagtactgctctcctcctgcagggagccccttcctatgccagtctggccaaagtccttccctctcaaagctccaccattcccaaccagtagcagctcagtctagggcaaattcttacccctagacccacccctaattgctggggaagggagccagcagaaggcaattccagaaccacgtgcgtcccccaaaggcccaatgatcaatcaactcacaaacgggcaaacagacctaaacacacgctgagactggcccaaggtcacacaccaagcacattaggagcaaagctggggctagaacccagttgttctatcgatcccaatcccgtccccaaggctgattcccagagatgctccctgaggatgaggctccacgtctctagctccagaggcctgcgccctaccctacaccccaagcaccatagagcagggggaggcgtctccaggcctctgtacagggccagctgcaaaccgcagcctgggtccccaggcgccgcggacccgccccgcccctccctccgctccccgcagcccggagcctttgtcagccacgcgctcacacacaaccgcgccgccacgcgcacacacacccggtctccctagcgcacacccgcaaggggcgcgcgcactcgccgcacgcacgcaggggggtggaggcggcggagaaaggaaggaactgacgggccatggacggacagacgacctgggctgggggaagggaagggaaggaggcccgggaaccggcagctggggtcggagggggcgcagagacaaggagacagagagacgcagaggagactcttggagaggaggacaacggatgggccgtcaagggctggagaggacgcgcgggctgctccaggggtggggactcctctatcccttggccccgggtgtgtatgagcggggagctggattgtacccgtggtgcacggaggcatcccttgcccagttgtgcctgagcagagggtccgtagggacctcacgtagggcctggagatagcaggcctgagaccaaaagctctctggggtacctccctcgaggcgggtggtgggatggggtggggtcttggtcctcgggctgggtggggcactcgctcacctgccacggtgtacctgtccaggtagttgagcacgttgcccaagctgaggatggcggcggctgccccccgcccgcggcccaagctggccggtttgggctgctgagcgccggggccctttgcagtagctgcgcagccgggggtgccgggggtgccggggggtccggtcggggcccgccttacgctgcccgacagcgtctgcacctcatcgcccgcggccgagactccagcgccgcccgcgccccgcgccccgcagcaaccgctaccgccagcccctcgctgcgccccccggcgccggcgccgccgctccgcgtccgcctcctcctcctccgcgccgcccgccgccgccgaggcgcattccaggcacatcatgccggcccggatcggggcggcggggggcgcggggggcgcggggcccaggctgggcccgctcagcgcgtgcgtgcgccgcggagccgccactgcaccatcctggtcgggccccgtcggctcctgcgctccggccccggctgcggcgctgccaccgctcagctcgctgcgcctcgttcgccgccgcggctctgacagctgcggcccggccccgcccaccaggcccgcgcccaatcagctccgggctcgggccacagccccgccccgcacgtgctgccctgggggtggggggcccggggactgggggcccgggcggcagagcccctcctgccaatgggggcgcagtcacgccggggccgaccggccgcgaacgcccgcggggagcgggagagggtttgctctggctacggagctgggagcagggtgctggtgacggggctcccagcacctactcagtacccttcacccaacccctgcctcgggcgtggactcccggcggaggctctgggagccgggctgagggcttgagcctagcgtatctgggagaactggagagaggagtctcagatggctaaagtcaggggcgccagttggagagccggtggctcctccgatactcacacgcccggatttaaccagttcagggagggcccagaacctagacctccaccagtcatggtgggctgtgtctcccacctccccagggcaacccagatccagcccccaacctaccccgggcccattcctgtgtgggcacccggaccctacccttgccccacagagtggcccgcagcccctggcggggagagcaagggctgtgattggggcccaacagaaacaggatattcagaaggggctttccctcctgagggaccacatctccaagcttcagacttccaggtatgtgctagagagggtacaaagcccccagtggcagacaggaggctgggtcctagctcagctctgccctggtgtgtggcatgatcctgaacatgacacccactctctgggcctccatttctgtatctgggggcagatggcaggatgggattcagtctggaaatccacgggtggtcacctccccttggtgggacggggcgggggtctgcctcctatggagagtggttggggtgcttctgtgttcctgacatcccatcacggtttcacccctccttagaggtgctgtggctctgtgacgatctcccccttccctcccccattcacctgtttggggaattaaaatcgaaattaaaatcctgtataaagtgcagaggacagaatgttagaactggacaaaccctcggaaaccagttaatcattccctgtgtttcacagacaagtcccagggcacggacgtgacccattacgaacaggcagtgaagctgtggcagggctggagctgccccaggctctggcatcatccccgagggctggagctcactccccgctagaggcttttccggaccccacgtccacaggcaggtgcatctggtgaagctttcggccacagtgagtcatggcatagccaacgggtgacacagcacgaggcaccccccccgcccccctccactgtctcttgtgagcagagttaatccccaagctggtgtttcttggcgccttcgaggtgtattttaaattctgcaaagtgactaaaaatatgcttcagcgtgctgggtatgaatgactgtgacgggagggttaggaaaacagatttcattctcaaagttgcctgctgcctctttccagctcgctgagctcaggcctgcaaaggcggatggggggagttccccatggtggcctggcatgacgggtgattaacaaacaaggacagagagctaggagctccgtggggctagaacccggccccagcaatgatctcgtaagtgtgtgatggtgccagcaggtggacagagtccagctgtgggaggctgcccagctgtggaactgtgtctagtggtgaaggaggcacaaccacaactctagacccaagcccagggtccccttcccgtgccccaaaactcctcatccctttggccacagtcctgtccaggtggacactttcggccttgacagaaaggggagcattctctttctgctgccttcccttttcaccactgggaaggtcccagagcaggggaagagggtggcatgagcctttcaaacctgggggacctctgagctgccaccaagcaagccagcccttcccactgtgtttca

SEQ ID NO: 1244782 - DNA, 4001 bp, Homo sapiens
agtctcgctctgtcgcccaggctggagtgcagtggcacgatctcagctcaccgcaacctccgcctcccgggttcaagcgactgtcctgcctcagcctcccgagtagctgggattacaggcgtgagccaccacgcctggcccctgatcagtcttgaatgaatgaatgagtgagtgagttagtgaatgagtgacagaagacagagcaggttgagccctgaagcctgcaagaaggaaggcaggacgtgtgaggtttgcgagcagcctgttgtcctagaaacacagccagcaggagctattcttgtctggcccaggctaccctgtcctccacctagaacctgggggcctctgcctggaagtcctgcctgctgtcctcacccacccacccctcattatgtctctggccccacccccactgtgccctcccttaatttttaaaaaatatttatttatttatttattttttattttttatttttttttttttgagacagagccttgctctgtcgcccagactggagtgcaatggtgggatcttggctcaatggtgggatctcggctcactgcaacatccacctcccaggttcaagcaattctctgcctcagcctccccagtagctgagattacaggtgcccgctaccatgctcggctaatttttgtagttttagtagagacggggtttcaccatgttgcccaggctggtcacaaagtcctcacttcaagtgatccgcccaccttggcctcccacagtgctgggattacaggcctgagccaccgcacccagccctaaaatatttttaattttttaaatagagacagagtttcggctgggcgcaggggctcatgcctataatcccaacactttgggaggccgaggcaggcggatcacctgaggtctggagttcgagacagcctggcatacacggcaaaaccccgtctctactaaaaatacaaaaactagcctggcatggtggtatgcgcctgtagtcccagctactcgggaggctgagataggaatcgcttgaacctgggaggcagaagttgcagtgagccgagatcgcgccactgcactccagcctgggcaacagattgagactctgtctcaagaaaaaaaaaaaaggccgggcacggtggctcatgcctgtaatcccagcactttgggaggccgaggcgggtggatcacctgaggtcaggagttcgagaccagcctgactagcatggtaaaaccccgtccctactcctcctctactcaaaatacaaaaattagccggatgtggtggtgcacgcctgtaatcccagctactcgggaggctgaggcaggagaatcacttgaacctgggagacagaggttgcagtgagctgagattgcgccactacactccagcctgggcgacagagcgagactctgtctcaaaaaaaaaaataaataaatagagacagagtctcactatgttgtccaggttggtctcaaactcctgggctcaagcaatcttcctgcctcagcctcccaaagtgctggaattacaagcgggagccaccatgcccagcctgtgtcccttcttagttgaggctggattgggaacatcagttggtcctccccgattcgagcacagctgaaaaccacctctagaggtgagaacaccagagatgggcccaggagcagaaagatgggtgatggctggaaggccaccatggatctgcagcccctggctggtgggcacagcagcaggtactgcccagggtagccatcccctcctcacctgcaatgatgaaccagttcatgtaattcaggaggttgatgtagcagaggacggcggcagccacgtaggccctccacgggggcaggctccaggaggtgggcgtgatgggagggggacactgcctgcctggccctggggactggccctgcagacctcctggcccaggctcagggcactccgctgacatccccccagccatgccagcctgcagctcttggcctgagactggcgccaggatgaagcaacattagctcagcacgaagtcacttcctgtggggtcccaggctccaaacctcaaagcacctgccctaactgttgggcgtcttatcgcaggttcctcctgaccccacggcagcttcaccagtgcgatttccccatcgtcagcctctgagacctgctacggaggacaagggctcctggcacccccaccctggggactggacaactctgtggtccccttgatctagcctgcagcttcagtggctgcagtgaggaagggaagcttccagggcaggaaatgagatgagcctcccagagtgctgcttgctgtgagatggtctagctgcccgtacgggactgtgaaccaatgccttgaagccggggcaaatgaggaaggctgggcattggccaggacagcagcattgcactcgactgccaggcaggatgagcacctacccaggatctaaggtccttcccggaaaaacaaaggtagcagagggggctgcctacaagaagacagcctgtgtgcaaaactcatcagtgggggctaaatctggggggaagacttcagtgaggggggagggtgtcagcacggtcacgaagcatctcttgatagattgcttattagtaacaaaaggaaaaagagtaactatacagtagaggaatcagacatcttgaccaaggggttaaaataaatcacctgtgagaggcaggagggtgtcgtgtgcctccagatgtgaaggtcttcgcaggtcacagcatcatctatgtggcattccagccaggaaggcacaaccggaatctcatcatgagaagacatcagccagacgcggtggctcgcacctgtaatcctaacactgggaggccaagacaggaggatcatccaagcccagaagtttgtgaccagcctgggcaacatggtgaaaccccattgctacaaaaataccaaaaaaataaaaaattttaaaaaaaaatagccgggtgtagtggtgtgcgtccacagtcccagctacttgggaggctgaggtaggaaggatcgccttagcctgggaagtcgaggctgcagtgagccatgttcgtgccactgcactccaggctgggtgacaaagcaagaccccaactcaaaaaaaaaaattttttttttaatttttaaaatgaaaaaacatcagacaagcccaaattgagaaacactatttctttaaagggactgtatattgaaaaatgtcagagtcatgaaagactaagaaagactgagggagctaggcgtggtggctcacgcttgttatcccagcactttgggaggccgaggcaggtggatcacctgaggtcgggagttcaagatcagcctgaccaatgtggagaaaccccgtctctactaaaaatacaaaactaactaggcatggtggcaggtgcctgtaatctcagctactcgggaggctgaggcaggagaattgcttgaacccgggaggcacaggttgtggtgagccaagatcacgccattacactccagcctgggcaacaagagcaaaactctgtctcgaaaaaaaaaaaatattctgagggactgttttggattaaaagcaacaaagagacaagataggccaggcgcggtggctcatgcctgtaatcccagcactttgggaggcccaggcgggcggatcacgaggtcaggagttcgagaccagtctggccaacatagtgaaaccctgtctctactaaaaatacacaaaaaagtagctgggtgtggtggtgtgcacctgtagtcccagctactcaggaggctgaggcaggagaatcatgtgaacccgggaggcagaggttgcagtgagccaagatcgtgccactgcactctagcctgggtgacagaacaagactccgtctcaaaaaaaaaaaaaaaaaaaagagagacaagacaataagacaattaagagcagtacaggatcccaacctcgctcctgtactggatcaactgataaaactggatcaggaagaaatagcatatcagcatctgtgaactatggtta

SEQ ID NO: 1244783 - DNA, 4001 bp, Homo sapiens
aaataccaaactagctactatgaagagctctaaaacgagaaatcaataaagtactaaatggataacaactaccccaaacctaagggtggggtagtcttacaataacttctacctctaaggaaaaaaaggtgagtttccagctctttcccaggaagatatatgcaccccaaatttctctgttccctgtgtgtcatctcttggttctaactgtaaccatggcaacaggaaacagcacaaaagacagcagaaccctgtaagggccagggttaaaaggggaagtgaaaaatacatatactttaaggcccaagaacatgcggttttggagttaacagtggcagccaaaaaagccttgagagaagaacatcaaagaatacaaactaaagagaattgaaagtaaggcttactaatagttcccttcccagttatccagctaggagacgggattggcaaggagaactgaaaaacacaaaaaatgcccctcctctcgcactcccttccccacaacaatttagctattcatttcaatgttatctagaaaatcttttgctattaagattttatcttttcttcactctgttttgatggcagaggtaagcagcagcaaagtatccaaaaaaagggccacatataatcgctaactgaaaacccaggtcctagatcactgaaatactattgtacttcaaagttcgttatttacatttctttttgttatctgccaacgtgaaagaaacatcacattacttaaaacctccactgaataagttattgtccaccaacagtttcagattgctttccgatttgttttcatgttacagagcaccaataaggtacagataaaatgaaaagtgctaaggaagatctttgaccaaaaaaaaggcaaataggtcacacaaagtaagaaggccggtgccctttatctctcttatctagttctgcgaattaagaattttactaaaatgaaatgcctcacttagttccatttatgacccttagtcttctttagcaaggcttccaaaatcccctgccagaataagtgatgggatggagcacccactcctaaatttagggtaagttggtactaaaaggtacaagcacaacgatgggagtataggaatggaaaagtaatcctagaactagaagatacagtgacagtttcaaaagaagggtcagtgtgggacacgctggctctgcgaggcgtttgtagcctgggagtctctagggcaacaccagatgagaatagtgctttgtccgttaagtctttcacataatttaaattctcccctttggacaggagcaacaggctcattatctggcagcaagtctagcccacagcctgggaagaaggcggactcgtgctccaccggctctttatcccgcaggtccctgcaacaccgcgatgcgcatgcgcccccggggcagcgaagaagcagcccgagcgcgttcacactcgcgcatgcgcagtcacccatctcgccgcaggcgacagctcagtatttggcaagggggatggggctgggaaatgatgggggggctgaaggcagggggcgcgtttgtgtcttctgaatgcttgagatagggagaagggacggctgattcggctctggcattcgcaggccacgtaatccgggtgtaggaaatgggactgaggagagtatatgtgtgtggcggggggtggggggacagtgggggtcagtcacctcttcagggaggtgccccccccccactccgacaggacaaccccctccctcgactctcctccccccactcacctgagagcggcggcgacagctgctggtccccgtccccctgcgcttgcctcatactgtccgcaacatccgggacctgcgggaccgccgatacacaaatacacacacactcggagcgcgcacactcacacacacacatacacaccgacacacaccagccggggcgtcatggcgtcagcacgtcgacgcagccagcgcgtaccgccagaccccaccccgcgcggcctcctccccattactcccttctcctcccctcccctccctgggtttccctgctcctcctccctcaagactccgcctatctttcctagtgcgcatgcgtctcggggccaagtcagggcccggggatttgagaggaaggaggggcctgagtaaaaagaggcgggaacttggagggggtcgcgcgcagggcgcgggagcccgctgcgaggtgcgaggaccaaatagaggcgtaacaagccaagggtcggagtgggcaacggaacagttaaaggcatttcacaacagcgatttaggtctgcaagcagtttatggagtaccaacgactcttatatgtattaactcattttttaaaagccagccctgtcagtaaaatattttttggactttatgatgatgctagagacccttttaggtaacttttaaaatttagcacttgtaaacaaaaacaaggactatcctttcaggggaaggcaggagatataggtgatctaactaaaaggaagctgaccacgcatggtggctgacgcctgtaatcccagcactttgggaggctggggtgggcggatcacctgaagtcaggagttcgagaccagcctggccaacatggcgaaaccctatctctactaaaaatataaaaattagctgggcgtggctgggtgcggtgactcacgcctgtaatcccagcactttgggaggccaaggcgggtggatcacgaggtcaggagatcgagaccacggtgaaaccccgtctctactaaaaatacaaaaaattagccgggcgcagtggcgggcgcctgtagtcccagctactccggaggctgaggcagaagaatggcgggaacccgggaggcggagcttgcagtgagccgagatcgcgccactgcactccagcctaggcgacagagactccgtctcaaaaaaaaaaaaaaaaaaaaaaaaaaaattagccaggcgtggtggcacgcgtctgtaatcccagctactccggagactgaggcaggaaaattgcttgaacctgggagacggagatgaccagagatcgcgccactgcactccagcctggatggcagagcaagactacgtctcaaaaaaaataataaaataaaataaataaaaataaaaggggccggcgcggtggctcacgcctgtaatctcagcactttgggaggccgaggcgggtgggtcacgaggtcaggagatcgagaccatcctggctaacacggtgaaaccctgtctctactaaaaatacaaaaaattagccgggtgtggtggcgggcgcctgtagtcccagctactcaggaggctgaggcaggagaatggcgtggacccgggaggctgagcttacaatgagccaagatcacaccactgcactccagcctgggcgacagagcgagactccatctcaataaaaataaataaataaataaataaataaataaaggaaggaaggaaggaagctaattcagtgacaatttgttgtcttggacacctgagttccctgtcagcttcacattttagctccaatgggccataagtgattcctgagttgagtgaaagaaaagggctcggatcaccttggcccttagagaaaaaaagttgtctcggtgttacagtaataatgttagtgttgggtattagttgttatgattctttcctttagctcaaattttaaaaatttttaaaaattattcttgggctgggcacagtggctcatgcctgtaatcccaacactttgggaggctgaggtgggaggatcgcttgagcccaggagttggaaaccagcctgggcaacaaagcaagactccgttctacaaaaaaattagccaagtgtggtggtacctgcctgtagtcccagctactcaggaggctgaagcaggaggatcccttgagcccaggactttaaggttacagtgaactgattgtgccactgcactccaaagtgggcgacagagtaataccttgtcttaaaaaaaaattattatgacgttgtgtctgtaatcccagtactttggg

SEQ ID NO: 1244784 - DNA, 4001 bp, Homo sapiens
gcaggccagtctcgtgggcctgggcctgggcatggacatggcccagctctgagggcgggggcatcaggggcatgagtgggatcagcatggccattggcatcagtggcatcagctcctccgaggccccaggggggatgaagggcagctcattaggatccaagtgggcgtcactccagccctcggagctatcactgcggtcctctggattggtggcttcattctcagatatggtgacaatctcagtggtgtcttctccagggttgctgtctaagtcccctgctcctcggctggtgcctctctcaagtgtgctggctgtgtgggcatctgctgcgccctcctgcttctgcctagagccagctgaaggggcacagccgagcccacacatcttagctctgccctggccagtccagaagaggctgagctcttggcggcaggcagccacagccaggctggtgagcagggtgctggacactaggtagagcaaggcaggttggcccatctgcatgaggaccatggccatgaatgtgaccagcaggcccacagcataggccacggtgcaggccacgaagtagatctgacgggagcagacttgcacatcaaagcggcaacagtaagcaaccaggaagccggggaccacaatgtcaccgaagccaaggatggagaagggctggctgcacagggtcaaggcggagactcttagccggggcactttgagtaccatgggcagcctctcatggcttgaagactctgcagggcccaaggcaacctgcgccatgatgctctcaccggttttggtgaagaagggggtgacgaagacaaagaagacatcaaaggccagcagggccagcaggaaggaggagcagttcttgagagtgggcagccgcacacggtgcaggacgaacaggcagtaggaaatgcccagtgtgtcctgcaggagccacgcccagcggtcctcattgcggtaggccacccagaagatgatcacggttgcgcacaggctcgccagcagcagcagaggcagcggcagagaggcccagaggctgtgcggaggcctctggtattgccgcagggacaggcggcacaccaggggtgacaggcagctgtagaggccaatgccagcacccaggccaaagatcccaatggtgacatagacaaagtggtcatagaagaagtagagcagcagcatgagcgagcaggacagggtgaccaccacgcctgtcatggccggcgtgaagtccactgggatgtcctcattatcttccttctgggctccctcagctgctgcagcttcctgcagctgatggtgaccaccagacccccctcctcttcgggcacggcgccgctgtagccggttggcttcggtcaggccggcccagtagccgcctgcagccactgtgcccacagccaggatgaagatgaccagcatgttgtagtcgatgatgggctctgggggtgcgtacatggccacgcggacgacggcctccccacgagtgtggctgaggatgtccagcatgtcagcatagtggagcatagccacagggatggtgaggtctgccaggggctggcggggatcctggggtgccagggtggtgtctgagcactgttggtcactgacccggctcacgatgagcagcccgtgggcaccttggccctgagccagccagcctttcgtgtggaagctgcagttacccctcatgaccatggcagtggtctggcggaggggccgctggctgggggagcggagctgggcctggtggggggaatcctcacccgggcaccagggtgccttggtgccatcatacaggggcaggagtggggcgtggtgcaggtcccgggggagggtgatgtagtcggagctgaacaggatacagtagtccttgctccaattctccgacaccacgtgggccacgccgtactttcccccggccacggtgctgatgaggaggaggaagcccacggggaggaggaagcccaggcacgccatcttcttcagttcctactgcaacatctgcgggcggcagcccaatacccctcccaggggcaggcgtggccctttgtcacagagcagtctggccacctgtcctggaaaccagggccacacctacctagtcataaagctgtgtggtccccagccgagggcgctgctgtggggcacagggtccctctagaatgatgccccccaaccctgggagaccaggggagaggtcatatggaccctgctctctgcccagaccctagtgggtttagaccaggtactttgaaataaaaggtgtgagcatggggtttgcaggccagataggattctgaaccaacttttctccttacccatggggaacacaggccaatgtcactcctctctaggcctgtttctttagctgtaaagaaatgaggacgttgggccagagagtttctaaggtcccttggagctctgagctcagtaacattgagcacttttaccgagggcttactaggcgccaggtaccctagctgtacctattgcacagttgcaaggaggtgtcattatatctgcacagcctgaggctgtccctcaaagttggtccccatttctaccaggcacatgaccagaattcacctccaactccatttacagttgggaacggacaggtgaccaggagaaattaagcaaaaatgatgtgaactctttacatcaggggcttaggctgacagaccgtggggctcctggtttaccctctctttccctttctcaggagtcagaacaaggacgggcctgtgatgtgtctgtctatgacgaggaggacaatgtcctaaggaatggagaggaagaaagtgaagggaaccaggtccctggattccatgtggaacagtagcccaggatgtgcactatggactgttacaagagagagacatgatcttccttaaggcattgatttgtcatgagtctctttgttatagccacttaacgttaccttaatacacccacttcatggataagtaaaactgaggcttggagaagcccacattgacacagcaaagaaggctggggctcttgtgctggttaaatggaccttgatgtcttccaaatgttttcatgctggattctgagccactctcctggctgcaactctgaggccgggcagactttccgctggaaagagaactcaaatactggtgagaggtggatttgaagccaggagccccaggttttggctctgcaggtttgcacccagctctgtggtgtatgccctcacaggtcacccaggacctcctgtccaggcttcttcaggccacccatgatggagtagatttgaggaatgaggttttcaaagcagttagtgtgcgggagagtaaccctggggcctccggaaccagaagggagggatttgggggctggagcttggcagtccaggttccattgtcctcatgttctccccactggcctggcctgtcactccagtctctgcataggttgtcacatggcattctccctgtgtgtctctgtgtctcttctcttctttataaagacatagttataatggattagggcccaccctaatgacaccatcttaacttgattatgtctgcaaacaccctacttccaaataaggtcgcattaacaggtactggggtttaggacttcaacatgcctatttgggggcacaattgtgggcagccccacaacacacatgtaattttaacctctaaggagtaagcatgctgatttttttttttttttttttttgagacagggtcttgctctgttgctcggctggagtgcagtggcacgatctcagctcactgcaaactccacctcctggtttcaagcaattctcccccgacccagcctcccgagtagctgggattacaggtgtgtgccaccatgcccagctaatttttgtgattttagtacagatggtgtctcaccattttgcccaggctggtctcgaactcctggccttaagtgaatcgcccacctcagcctcccgaggtgctgagattacaggcacaagccactgtgcctg

SEQ ID NO: 1244785 - DNA, 4001 bp, Homo sapiens
caaccagaaccagcaaaacccctcaaatgcaccatagctgctccccacatacaaccacaccagaaaccaccaccatcacagctgccaccagtggcgacagcctcacaatctccatcaaatgcatcatcaatttttaaagatcaacaagagggaaagggatgggaataagagaaactgaggcaaggaattagacagcaaagcagttggctcaaggtcacccagaccaagataccaagagtcgggaagaaggtatcctgacgaccccccaaaagtgctcaaaccccacccaaaggaacattcaggcccacaaacctggaagtctggtcagcttccctcactcccaagcctcacctgtttctcccttccccaaaacagacagcagctcctccatctccttttgaaaggctgctgccagaaacccccacccccagctcggggagcccactttccttaaagttggggtgctgcaggacctccttgtcccacaacatttgaggaggggggctgggaagatccccctccttgcatacttccccgcgcctgctcacctggctcccctcggcccccagggtccctcggtccagcctcctccctgggagagcgggctctgccctccgccgtcctctcccaccaggccagggcaaagcgccggaggcactgccagggctgcatggggacgcgtggggctgggggacgagcaccagcagccgcacacgccccgccgggccctgacagctgagctgcggaggcacccggcctgtcccctctgcttccaccagcatcctgctgcccccaccgacaggactcggagctggcccgggagcttctgacgtagcaggggggtgcgtgggaggggagggggggccacggtgcgtccccttcccagccccaccctccacccctcagccgcctgccttccctatcttctcactcaccctagatgccctccccagctgggggcgccctcccctgccccctggcctctgcagggggaggggttaagatcaaatagcccctccctaaacccctccctctcgtggccctccctacccgctggtagagcggggagctggtccccagtttctgcaactgctgctgaggctcagaggtctccagggctagggcctcgaggtgcggggagggggggtgtgtggaatacaggcttgtatcctggcaacgcggccaaccccagaacgcactcatccccttccctccctggaggctggcgcaaagggcccaccaccaccatcctagcccgtgcaccccattctgggagctgggggagggaggcctttgatgcacccctcacttctccatccccttcccctcccctgcatcctccacttcccccacctcggagggacgcccttctccccccaccctcctcaccatccatcccccttcttctcctcacccctcccccttccacacaagcccctttacagttgaacccctctggcccccaccccggggcgtagtgaggccctccccacccagtctcctgcctcgccaccctgcccccttctctggtcccagcactcctctcgcccgggtccttctcccaagcccggcgcacagcggtcccctgcccccacacacctgcgccccagcatccctcgccccgccggccaccgcctccccggcccggccgccgcccccgcccccggccgagggggaaaacacacaaagaaaacagaaataccttccacttaagcatggaggcacattagggaggagagagacagggacatgccttgggacggagcgttccccatcgggcgggggcgcggggggcgggggccccgggccggcctgcctggcgctcgccctctcgccgcctcgcgggctcctcgctcggccccagccccggggcgcggtgccaggcgggcgggccgggggcgcgggccccgccggggtggaccagctgggagggcgccggcggccgggcgtgtgggtgagcgcgcgcgcgggcgtgtcaccgagtgtgcgagagcgagtgtgtgtgtgtttgagtgtgtgtctgcgcgcgcgcgggccggcgcgggtgtgtcactgcgggcgggcgcgcgcgcggcgcgggcgcgcgcgtgtggccggaacttacaaagggccgcccggggcggcgggggcgggggaggggagggggcactgcgccttctcgcgccctccagcttcaccgcgtgatcccgcagcgcgcggccggggccgggcgcggggcgcgctcactctctccttcccgcgccacctgcttcgtcccaccccaagtagtcttcgcgccacgatagagacaaatacattgaccgaggaccggctcggaggaggcacccggggaagcggggacacttggagggtggaggactcctgggtctccaagcccgggcgcgcctagggatggaaaggctctcggggctgggtggggaggcggggcggcgagactgggggctcccttcagccaaggtgaccgcggaaaccaacagccgccccatgctgggagcgcccggatcctcctctgcttctgcctcgcgacccctcaccccagcgcgcctagacgcggctcggtcggagggtctgggctccccggcgccccctgctgggccgccgcctcgcccccgctccgggttgcagcccctcctgcaggcgtgcgcgggaactgcaggcaggtccgcgcccctccggccagtgagaccccaccgtaggacgctccagcgacggtccctgctcacgcctcgcttggcggcgtcactgccgcctctacttcagcccgcagagcactagctcggctccaccctgccgtcccccgcccctccgcgtcccaccttcgttggcctacctgttggctccgcagacttctccagcgctgacccggacccagacccagacccaggcccgcgccgacacctcgtgattccagcggccccctccctccctcgctccgatgctctggccagtcccttctctctcaagctttcttgcggaggagaaggtgggctgagtcccctgtcccttttatttacttctggagtttccaaaagcagtttaggtgagcaagagagtggacacagtacttctattcactgtgggccatcaggcagagtggcaggcaggcagagagcccaggagaggagaccccaccccaagtggcccaaatgacaaaccggtttccccacttcctggtctacccagttgcaaccttaatctgggctctcccaatttcctatccacccccaggcctgcccctgagccaaccacatgcccagctagggacaaggtcccagattccccttagagataaataaccaattgcagtaactcagatgccagggccaggaccagaggagaggcccttcccagctccagtgggacagatcaggaggacagccaagagctgtgtcctggacacacagtctgggcacacgaccccagcggcaggcaccctgacttcttccctcctgggccaactgcctctccctctgccaactggatggtgcccatcttttggcctctgagcgcacagtgggcatccatccagtgccctgcctggctgcctgcccaggatgggcatgggaggcagcaggctctgtgtgggggaggctcaggggaggcaagggtagcttcccctcagcacacggacaccacctcccaagcggctgggagcccagagctctggcacaggtcgctcctccgttcagattcctcacccactgactgcacaggactcctgcccttcacctgcccccaactcagattccccccaagggacaagatttcttccctcccccactttgtgcctaaggggaagaaaattagcaggtgctctaccataatctctaattttaccctttcgacagcctgatggaagtgagcattttcaaccccctatcagagagatatagccaattgcccaatgtaagagcagcaaagttgaaattcaaacccacatctgccttatgtcaaagctccctgcctttcttctatcaccatcatctcataaccctgtgggt

SEQ ID NO: 1244786 - DNA, 4001 bp, Homo sapiens
atcagacctgtggcccagaacgggttctgttgtccaacttgcccatgaagggagggtttgcatcatttttctggaggtggaaactaaggtttagagggtgagagggcttgagcaggatgacaaaggaagtgaggagtgtccaggttcaagttctgaccccaaagcgcatgtcctcctggcttggtcacgttgcctcttgggactacactcactgggcccagtgatgtggaactggtagttgagtcaggcccagatctccctagggcttgggatttcagggttcatcactccagagggcagtgaaggacaacccctcgtgccagggataggggaggctgttttggaaaagcctcacaatcagggcctctcctctggggtcctcccctagcccagccccagggggaaggagggagggctgggaagcttctggggctggcaaccagctgggctcatctgcaaggctgcagtagggcaggagtggtggtggcatagatatatctgttttgccaaccccagggtggccacgggttccatggacatgtccattcaggctgtgagtctaggcatcttgttcctgcgaccttggcctcagtttcctcatcaaccaagtgcaacttagctagtgctgctaaaactcctgcacagaaaccatgcaggcaatttgctaggggcttccgtttgctctatctacaaaatggaagcaacgggcctcctaattggcacttggtgccaccattggccccaaaccccttctcatcacagccagggtgatgctccaaagatggaagccggtgccactgttctgctccgccctttccctggccgaccaagtcggtttgcgtcctcctcctccctgacctcactcctttgcaagcctctaactcctcacacttaggccctgcctcgaggcctttgcccttcccttgccgtggcctggaaaacatctttccttgctggtcctgggggtgaccctcaggtctcagcttagaagtccctgaccgctctacccaaagtagccacatccctgccctcccccagcctcgctccacccaaggtacaactaaatacccgtttggtttcccgggagatttttgtgttccctaaaagagggggtacccaggtctgtctgtaaaccctcggtgcctaagacggggcctggcattcggtggatgtcagtgaatgagtgcggaggctgtgcccgtcgcagaccgggagaacccgacacgaggcgggggaagggcgcgaggcagcgcccatgcgcatgcgcaagagctccgacgccgagctgaactctcgggccggagggaatgaccgtgagtaacctcgcaattacgtcacggctggggctggggcggagcttcggcgacgcctgggtccccagcttcagccgtggccatcacagggctggagagtcaccggtcgggcggcacccggcctgggacgcgtagaggcgcacgtgtcccggcccggagccgccaagggaccccggcccggcccaggagccctcacccacaagcgcgcggcccgagacgctagcgcgggaaccagggaggctcggtgaggctcgggacaccgagctcagagacaccgggaagtcccgcgcgagcacagcacggagctggcgcccgtgggggagacaaaggccagggagacacctgcgcgccccctactcgcgccacccggcgcagcttcaagccctgcccgccctgacgcaccttcgatgtcggtcagcagcgccgcgtccagatcgcacggctcgcccagcgcctgctccaaagccgcctcgctgaagggtggctcgtccatggcgcagccgcctcctccgggaggcccgccgggcccgccgcctcgtacggcccttcctagggagcgccgccgcggccccggctctcagtcgccgccgccgctccgcgcgttcgtgtcctgccctggcctcagaggcggcccggcgccggcgaaaagttcctcggaaactgggttcccccggccgcagctctgctgggcggtcgaggcggaggcggggcctttcggggaggacccgccctcccagatagacggccccgccccaccttgagagagcgggggacccctgatccccggtctgcgccacaaatctcccctcagccggcccctcctccagagcgccctccagtcattcattttatccagcctcgcgcacaatggcagcggcctctggccggctgctgcgggaacgcgggcaagccgagccccctctctgggcctctgtttctccagcaccaagcaaggaagccgagtggaagccccaggcctgggcccatcccaaacttcatttcctcatttcctagatttgactctttagaacaagacagaccaggatccaagttataggggtcccaggcctgctgtgttgtgagcaggcctgatgtaactgctgggccagttacatcactctgcctcaattttcctcatttgtaacatgggcctaatgatgctttctcacgggcaggctgggaggctagtgacaatgtggaggggagcatgacctgtgagatcagcctgccccctctctgcaaagaaaccagaagattggcctcttgaggacaggagtggccaaagaaagaggctggaatttcgtcatctggtttcctcccagatccagctgtagggataggataccagtgggcccagtgcagctcctgaaggaggaagccagtacccaaggaagactggccccagggctgtctgaccccagatttggcacttattcccaggagcagccaggataggggccgcaaggaagaggtagctgtgctttagatcagagccaggctgccctggatcatcacaagctgggactagatcagagcaggcagccctgttgagaagagggctggaaaccgaacctggttctgtggcctagggacagagccaggtggggcaggaaggagggaaggggtcccaatgaggtgggttgaaataaaccagaattaacattcaggaatctgaatgtgataaggcagtgagctccctgtccccagaggtatgcaagcagagagaagcacccttggtggagggcagtccaggaaactcatcaggggcctgggcctcaggccttcccgaccccagaccttcataagtcaagccatcctgcagactgccttgctcaaactccagatatagcctatctggccacgccctaagcaggagtaacattcatgatgcattttagaaggggtgtgtgggggagagaagccacagagcccaagtccctggggctcagcctggacatccagctccctttgttcctctcccagaagtggctgcggtggaaaattacccagaatagcggcgccagaagtcataggggtcgccaaaccacatctccccaagtagccctgctcaagggtccacccaggacccactccctccagatgaacaactgctggagaacacagagaacaaagctggcttctcctcagtgccccacccccaccaacactctagaggctgcaggaagctggtgacttccctgaaaatttaaacagcccttcccagggagggggtgggataggaagtgctgggtgaagcctaaataccattttcttcagagctaggcaggtgatctgggttttcacctgcttgctgtgtgacctggatccaatacctcacttctgagtctcagctactgtatctataaaatgggaataaccctttctgcagtccctctgcagaggcagggagggtgttttggagtcatcatcacaacagatctgcctcactgttttttgttttgttttgttttgttttttgttttgagacaaagtctctctctgtcacccaggctggagtgcagcggcatgatctcggctcactgcgacctccacctcccaggttcaagcaattctgtctcagcctcctgagtagctgggattacaggcgcacgccaccatgccaggctaatttttgtatttttagtagagatgaggtttcaccattttggccaggctggtcttgaactc

SEQ ID NO: 1244787 - DNA, 4001 bp, Homo sapiens
aaaccacaacacattaaacatttgtgaaatatagccaggtacggtggctcatgcctgtaatcccagcactgtgggaggccgaggcgggtgtatcacctgaggtcaggagttcaagaccagcctggccagcatggtgaaaccccgtctctactaaaaacacaaaaaattagccgggcgcaatggctagcacctgtaatcccagctactcgggaggctgaggcaggagaatcgcttgaacttggaaggcagaggttgcaatgagccaagacagcgccactgcactccagcctaggtgagagtgagattcagtcacacatgcacatgcacacacacacacacacacacacacacacaaatttgtgaaatatttagtacactggtgagatcttttgtaaccattttcaatatctatcttgtcacaggacagggctaacctacaggaaaactgattgcctgaactgttactacttgcaaactgaaaaaggagggcactactggccactggaaactgccaaaacccagtttaaattaagctgatggattctaaatgctgactataattggggtgcttcacaccaattaacacctagaccccacattttattcattcagattcaggttataaatgacatgtactaagcctccatttgcataatctccaacacctgccaaatctaactttccttaacagctgtgatgcttagagagtctatgattagcacatgtcaaccaagctaggctacagtttgcataaaagtattaaggtttttctttcaaaagaagaatggccagattctccttttaataatcttaaaatatttaagattatgtactaatctttagaaagtccaatgaccttcatctatataggtatagttttaatgtttcctcaacacttctctagagacatattttaaaatagtgaacgctaaaaggactctttaaattactaaaacgggacaaagagatataaaggtctcagtaaaatcagggctcgctagcgtctacttggaactattaccagtaattcaaaatatttaactccaagcgcctgagaactttaagcacattaagatgtcaagttgaatgtgttatttcagaaactcgcctacgttttctccatttgttattcatttcaaaaggtcacaaactagtaccacaagcacttggttgagatacacactgatggaaactagaaaccgattcctccagcttatatgaatgactgtcagcaagataaaatgcctacagaccgatcagaaaaaaatgacacaatcgatattaactacggtaacttacaatcaaaatgggcaacaagcttttcctgagtcaatctttacctccactttcaaagtatcgagctgtaggttttactactcagtctatgacgactgtcagacaagagtattaagccaaatgtcaagactgcagtttcctctccccagttcagtggctcaaggtgccaaagcaaggtgctcaaggtgtcacttggtcacaagccctccaactggacaactgcggggcaccaggggaaacctgcctgatatcccagtgccactggaagaaacggacctagccaggacggcgagggggacacgaggaaagactagtcgagagacagaccccccccggaattctgagcaccaaaaggtaagggcgagagaaactgcaaccctcggcctctcctgccaggacttgtcgggacccgccgcctctcccgcccccagccctccagttcgacacgtaatcattgcgagttaggcccgattactctaggatactctccaaactcaggctatccccaaattctttgtttgccttcgatccggccgaagggcgttcgttttctttattttcttcccctccggcaccacgtccaccgccgctaccgccgccgccactgccaccgccgccgccactgccgccgccgccgccgccgcctgggacctgcttctcagcagccatcttgcccctgcgccgcagagcaagacgggataggggaggcgggacgacctgggcgggtgagagctggacctgcctggccgggctgatgggatagcggcggactccgccgccgtcggcccttgctgcagcagggcgccatgtgctggagcgcgcctgcgcgagggatcctgtcatcccgggtccggaattgtggctggctaggtggggacttgaggccgcagtgagaccgtggctgctgagatctcagggggcagtcccacctcccacccactaagggcggagaaccggaggtggaccccaggtcctgcatcctggactggggatctggttcacgtcctgcccagcagaaagcaggagaccaaagatactggatttcggggtgtctgcatccccagggactcaagagatggggtcctccctaccggaacgggacaccccgtccgtaagggacccgcctctgcctgccctttcctctgaggctggccgtaagaacgccaagccggaggaagcgctgcgcagtcagcagacggtgtcctaacggggtgactttctcagaccgcttggggccgtggaccactgcactttggggccgtcagtccaaagagggagaagtgttgagacatgggaaaatatgaatttttgctttgcaccttctagagtctgagacctgggattccaatccccgctccgtcattagcggcagggacatgttgggcacgtaacttaatctccctgtaaatctgttccttcatctatgaaatggggataaccaatttaagtggttgttaggaagattaaatgacggattttttttttttttttagatagagtttcgctcttgttgcccaggctggagtgcaatggtgtgatctcggctcactgcaacctctgcctcctgggttcaagccattctcctgcctcagcctcccgagtagctgggattacaggcgcctgccaccacgtcccgctaatttttgtatttttagtggagacggggtttcaccatgttggtcaggatggtctcgatctcctgacctcgtgatccgcccgcctcggcctcccaaagtgctgggattacaggcgtgaaccaccgcgcccggccctgaactctattttgaatttcctcaaggtatacggaataaggtcaggagaaaaagaataaggatctgatgcattcagatttaactaactctcccatacatctcattcctttctcagcagatccctcttagaaggaagtgttaccatttccttgttacagctgaggaaactgaggcatggagccaaagacagagcctgacacaatagatgctcagtatattggattgaattggagggaaaacgttcaatgggtaagagaagggaaaaaggtggccgggctcggtggcttacgcctgtaatcccagcactttgggaggccgaggtgggcggatcacttgaggtcaggagtttgagaccagcttggccaacatggtgaaaccccatttctactaaaaatacgaaaataagccaggcgtggtggcaggcgcccgtcatcccagctactcgggaggctgaggcaggaggatcgcttgaacccgggaggcggaggttgcagtgagccgatatcatgccactacactccagcctgggcgacagagtgagactctgtctcaacaaatacaaatacaaaaaactagccagacgttgtggcggacgcctgtagtcccagcccctcagaaggccgaggcaggagaaccgtttgaacccgggagacggaggttgcagtgagccgagatcgcgccactgcactctagcctgggcgaaagagccagactccggggcccctcatccgcctccgccccgcgtttcctccccccgatctcccaggggtcctcttttgagggcaccccagcccctcgacggtcccgggatatcctgcacccctgccaggctgcagggaagcgccgaggcgcgcggagtgcgaggtccgtgctccctgcggcgcggcgcacacgcagggtccggggtcgacccctccaccgctccggcgtctg

SEQ ID NO: 1244788 - DNA, 4001 bp, Homo sapiens
cttacccaatacaaatcaaacatacttttccacttataagttacttgactttcctgttgttcactaacttgggaacgaactggggctcattcatgctataaatctagtaaagcaaacacggccaccattcactcctggaaccaccagagcagcaccatccaatagaactctctgccacgggcaatgtcctctacgtgcaccgtccaatgaacacctgagcactcggaagttttattaatttatctatctttttattattttatgtttttgagacagagtcttgctctgctacccaggctggagtatagtgccgtgatctcgtctcactgtaaccaccgcctcctgggttcatgagattctcctgcctcagcctccggagtagctgggactacaggtgcccgccaccacgcctggctatttcaccatgttggccaggctggtctcgaactcctgacctcaggtgatccacctgtcttggcctcccaaagtgctggggttacaggcaggagccacagagcctggctggaagttttattaatttaaatttcaataaccacatgtgttgagcggctactgcactggacagtgcagcactggagcacatgctttatagaatattgttggccgaccccaggttggcaagattctttagaatcacttcgtcaaccttactggcctaatttttcaaagtacaaatctgtggaatggtgccgccatataatactcagcaactggaataagatacataagtctagagtgcttaaaaactcgagtaagacatgtgaatggcagggggtgggaggcaaggggagggaaagtattaggacaaatacctaatgcacacagggcttaaaacctagatgatgggctgggcgcggtggctcacgcctgtaatcccagcactttgggaggctgaggcgggcggatcacgagctcaggagatcgagaccatcctggctaacacgatgaaaccccgtctctactaaaaatacaaaaaattagctgggcatggtggtgggcacctgtagtcccagctactagggaggctgaggcaggagaatggcgtgaacccgggaggcggaggtttcagtgagccgagatcgcgccactgcactccagcctgggcgacagagccagactccatctcaaaaaaaaaaaaaaaaaatccctagatgatgagttgataggtgcagcaaaccaccatggcacatatatacctatataacaaacctgcatgttctgcacatgtatcccagaacttaaaaaaaaaaaaaaaaagacatgtgaatggacttggcaccactacttaagaaacacacatggcgtcggacgcggtggctcacgcctgtaatcccagcactttgggaggcagatgtgggcagatcacttgagtccaggagtttgagaccagcctgggcaacatgacaaaaccccatgtctacaaaaaatgcaaaaaaaattagccaggtgtggtggtgcatgcctgtggtcccagctattccaggaggcaaaggtgggaggaccaactgagaccaggaggtggaggttgcagtgagctgagattgtgccactgcactttggcctgggtgacagggtgagaccctgtctcaaaaaaaaaaaaaaaaaaaagaaacacacatataccacagccacattctcagcagaaaggaagagctacggcgcccgttttaattccatgcaatccaacaaacatgccaacacccttctcagacaagtggggttaagtggttggagcaaccggcgttcaagaaaagagcgaacttcgtcttaccagctacacaggatttgcctcttttcctgtcggtagggtacagttcaagtttaaaacctcttgactgccacgtatcacctctgctccctttaactaagcctctgcatcaaggtgctgaaaccaaaaaacctccccactgctcccacaaagctctaagttcccactgggaattttacaaacatcctaaaaagcaatgaaggaaaaagtcgatttgaagggcgggacttaagtcagttgtgtttttcttacgacgcccacactgcaatgactcagaccactaatctctgaaggagaagctctcatgattctccctgggcagggcaaaatgtctccaaacaggaagccttcaatatattttgctatttacacttttattctataaatctatattcaaggctaagatgattcctgaaaggacagtggaataagaaactcctctcaacacgcagaggcaggattcctggccacctgtacaccgaccttctccgccagccactggaccaaccagaacgtgctcttaaacataagtggcaaaactccctgcacaaaaattggtggtctgactagaccttttcccaggtgtgcctatgacagtgagaaatcttaagcccagaagtaatatgttactgattagtccaaatgaatcaatcaatcctaggtcagcttttacaaaacttgaaaccttcaggatgggcttttctgcagtctcaggttctctcgtcaggctcagtttcaaaactgactggtgcggaggaaagcgagctgcagtgtgtcctgaggtacagacctcccgctttaaaaagcacattctcagattgttttcacttgtctatggaaattgctggaaggtggtagtatgactaagagacacacaaggcaagtctgaccacattcccaaccacacccctactatggggacaagaatcaaaccttacccagcccagtgaggtttaggaaaaaaatacatggaaatctggtaaagaaggaaacaaatctcacttgagaatatacatgaatatatataaatatacattgttttttaagaaaaagataaatggtccctcttccactcaaatattaaaatattaaccataacttgaggataagaatcaccaagcctgagctgggcgctgtggctcacgcctgtaatcccagcactttgggaggccgaggcgggtggattgcctgaagtcaggagttcgagacctactaaaaatacaaaaaattagttgggcatggtggtatgcgcctgtaatcccagctacttgggaggctgaggcaggagaatcacttgaacccgggacacggaggttgcagtgagctgagatcacaccattgcacaacgcgttaataaaaacaggatacagaactgtatcttagtataattccagcaagggaaaaaaaaacataagaactctcatgaatataaaaaacattaaaaagaaacagtgctttcctttcagtatgatgtcatatcaatgaaggcatataggaagtgagacaataggctgatctttttttttttgagacaaagtctcgctcttatcccccaggctggagtgcaatggcgcaatctcggctcactgcaacctccgcctcccgggtttaagtgattctcctgcctcagcctcccgagtagctgggattacagacgtctaccaccacacccggctaattttttttttgtacttttagtagagatggggtttcaccatgttggccaggctggtctcatttcgaactcctgatctcaggtaatccgccagccttggcctcccaaagtgctggaattacaggcgtgagccaccgcacccggcctaggctgatcttttaaaaattaaattaaatttcaatagttttgggggaacaggtggtttctggttacatggataagttcttctatggtgatttctgagactctggtgcacctgtcacccaagcagtgtacacggtacccaatgtgtagtcttttatctctcactccctcccaccctttccaggctgatcttcttaaaacatcatgtgggcccggtgcagtggctgatgcctgtaattccagcactttgggaggctgaggcgggtggatcacgagggcaggagtttgagaccatcctggctaacatggtgaaaccccgtctctactaaaaataaaaaaattagccgggtgtgatggtgggtgcctgtagtcccagctactctggaggctgag

SEQ ID NO: 1244789 - DNA, 4001 bp, Homo sapiens
ggttgaggcgggtggatcacctgaggtcaggagttcgagaccagactggtcaacatggtgaaaccccatctctactaaaaatacaaaaaattagctgggcatggtggtgggcgcctgtaataccagctactcaggaggctgaggcaagagaattgcttgaaaccaggaggcaggttgcagtgagccaagattgtgccactgcactccagcctgggcaacaagagtgaaactccgtctcaaaaaaaacgaaaaacaaaaaatctcagcagctttcattgtgatactgacttaaatatggttgtctttcttgtcatttctttttacctggtatttcatgaattctttaaatctgataattcaaaaatttccaccaacgtagtaaattttcttctactatttgattattgctcttctgcagtcagctgtattatccccttctggaactcgtatttaattattaattttttgtaccccttctccatgtctcctatctttgtctctcagtttttatctattaccttttccttctgagttctggtaaattttcttgaactggtttaacttttggcatatctaatctgcagttcactgacactgttgcattaaatgggtggtgccatttgtcctaagaaagttttcttgttttccattatttttccagctgaaaaaagaaatcatgcaatggcctctcaaatttcaatatgaaacagattattttttaacgcttcttcctatttctctcaaatctggtggcaaaggctgtcttctgctctgaccactcaaatggttcctcttctgaactgttggatcttttcacccatcatctactgactttcttcttatgcttaaccttccggtgacaaagtgtcacgtaaaaggaactgaaggagttctgtcagaggttgtggcaatcccttcggctcagactaaggaataattggtaactattctgtgatgggtgtggggtaaaagcctatggggctgtggaggggcaacaggtggaggcaggaggccttggggaagggagcttcacctctgtacagttctccaaaaaaagattcaagtaccagccttctggtatagttcaattttaaagatgggaaattaaaaagtcaacctgagatccacagcagtaatttttttcaagaatccatagtgacacagaaattcccaaattgacttttttttttttttgaggcggagtctcgctctgttggagactcccgggctggagtgcagtggcgcgatctcggctcactgcagtctccgcctcccgggttcaagcgatccgcccgtctcagcgttccgagtcgccgggattacaggtcccaaatggacttatatgcctcctgatgtacttccttccacacgattccaactatatcgtatctagtttttaaaagtcagggggcggccgggcgcggtggctcacgcctgtaatcccagcactttgggaggccgacgcgggtggatcacctgaggtcaggagttcgagaccagcctagtgaaaccccgtctctacaaaaaatacaaaaattagccgggcttggtggcgtgcacctgtaatcccagctactagggaggctgaggcaggagaatcgcttgaatccaggaggcagaggttgcagtgagccgagaccgcgccactgcactccagcccgggagtctccaacagagcgagactccaactaaaaaaaaaagggaatagtaacaactactcttagcagatcttcaaggtcccaagtaatggcccgcggcgctaggccgggcctgtggcgggagagcctggcctaaggtgtccagaggagcccaggctgaggggtgtctctgtcaacccgagtcccagactagcagtgtccttggtgtccacgacaacagcaacggcagccaccgccgcaaacgcccgcctggcctggcacggcccggcctcgcctcacctcagctcaccggcgccgcgcctccagctccagcctccgcgcgcctccccggccgcacctctgcgcacgcgcagcgcccgcccgccccacccaggctctcgctccggtcccgcccctctggaaccggcggcgggcgcttttcctcccagcgcggccaccgtcgttcggaaagggagggcggcagggggcggggaaaggccgggaggtgggcgagcgcgcgcgccgcccgtctgtggtggtttcctggctgcgcgcggcggtggcggagccgctacggctgtagcagcagccgcgaagatggcggaagggctggagcgtgtgcggatctccgcgtcggagctgcgcgggatcctggctactctggccccgcaggccgggagcagaggtgagtcgcgccgcccagctcctgggccgggcctgcccgccccgcctccctctcctcctcctctgcctcctccccgctcggccctcggctccggagcccccgccccttcccccagcagtaggcgctggggccgcggcggaccctcgctgccctacctctctcgcgggttagtgcggggtcgggctcggccagtcctggccagctccgggagagcctggcccgaattcctgcctccaccctctttctcgccgcgaaggtgactgttccttttgccccagccctctcagacccgccccggattcccaggcatcgggagacgcggaaaggagtggggtctggtggaggccccgggcgtatcgctctccaggccgccctccgcgggcctgccccggccaccgctttaacgtcggagagaaggaattggggagaaaggtttaagagcctgcgacttcgttgctgaacttttcccccccaagacaggcttccgaaagctgcgccactggagggatccgggacctcagactactcgggtttggccctggcatgtgtgggagcagtttttattagagagaatgctcaatttgcaagttaatttcaagtctccagccacgtcaggaaagtaagaaagattctaagtgtctcacctctcctgcgttaggcaatagagttgtgtagaatggtagctgtgataggtgccttctctaggtttgcggccagtctgtgaaattggtttttgttgattaacataattggattattaaggctattttctcccgctgctctagaaagtagtaggaatagctttccccatccccccgccccccaccaagttacagactgccgagggtgagctattcttgggttaaactgctttatctttgtggatacttcatgaacctaccttttaaacttatgaaaatagtgaagcactatccaaaacctcagtctcttttcttccccttttccttacacctacaaacagtaaatgtacttgctggagcatatgattcctgttttgggcttgtttccatttatatttagagagcaatactaggattaaaaacttttttattgttgttattattattttttgagacggagtctagctctgtcgcccaggctggagtgcagtggcgcgatctctgctcactgcaacctccgcctcccgggttcacgccattctcctacctcagcctccccagtagcttggactgtaggcgtgtgccaccacgcctggctaattttttgtatttttgtagtgacggggtttctccgtgttggccaggatggtctggactcctgtcctcgtgatccgcccgccttggcctcccaaagtgctgggattacaggcgtgagccaccgtgcccggccaatttttttgaggcagggtctcactctgtcttccaggctggagtgcagtggagggatctcagctcactgtagcctccccctcctgtgctcaagtgatcctcccacctcagccttccgagtagctggaattacagacctgcaccaccacacctggctattttttgtatacgttatagagacagggtgttgccatgttgcccaggctgatctcgaactcctggcctcaagcagtcctcccgcctcagcctcccaaagtgctgggattataggcgtgagctactgcacctggcctatgctaggattttata

SEQ ID NO: 1244790 - DNA, 4001 bp, Homo sapiens
tactgaataaaggaaaactgtatacaacatgggttctacaaaaagtgtcaccaatcatcttatgtacgagagcgagatctgctatgacggggagaatagcgtggtgatcctctgcttctccttggggagtaactgcgactcctgctgttgcttctgctacggcttctgctacgactacggcttcgagatcgagatcttccataacttggacttctgggcccatcaactttaacccggatgtaggcagtttctccctattggatagacagaactttccattgaaagatctaagctttcatctatcttcagacatgctgaatgaatacaatgtaactaaaaccagaaatctggcaatttacttggacaaccttgcctgaatccttaccttgaaattccactgttaagaccactgtatccaattctggtcaaagaaaagaatacgtgtataacctacctcatgagatctaaacttagtgttatccagttttcgaactgcataggtcatatcttctttccgtacaaactccacgacaccagtgccatctcggtaaacatcagcataacatacatcacctgcttcacgcatgtgatcctttaaatcctgccaacttccacttggaggcagtcctgaaaaagtgattttttttttcttagtaccaattatcttaaatttcacgttaagctggtaaggtacattaggacaaagagtactttaaagtacttaataggtgtacttaagtgataccaggtaaagagagctggtaagattctggaatccagagtccaaaattatttgtaacgatcttcgtatctagtaccgcaacctaatttggtaaatcaccacagcagcaatcctcgtttattaaattcacccaaaaactaaagcaatttaagacctagcatgaaaaatttgcaattattaaacctgtcacgcaagagaaaaattttaggtagttttcgtcccttcacatcaatccacacaaccagtacactcaccagagacaaccactctgttttcagaccgcctggatggggggccatagcgacctcggggagctccgccacctccacccccgccgccgcctcggcctgttccacggccgcttcgaggaaactccacccgcagacggtacccatcgtaatcatagccgtcgcgaccatacaccgcgtcttccgcgtctctgcgggatcgcagaaagtaaaagggatgagaaacaccaggaggagaagctcgctcagttgggaaccagcaaaccccccgcacatgcgcacccaacgtggaagagcccacatgcgccgcataataggaatggcccctcccccacccagaaacacgccaggctcccaaccactacaccagccctcagcgcctcagtttcccgctccagcctgcgaatgggctccggggacgtccaaggcgaggcgccagagaagccacatcaactcagctccttactcgactcctgcatgggcgatacagtctcgccccaacctctctaagagcccccgcttccccgttctctatgttaaggccttggagccttccccaactactcggacctatttcctcaaggctgcaagccccatgccgcctcaccgcgggtcctcgaactcaacgaaggcgaagggcggtcccccgcggcgattcttgaggtcgatgtcgcggatagcgccgtatttgtagaacacgtcctcaatgtccttggttcggatgtctggaggtaagttacccacgtagatgcggcaatcgttgttccctgcggggccacgaatcacaccacctcccgacatggcggtgacgaaaagcgcggactcgagaacaggccttcccaccaagcctagcgcacggcagagcgagcccgcagcggcaccacgtctcccgcggcccctccaaaatggcgcctttatcagctcggcgcacggatatgggggggagacagaggaagagaagcggaaggaaacagcgattcgatcccaacacgcacgcgcgggagcgcaacgggtgctgcgagggctacgttcagcgcacgcgcacgcacgcgcgacgtcaccctccccacgaagggggtaaaaaagtcccccgcgttcccagcttggggtggtttgcgaacagagtgaccagccgtttggtaaaagttaaataacgaactttcgttaaaggagctagtcatccaggtcgggtcttgaaggatggtcgatttctccaggaatgaggatctttgaaagcaactcggcgccttcaaagcacttggtgaaacctagcctaaagcgttgtcccaccatgctctgcggcgataacggcctttggcgggaaagagtctcggaggcggggccaaagggggacggcccgggcggttgctccggaaacccgggtatcttcgtagggtgcgtctaatccagagctgagttgcgggtgattgaacggagagctggggcgttggtttgtcttcccgcccctgctgcgaatagaccgtggctgcttagacagatgtgtctaatttagcgaaaccgatttagattccttaatcctcttcattaagtaccgttccgccttctcgtcagaactttgcatagctcgggtcagcactcctagtgctagtcgcagtgggtccgtatcccgaccggcaacgtggtacccgccaaccagaaggggtaacaccgtaccgcctatgggacccacacctttttatctcttgttagtcgcctgtccgtgggactagcgcagaatgcctgcagaatgaatcgtttctgttgtttcctttcaaagaacgagaaggaagaaagggtgcgtgtgtgcagtccttttttcaaaagttttccctaaaagttactgatacaccaggttttgaaaataccggtcctctcaggtaataaaatggagcaaaatggatgtgagaaccgtaaccactagataccgcggttgctattcaggactgtgatcctgtttgcctgcggcattgggagataacattttacattttttttcgacgtctgaaatctggatttttatgtgaaatcctgggatttttaaacgtcgctaatgaattaaaattcaaatcaggctgggcgcggtggctcacgccagcactttgggaggccgaggcggttggatcacttgaggtcaggaattcgagaccagcctggccaacatggtgaaatcccgtctctactgaaaaaacaaaaaattagccgggcttggtggcaggcgcctgtaatccactctacgcgggaggctgaggcaggagaatcgctagaaccctggaggcggaggttgcagtgagctgagatggcgccattgcactgcagcctgggctacagagtgagactcctccaaaaaaaaaaaaaaggagggggaaacaacaacaaattaaaatcaaaccctgcagtcataaatttgccataacagatctacacactgaatttaagggataattttcttcatgttatttatttacagtagtccctttccgcaaggatgtgaggcaacttacagagataccataaaacatgaaaactagatgaggctgggcgtggtggctcactcctgtaatcccagcactttgggaggccgaggcgggcggatcacctgaggtcaggagtcggagaccaacatgtcgaaacccgtatcttctaaaaatacaaaacattagctgggtatggtggcgcgtgcctgtaatcccagctactcggtagggtgagacaggacaatctcttgaacccttaggaggtggaggctgcagtgagcggaaatcacgccactgcactccagcctgggtgacagaacaagactccatctcacacacacacaaaaaaaatgctagagtaagaaatcagaggaatgggaaaatgaggggtggattaaatgaaatacgcataaattactatacaaaatgcctgcagtgaaagcccgttgaatttgttgagatagattgcaaattttactttagtcttcccagaagtcacggtaaagaagggtacagaagtattgtgtattcaaaatc

SEQ ID NO: 1244791 - DNA, 4001 bp, Homo sapiens
aaaagggctgtatccaaacaaaaacaactcgagatcagagaattggtctatatttcattaagataaattgtttcaaatgaaacatttggtaattgagaatactactttaatatctgagctacttagggccctttcctttttaaaaaataggaccaaacaatttaagagttaaagacacactatcctttccccacccagtgcaatacctgtaactttcttttggggttccaaatgttcactgcttcttattgcaattcttttgccacatccattagaatatgaagtcccagtcagtacaacaatagttgaactgattgtttctctaagaggatagtgcatctttaacatttaaagacaaacctgctccaatacacgcccacagaaactggtccctggaggatcagccaaatcagttaaaatctgcaatactggccaatattcttttatcaaacaggagaccgcagctttaaagggggaaaatgcagacgttggataaaaacagcaagaaatagtcattttcattaataggtctcaaacagtttacgaaacagccattattatctaagcttcatacacatcctttctgcagacccctctcttcagtattactcccaaaggtgagtaacctccgagcagcactcctaatgataggagtcattcttacattaacacgactcaaaaagacctaccccaaatcccatttatgaattagggttatgtgtctcggattcccagacattaccattttcttaagaggacaccgctccttcctcttcaggagacttggggggactcttcgatcgcgacctggatttggattccctcttggacactgggggaggactcctggaccgagaccgggacctggaccgcgaacgagatctggagaccgacgaggacttggacttggaccttcgtgcggatctggacttggaggtcgaccgagatcgagaacgagtgcgggaccgagacttcgagcggctgtagcgagatcggctgcgagacctggaacgactccgactccgggatcggctgcggcgacgccgcctagggctgcgggcgggacgagcaagcacagcggggttaattccaggcagcggggccggccccgcccgcgcgctcccgcccaggccgccattatctcgccgccagacgccatttccccagtcgcgaggcggggtcctccgccccgcgccgcccacaccccggccactcccgggtcgcagacggcggaagctcgcggggtggccggagggtcgcgagacgcggcgtgcacccccgccccgtccgggcccgcaccacgtgcttcgccgcggacctttgtgaggtcgcccgggcctcccgcgcgccccgccccgcctcccgcggtcccctcagccccgtttacctgcggctccggcgtccgtagccaccgcccccgtacctgcggggtggcggtccccggcggctgtggtgtgagtccggggggcggccgtagcgcgccatttgcacccgcagctcgcggccgtccagcacggccccgtccatggcatccatagcgtcctcagcgtcgcgcttgtcgtgaaagcgaacgaaggcgaagccgcgggactccttggtgtagcggtcccgcgggatgtacacgtcgccgacgcgcccgtacttctcgaagacgcgcctcagcgtgtcgggcgaggtgcggtaggtcaggttgtccaccttgagggaggtcataccctccacatcgggaggggggcggccgtagctcatagctctgagtggcggcccggagccccgcgaactggcgccggcttcctcagctctgggcggtgcgacgccgcgcctctcaggcagttgccttccgcgtggggacactgggaaaggccttgccgcagaacagcacggacgggctccgcaggctagcgcacctgagtaacaactgggcgggcagccggcctctgcgcccgtttatatcgctcctcacaaaatggcgcccgcgccacccggaaatgaaaccttctgattggcccaccgcgccccgcttcgtaacgaccctgccgcgcgccccgcccctacccgaagcgcctgcgcacagcccggcgggcgggccaaaaagcgcggagtcacggctggagggagggggagcggaattagcgggcagttggaaagcccgcgaaacgctttttccgcctgggaggccggacgatcgcgattgggcaggaggaagaggaggtgctccccatctgggcccccacctttttttcatgccaatactccaagttcacgccccttttttgctcagccgtcagccccgtctccgtctgaagagtgcttctgccctcatttgcctctccctgtgaccccggccccctcagactccgctgcgtcgtctctcggccccgtccagccgttcctgactgctcttcgccggagtccgcttcccaaccccctttcgccagagcccgagagctccgtcggctctgcgtcctggcggtggggactccccgcggagcgcttgcgcgtgccaggccacccgggactacgtttcccagcgggccgagcggccggcgccgcggctgcggtcaggtgacccggtcgcctggccgcagtgagtcaggctgggagggcggggccgcgccggctgctgcggctggcacttggccctttaatccccttcgtgggcccctcaacctggagcggataaattcttggcgcttctccgggggttgtgctcttccgtactcggatcgcttcttaggagtatcctaactgccggtggggagaacttcgccctaaacctggggttccgatccaggaactggaagttgacagcttggctgcctggctcctgcatctgccttctccactcaccatctcatttctttctccaggattgtcagtggcttcgccccgaggagagctgactgccctgggctgctgcctccggcagagctgagccaaaatgtccccggaatctaaaaagcttttcaacatcattattttaggagttgcctttatgtttatgttcactgcctttcaaacttgtggaaatgtggcggtgagttggaatctgtcctccctcctttgaagtgcccatcataatgcagtccagaaatgaaaataaacgttcattatatctaatagcgcgctttaattgcatctttcatttttcccacccagacttcctcattttttatgattaggtttgatttcttgtgtcagacatttctcatgggggcgttaagcattatcgtttaatctgatttgattaggggtttggatgttaacctggttattttgtttctcgtctgtattaagcgcttccttagtacttggatggttacagctgcttttcctcccccctccctgtcattggtttgccttctgcagttctgttgtcctttttcttttctcataatggacttcagtattaagtacattatgaacttttactttattctcttgctgagtacttggagtcacacttcccaagggtgggagggagactgcaaaacattttcgttgattagttttatcttccacacagcaaactgtcatcaggagcttaaataggacagattttcacggcagtggatataccaggtattgtaccgtatgattgattttgctttatatttgacagtagttgcttaaatctcatcagaatcaccagcaatagaatattgtgattgaataagtggtgatggcattttctcttctcagtgcctagactgagagaacataatagaataaagctgatgagtttaggtttcctgtggaattaggcactaggtttgaaatcctgactctacaaggtatttattgcattgttatcttaggtaagtgtttccgtgagcctaatttcctagttcagacaatgcatgtaaagcacttggcacagtgcatggcattgaataagcactctagtattgtcatgattagaattcccagtcctatagaagatgttgtgattcttgaaacatttggtccttctgtttttgtaattcatgacgattaatata

SEQ ID NO: 1244792 - DNA, 4001 bp, Homo sapiens
gatggtatgttaatgactttccaaaaactagcataaagtactacacataagaataaattatattaaagatttattcctatgatacttgtcttcagatgaccctaaaatgttttaccagctttgaagtacaagtattctcaaatcacaaaatcttagattagaaatagtcttagaagtcccccactgcaggaattctttataccacctcccaggcaaaatgttctccagcctttgcttgaatatttccagcaatgtgcactcactattttgcaaggcagtgcactccactgttacaaattcttccttacaatcactggaaatctgcctccctgaaccaagaatcccagttctgctctctgaaacaacacaagatatataacctttgaaataaaatcacttattaagatatagttgtcaatttcatcacacaaaatgcaattaaagctcagaaaagaagaaaccacaaccatacacaacaaaactttgaaattcaggaaattatactgaaatgacaagccagcaaatttcaggatatcaaagctcacacctcagttaacatacaaatattaagggtaacctgatgatttttttacagtggaaagtggtacagtgtttattaaatacctttttttgcaacctgatactaccaaatccaccaacaccgtttttaaaattacagttctgtaggaagttcaaggtggttttcccagttgctcgcattttcactcagtttatttctctctaaaacatctggatgttggttttttaaagcccatttgccccactggtgcaatatattgtttttaaaaataaatattttcaaaaatggagcctaagagaatggagtgtaaacgaatgggggtggggcgaggagagaaggcaaagacgggcccagcggggaaaggctggttactgggtattttccttctgagagcatgctttattggcataggcatctgaggtaacgagccatacaaacacgaccttagaacaagaatgatcacgagcaatgagtgtaaggcataaatatctgtaagacggaaataatttgacactgatcactaagcagcaccagatgcttcgggacctcataaaggaaaggtaagaggtccaggaaacagagatcattgctaccctctggggtggggggcaggcgggagaaaccaaggaataactacggttgggcagttcaaagcctgaacagtacagagcaaaagaaagccagcaagtgactaggggaaggcacacaccctggcgagtacgaagaagggtgtgcagtgtgcaaatactgaacaggtctatgaaatggtgtgggtaagagatgtgggtgtgggtaaggggcaacgcaggaggctcacggtcccctccctgcagcagagcaacagagggtaaaagaagggggagggtgaaaagcaagaatgactcattaccaaaaggaagtgctcaagccatagggaggcatgccacaggggatttcagggcgaggattgtgaggagctaggtgctcagggtgatgggggcaaaaatcaacgtcttgtagttcctgctgctagtctttaacatgggggtgtgggggggttcgcggcagccgagtgccaaggcctgggaagcggcgcggcgcgtgcgcagtggcgttcggcgggacccgctgaggcaaagcggagccgcagtgacagaagcaagcggagcggccgccaggaaggactcaccgaggcgcaggggctggaggtggtgctgggggtaggtgaccgctggaccgtgaccaaagccatctaggcgctgctgggttgttccgggcagggcattcttgtcctgagtgtgggggacgggagggtgacggagccgggatggggaaaggggtgcggggtgggggtgaagggaacggggaggaggaggaggccgcgggaacggccgcagactccgcacccaccaccagactgtcgccgactgacgctccgaacgggcggcgggcgggcggttccgcagctgcggggcacaatgagcgctcccagtgcgcaggcgccacctgtcagctaccgcctctcccctcggcgcgcgccgccgcctggtcgtaacccttgagttgccggaagctggccgagtgcgtgcgcctcgggccgccgcaccctcctgggtttcctccttcgtgctggaatcgcgcggtttgccagcactgggtgctgtggagtggggtgggggaaggggccgaagggagccagcccggtgaggggtcccagggcggggggccgctggagtcttcactcctgagagacaaccattttatgaggtggggcggcgcacagcttaaccaaccttaaaaaaaagcagctgagatgaaaatcctgaagcaaacacgttttctattgggaaagggctccgcggagtttcaaaccctctcactgggcgcagacagaactgggctagaccagtttactcccttcaccccggctctcgggggctttttcttaacttttcccccccttccgtctatgttttatgatgagacttctggaaagaaaaccattttccgtttgataccctggaaaggtttgtggtaccctcatgcttcctctattgcctgtctaaagacttattcattattcctgaggagaagagaagctgagcgcgcctgggagtccgaggaagccggttgtgagggtccagcctgctattgacctctcacttgcctcctgctgtgaagacagtcttttaattaaacaggatttgctcgttaagctttcttctccttcgtctctaaatgtcattctttcatagacctatgtaaaaatgtagattaaaagatattttaagggaatggttttctcaggggtaaattgtctgcagaacataagcaaagaatgtaatggaaaatcaagattaaaaaggaaaaaaattgcacaatgcaaatatcactgattatttacacaaagaaagagagttgacaaggctatttctcagcttgagtggatgagctggtaaataccaccgtacatatcaaagctgtagaaaacacacacacttgggagtttgcagttattaaaacccaccccctcctgtttgtcactcaaacactcttggatctcattgcttcttttaaactgacagggctgtcatgagctctttctggctgctgtacggttaaacgccacaagagtcctctgtgctgagcctttgttctctccctggggccctgtggttgaaataattagcagggaggttccatcaagaatcagacactgagggtccctgtactgtacagtcctatgtagagtgtagtgcagagaagccagctggtaggcttttgccccctggtggtgatcaggagtgcctgtgagacaaaattaaacaaagatgtatggttcacagattaaacaatctgactgtgttttccccagagctccgtagtaaacaggaaaagagaaggcaagtttcagaagtaagaactttgaaccaatgcatgggagaccaaagaggaaactagatacatagccaaaaaatacacatagctagaagctgaatgaactcaaataaatgaaatatatgtgctttatgaaccaaagtatcattctagaaaaagtaatattcaaatctgtaggtcttagtacttgtatgttgattctctgactcagggagggcaacaatgatgttctactttttcatggtaacatactcttcagaaattcttttggaagatgaaaggcttaagtccattaaccttgcagtgagaaagagcactaccataggaatcagaagacctggtttctagttccagctctaaaaccttatgcaaatggcttgaactttttgagctttaattcctttatctctacaatggaaccctaactgacaagattcttgagataatgtatggtaaagttcagaataaactgtaaataaagccctctatgcaattaagataactttttttttttttttttttgagacggagtctccctttgccacccaggctggagtgcagtggtgcaatctcggctcactgc

SEQ ID NO: 1244793 - DNA, 4001 bp, Homo sapiens
tttaccattttaaccattttaagtgtacagttctagggtattaaatattttcacactgttgtgcaactaccaccatccatccccagaattttttcatcttcctcaaatgaaactttgttctcttcaaatacaaatttcctaccccttctccttcaacccctagcaactaccattctactttacttctctctgaatttgacttctatagataggtacctcatataaatgaaatcatatagtatttatacttttgtgactggcttatttcacttagaatagtatcttcaaggtcattcatactgtagcattatgtcagactccttccttaaggctaaataatattctactatatgtacataccacattttgttaatccattcatccatccatggacacttgggttgcttccactgccatttttaaagtactgttaacactattattttcatactggttatcagtgtcagattatttacccattaacttcttcactctatgaccgttcccgtttttagacggaaaatgcaagtcagtttatttaattgtggagcttttacagtacagggcagtaaaacaacttttgtgactttttttctatttttttagaagctccaccatgaatcaacacacgggagaaaaaaagaaactcaaacgagtttaattcgatttggtaggataggagggcaaaccatctctgaaaataataaattagttgtgagattatctagaaatcaccttacatgctattctctagacctttaataagggataatgtaaagtttctgttgttggacattaaaaagttgacctgggagggagacagtagctttgcttaagtgcaaagagtctaggaaaatcccagcaggtgactcctctgaagccacttggaatgagtgtcaacacactaacacagacccaactgctgctatctaagtaaccttaaaccactgcattgatttaaggatggaacctgaataggaaaagttcctctacttgataactgtgaagtgatattaaccacaagcttcagcacacacacttctcagaaacagctaaaccacagtggaatgacaactctctagagacttcaaaaacagcgacgatttaaagatgcatttgcgctttggtgaatgaaggtgtgcgtgcaggcttgggctgtgagcacgtaccagtagtacaggaggagataaaatagaaactaccgaaatctagccttctggaatcactccagactacaaccagcaggagcgaagaatggtccttctttttgtaaatggttagcaatagaaactttaaaaaaaaaaaacccataatcacggaaagctgctcaccagcaggacccacagggactcccgcttccgattctgtcgactacccttcacccaagtcttccaagtgccaaacagctcagctgtcactcggtcaccacaacttctgagggacaacccgcactttcaaagtccctcaaagttaaacggaaattctcccaaaggattcttccgtccacccccaccccgggacactttccgcctccatgaatccccccaccgttctaccccagcatccttccctccagacgcacggagacctccaggcaagcaggatgcgcgctcgccctcgcttgattgtttgctccccaggatgctggggaaagcggctgctgaaagagcaaactttctgagcgttcgcggaggcggagggcgcgcggcggactcacagctggttgatggcgttctgcgagatgaccgcgttggcggagaagtaaggaatcatgtcggggccaccgaggctgcaggtgcaagcgaggggcgccttcctcttgcgggccaacgtgctcagggtcatggggccggctcaaagtgcacaactccgcatcctggcctctgctctgctccggcacgaggcgcaggctgcgcgtgcacccggcggcggaggcgggcccgccgggtcgcgcggaggcagccgccgaagccccagggctcggcggtagagtccggactgacgggcgtcgccagcagttcgcccccacccgcgtccggggcgggacgggcgggtcctgagagcggagagggtaggcccggccggcgccccgccccagatctcgggacgcccgcgcggatcccgcagcgcgcgtcacagcctttagggcatccggcggccccaagacactgctgcctcggtaagggagtgaagctactcaagggtggacgagaaaggcttgcatttctctaaaggaggatgtttcaacagaaaagtcctgcctcttaaagattggctctatacattgtacctcaaacccgtttttgaaagatcttaaaaaatgtaaaggccataaattcacaagtgcaacaaatatttatcagagacttcctatgtgatttggaaattcagagattacactcacatacatatgtgtgtgtgtgtgtgtgtgtgtgtgtgtatatatatatatatatttttttttgagatggagtttctgctattgtcgcccaggctggaatgcaatggtgcgatcttggttcactgcaacctccgcctcccaggttcaagcgattctccagcctcagcctcccgagtagctggcattacaggtttgcgccaccacgcctggctaatttttgtatttttcgtagagatggggtttcaatgtgttggccaggctggtctcaaactcctgacctccggtgatccgcccgtctcggcctcccaaagtgctgggattacaggcgtgagccagggctcccggcaagattttttttttttaaacagttgaagtaatggtcaaacaaacaaaaaacaatttagattgtcgataacatctactaatgtttgtaagtaaatctatagagggctttcttagccatcccccaattcaaagattcacagccttagctgcacataggaattacttgtggtgggtttaaaaatctcaatgcccaggctgcaccttaataaaattggaatctcttgaaggtgggatttagacgtatttttcaaagctccccaggtgattccaaagtgcagccatggttgagacggcagagtagagatcatatcttcactttacagatacagtaacatttaaggtctaagcagatgacctcgtttataaataatgtcattcaggaacccaggttttatgacatttgatctagggcttttaccttcaaattgtattccctgacgcctttacagttttaagcccttaccatgttccttccaattcactgagcagtgcctttcacctgaccagggaccagctctttgtaaaatatgactgcgctctctctctcctgcatgttgtgctcacaaatggggctggcatggtgcaggcattcaatagaagttagcttccttttattttacctttccagtctcattatgctacagcaaatattttcaggtatcagcattttcagcatttttgaatactagactaaaatatatatcactgaagctgccttagaattctggagtcagaaattaataataatttctaaaaacttcactaaccaattagattaaaattaggaagaagtgactttaagactcaacatgctataatcaagaaaataataagcctttgttttatataaatatttatgctcttttcccattggaaagtttggcaattttcaagatactagtaatgaaataatcaatccaaattataaggtctatgcctaaaaccagaattactcgttagttgattcttctataaaacttaagcctgttgccaaagcaccttgagggacttgaaatactgaaaactcatgctgtaaagagttatctaagtttctgagatatctggtaataggaaagcaccaggtggcaagtgaagagttaacggaaggtctggatcttggagttcatcatcttcatccatctctaggaaggaaaatgtttgaaagatttattcaggctgtgtcagcagccacccaaatggtagtgtaaaaaaaaatctgctgatacaccccaaaataaattgcttaaaatatctg

SEQ ID NO: 1244794 - DNA, 4001 bp, Homo sapiens
caacttgatatacatatattatcatagcataagctattttcaacagtgcccaaggaaaataaatgttactatagtactgatttctagtttatttgcatgactctactaactttcaatcgatttcttcaaaatcaggcctagtaaccacaaaccaaagagtttactagtggagtgaattaagaaggtttgatggtatgttaatgactttccaaaaactagcataaagtactacacataagaataaattatattaaagatttattcctatgatacttgtcttcagatgaccctaaaatgttttaccagctttgaagtacaagtattctcaaatcacaaaatcttagattagaaatagtcttagaagtcccccactgcaggaattctttataccacctcccaggcaaaatgttctccagcctttgcttgaatatttccagcaatgtgcactcactattttgcaaggcagtgcactccactgttacaaattcttccttacaatcactggaaatctgcctccctgaaccaagaatcccagttctgctctctgaaacaacacaagatatataacctttgaaataaaatcacttattaagatatagttgtcaatttcatcacacaaaatgcaattaaagctcagaaaagaagaaaccacaaccatacacaacaaaactttgaaattcaggaaattatactgaaatgacaagccagcaaatttcaggatatcaaagctcacacctcagttaacatacaaatattaagggtaacctgatgatttttttacagtggaaagtggtacagtgtttattaaatacctttttttgcaacctgatactaccaaatccaccaacaccgtttttaaaattacagttctgtaggaagttcaaggtggttttcccagttgctcgcattttcactcagtttatttctctctaaaacatctggatgttggttttttaaagcccatttgccccactggtgcaatatattgtttttaaaaataaatattttcaaaaatggagcctaagagaatggagtgtaaacgaatgggggtggggcgaggagagaaggcaaagacgggcccagcggggaaaggctggttactgggtattttccttctgagagcatgctttattggcataggcatctgaggtaacgagccatacaaacacgaccttagaacaagaatgatcacgagcaatgagtgtaaggcataaatatctgtaagacggaaataatttgacactgatcactaagcagcaccagatgcttcgggacctcataaaggaaaggtaagaggtccaggaaacagagatcattgctaccctctggggtggggggcaggcgggagaaaccaaggaataactacggttgggcagttcaaagcctgaacagtacagagcaaaagaaagccagcaagtgactaggggaaggcacacaccctggcgagtacgaagaagggtgtgcagtgtgcaaatactgaacaggtctatgaaatggtgtgggtaagagatgtgggtgtgggtaaggggcaacgcaggaggctcacggtcccctccctgcagcagagcaacagagggtaaaagaagggggagggtgaaaagcaagaatgactcattaccaaaaggaagtgctcaagccatagggaggcatgccacaggggatttcagggcgaggattgtgaggagctaggtgctcagggtgatgggggcaaaaatcaacgtcttgtagttcctgctgctagtctttaacatgggggtgtgggggggttcgcggcagccgagtgccaaggcctgggaagcggcgcggcgcgtgcgcagtggcgttcggcgggacccgctgaggcaaagcggagccgcagtgacagaagcaagcggagcggccgccaggaaggactcaccgaggcgcaggggctggaggtggtgctgggggtaggtgaccgctggaccgtgaccaaagccatctaggcgctgctgggttgttccgggcagggcattcttgtcctgagtgtgggggacgggagggtgacggagccgggatggggaaaggggtgcggggtgggggtgaagggaacggggaggaggaggaggccgcgggaacggccgcagactccgcacccaccaccagactgtcgccgactgacgctccgaacgggcggcgggcgggcggttccgcagctgcggggcacaatgagcgctcccagtgcgcaggcgccacctgtcagctaccgcctctcccctcggcgcgcgccgccgcctggtcgtaacccttgagttgccggaagctggccgagtgcgtgcgcctcgggccgccgcaccctcctgggtttcctccttcgtgctggaatcgcgcggtttgccagcactgggtgctgtggagtggggtgggggaaggggccgaagggagccagcccggtgaggggtcccagggcggggggccgctggagtcttcactcctgagagacaaccattttatgaggtggggcggcgcacagcttaaccaaccttaaaaaaaagcagctgagatgaaaatcctgaagcaaacacgttttctattgggaaagggctccgcggagtttcaaaccctctcactgggcgcagacagaactgggctagaccagtttactcccttcaccccggctctcgggggctttttcttaacttttcccccccttccgtctatgttttatgatgagacttctggaaagaaaaccattttccgtttgataccctggaaaggtttgtggtaccctcatgcttcctctattgcctgtctaaagacttattcattattcctgaggagaagagaagctgagcgcgcctgggagtccgaggaagccggttgtgagggtccagcctgctattgacctctcacttgcctcctgctgtgaagacagtcttttaattaaacaggatttgctcgttaagctttcttctccttcgtctctaaatgtcattctttcatagacctatgtaaaaatgtagattaaaagatattttaagggaatggttttctcaggggtaaattgtctgcagaacataagcaaagaatgtaatggaaaatcaagattaaaaaggaaaaaaattgcacaatgcaaatatcactgattatttacacaaagaaagagagttgacaaggctatttctcagcttgagtggatgagctggtaaataccaccgtacatatcaaagctgtagaaaacacacacacttgggagtttgcagttattaaaacccaccccctcctgtttgtcactcaaacactcttggatctcattgcttcttttaaactgacagggctgtcatgagctctttctggctgctgtacggttaaacgccacaagagtcctctgtgctgagcctttgttctctccctggggccctgtggttgaaataattagcagggaggttccatcaagaatcagacactgagggtccctgtactgtacagtcctatgtagagtgtagtgcagagaagccagctggtaggcttttgccccctggtggtgatcaggagtgcctgtgagacaaaattaaacaaagatgtatggttcacagattaaacaatctgactgtgttttccccagagctccgtagtaaacaggaaaagagaaggcaagtttcagaagtaagaactttgaaccaatgcatgggagaccaaagaggaaactagatacatagccaaaaaatacacatagctagaagctgaatgaactcaaataaatgaaatatatgtgctttatgaaccaaagtatcattctagaaaaagtaatattcaaatctgtaggtcttagtacttgtatgttgattctctgactcagggagggcaacaatgatgttctactttttcatggtaacatactcttcagaaattcttttggaagatgaaaggcttaagtccattaaccttgcagtgagaaagagcactaccataggaatcagaagacctggtttctagttccagctctaaaaccttatgcaaatggcttgaactttttgagcttt

SEQ ID NO: 1244795 - DNA, 4001 bp, Homo sapiens
ggtcacactccaatgtctgagtaacacggaatccccctgggttggcagagcccctgtctaagagcttttgggctaggaacgatgatggtgcagggagtatgagagagggttgagtgttgctttccagccctaactcggtcattttaactggagtttgagtcaacaggacagaattgcttaatggtagcaacagacagggttcagagtcttggtgaaggtggtggaggtgggaggctggggagccggctgagagtgggaaggctcctctaagcaagaaatgagcttaaatcatggggagtcttatttaacaaagaagtcagccgcttaaggtcttccagagacttctgtttcatttttgtttcagagaaagaatattccaatgccaggcagacaattctagatgaattgtggttaaattaaatgtacaaggaagtttcgttttctgcattctttgtttttccagcccaagaattgttagatgctggaaatggctagtggttggtttcctctgaaccatgtccaggctctgtagagaggagggtgagaatggtctcacgcacctgccccccccgccccccttttacataggggctgtgattaccagcccaagaaatgagtgttgggatggcgacccgacatcaggggaggtcctaaatcctactcagcttcagtttctcctctccccatcatgtttcccgcattcacttcccaccccccgcctccctcagggcctgcagaacccggcttggtctctgtgcggctagagcgagagcccccactggcagggtgacaaaagcccctgagggccaccgcggcgcgtgagcgcctgggaaaagccggggcggtgctggcctacggggttgagaaatggaggggcgagtgtcaggaccgcggagccggttgctcccggctggcacagaaagtcctcctcctggccatccaactcgctgatcctcagagcaagggtttcccaaagaactctgtgccatttccaggaagacgaggcaagagcggagattgtggcgccagcacgcccagtatcgaaacgcacagcaggggtgccgggtgtggggggggggcgctgaggacagagacatcggggcgcagaagacagtcgcttgggggacttggccagcggcttttgggcacggcctatgcagtggttttttctctccaaacctagacaaactgtcctttctgtcccgaggtgggggacggggacggatcctagatcgttcagcgtctagggagagaagcccctctttctccgctctgcgcccgccgcctgcctctggcaggctcggatctccgggtgcgctcccgcaggagccccagctggcatctcacggcctcgctcccctcgcgccaggtctcttttgtagggggctgggagagaagttgtcacccgtcgcagctacctgaaatctcgggctaaagggcacacgccacgcacacgggcatgaggctgcgaggacacgtccgttccagcacactctacccacagcccccttactcaggcaagggtacccgttgtcgttcattcctactacaatcaccccaaaaggcacaagagcggagaatcacgcaccgggacctaagctcaggcactcggatgggcacaccaccatcagcgcagatgcacacaggtgcccaagtgcgcttctcgctccctccatctctcttatcacacacacacacacacacacacacacacacacacacacacccctcacctttgcttttccgctgcaatccgctagctccggtctccgacacccagcggctgtccccgagccagctgggcgccggggcgcgcagcagcttggctagcgcctggcgccggacgtttggggttcctggctcctcgaccctcttgtgccggctcccgctagcccctcgcacgtagagagctcccctcgcccgcagacccccggcgccaagcctcagactggggctctgggcgctggtggtcttgcgagcgcgcgcgcatgggtggctgcgccgctgggactggcccagccagcccgggcccctcggcacatttccccacgcccccctcccgctacgtcacagcggcttcgctccgcccccccaacccctcctcccgggtcctgcagaaggacaggggtgagaccggctgaaacgcctgcgggtggccgcaggcagagcttacagacagccggggagcggggagagaggggacccgcctgcgggggcgtaaaaggttaagcgttttcggtctcctcaagactcatggcaaggacaagcgctattttccctctgatttcacagagtcgattcccttccacccatatattctaggcagctggagtggcggccggggtgacccagacttataccgggacctctgtgatttccttagccaaacaagttagcaaagctgtgtttaccgtgggccagccccgggcgcagggcgcagggccaggctaagagtagggagaaaaagggctcaggggatagcgcttctccatgcagttcccaatgagcgcagggagtgtaaacccgcacctggagtccaagattcagtcctaggagccatcagagggccagtggacgtcgactggtcccagctgtccctgcgtcccacagcttggaggtgcagcggccatacaggtggtccccttgctgtagccacgtcagtcagcacctgctggtctgacccagcacagtctctcctacatgctgtgagggagcaaaggggagcaggcaagaagtgggagtcgcatggagttgcagctgtttatttttgactgtgatgattcagcctcttttccaatagtttaataagtcataatcaatcctgcagcctccccttcctcaccctcctccaagtacataggtatacacacacacacacacacacacacacacacacaccatcctcagtacagttttagaggatgtgaaaacagaaagcaaaccccaactagctttctctgtgagctgagctgccttgatttgtccatcctattatctgatttccaattcaccagggaaaagtaaaagtccagaagctgtgtggcaggtggggtgagccttagagatagatgagtgacatggaaaagcaaccaccaggtacagcagcagccagctctctcttctatctgggccaagctgtatcttggggtacccactgtgagatggggatcaggagtttccatctctctctgagacgttggtcatgatagggcttaaatcttggcatcctggagctcagggtgagatggaaattgagctgcaattgccttaagttccaggagtcaatctgggagccagcatctcttttagacatgtgtatgcaagtggaagggctggggtggctagctcactggaagagggctgtgtctgctcaccgtcagtgggaagagggagaggcagagaggtaatagtaatatcaggagggcatcgtggaattgtgctcaggggaactcggcatcctctggccacacagttgctacaatgcctgttgccacctccagtttaaaaccagtaatctgactggtttccaggaaaagaaggaagagccaggaagtgcccactctgccctcaaattcctttcctaaaagttctcaaactgttaataccagatttacgtttcattaaaaaaaataataactggagccagcagagtccgagatgatgctgctgttctaccctggctgcagggatgggctgatcgtggaggagggacagcgctgccgctgccactccctcgcctgcaacacgtgcctctgtgtgcacttcacccacaaggtaacaaattggaagtactcaaagctgaaagaagtggatgatgggcttgggggagcagctgcctgggaggatgttgactctactgcagagccatgtcctcaatgagaacctccttgtgcttactacatgtagcttcagacccactctgcagatgagccgaagaccaccttctaccagtgctgcaggactcagtgtggacaccactggagggattagggcaaggacgg

SEQ ID NO: 1244796 - DNA, 4001 bp, Homo sapiens
gggagtggacctgtatgtcccgacatggaaagatgtccatgatatagtgtgacttacaaggtcaacctgtggaacaatatgtagcatgagatacatatatatgtatatatacgtatatatgagatatatatataagctctcttgtgcatatatatgtaaatctatatgatatatatgtgtatatatctatatctatatatacaatatatctatatatacatatctctcatgctacatattgacatatagtatatcaatatatagcgtatatattgtatatatatctccatactatatatagatatctatatctccatctatctatccatctatctgtccatctatctgcctatctctctatctctctctctctctatctgcctatctatctatctatctatctatcatctatctatcgggcttgtatagcataaaggtaatgagcacagggtatggcaccaaaatgcctgggtttgaatcttggccctgccgcatactagcagggtgaccttgggagaatcacttcagttctgtgtatctcagtgtcctaataatgagaattagtgagttaacgtatatcaagcacttagaataggggctagctcatagtaaatactatagcagtgttagctacataataatagaattccgtgtaccctcaagtgtcaagagtggtcaccttgaagagtggatagaggtggaggtataatagggagaccctcacttcctgcttcacctttctgtattttttttaactctatgagaacctgcattactttcaacgtttaggaacagtgaaatgaaattattggctgggcgcagtggctcacgcctgtcatcccagcgctttgggaggccgaggtgggtagatcacttgaggtcgggagttcaagaccagcctggccaacatggtgaaaacctgtctctactaaaaatacaaaaacttagccaggcctggtggcatgcgcctgtagtcccagctactcaggaagctgaggcttgaacctgggaggtggaggttgcagtgagctgagatcatgccactgcactccagcactccggcagcagagtgagactccgtctcaaaaaaaaaaaaaaaaaaaagagggcctctcactgctggagatgtgtgtattttctaagaaaaatggtctagaaggtatttttgaaggattaacttggcgtccacaattgaaactgcatccctaagagggaggctctccattttaactgacaaacttagggtgagtccgggtctgaaacaagtggaacacacagcatggctctttcgcttcaggacgtagagaatggcatgtaagaactaacccagtgctgctgccattactcacagtcccagaggggaaagcagtcatgtcttctgtctgcactctgcagacctaacccatcagttctcaaactcctgtacgtgtcccacagtatctggacatgtccatcccatgcgtcttggttgcccactgccaccctttctgttccctgcaagtcttcccattagtctttcttcccagtgcttcttgagaacactcctgacccctgacactcccatgtggacacacaggtggctcagacttccccagtcctccctgggctatcatttttctgtttcctcaaatgaatgaaatatgaggagtggaaaggacaagaatcttacctggaaggctttgtttgaggctccttaataaaagagggcaaggcgaagagaaagaagaccaggacagccagaagcaaggaccactggacgccttggctcaggtgcctgcatctccacaggcaggacctcatggtggtgggtcgggttctagaggaaggttctgcatgtcctggggccttgatgtaggcagctgggagtctcaccgctcaggtttcctggccaggaagtgcacaccctttgtcttaacaatgagccactccggcaagtgctgagtttatcagtctctgcctgggaagggaggaaccgccttcactgctgtatgaaggcttataagctggcgtggcttaaaggaagggaaactccttgtgttcaaacatgtttaccttccttttttgtctttgaagccaatatctgaaagtcaagctttatgagaaatataaccacattatatgcagtctcatcttggtcaggttacttaacccatctgccgccatataaatggaaaaaagcagttatcttccttttgggattatcatgaagacaccttgaggccaccatgcacagggctttgtttgtggtaggcacccaacacacatgttcaacactttagctcaaccttctctgtttctcttctgaaatcatgaccattacaacaatgaccagcacgtatgagggctcactctgagctgggcagtggggagtcttcacaggcactcatggaaccctcacagccactctaggggctgggtactgtcatcacctccatttgacagaggaggaaatggcctccaagaacaagctgccagcccaagagcacatggtgagccactggcttggggtccagatccaactgacctagagattgcattctttttttaagaaatagagatgggtctcagtatgttgcccaggctggtctcaaactcctggacttaagtgatcctcccacctcagcctcccaaagtgctgggattacaggcatcggccaccatgcccagccatgattgcatttttctttcttttttttttttgagacattctcactcgttgccagcctggagtgcagtggcgcaatcttggctcactgcaacctccgcctcccgggctcaagtgattctcctgcctcagcctcctgagtagctgggactacaggcacccaacaccacacccggctaatttttgtatttttagtggagacggggtttcaccatgctggccaggatggtctcgatcttctgacctcatgatccacctgcctcggcctcccaaagtgctaggattacaggtgtgagccaccgtgcctggccgattgcattcgtatccactgcttagtagcacctacgagaaatcattaactctaccttgatcaaagcaatgcaaaacaaaacccacataattcttgggaaaaaaaagtacacctcagaggaaaaacatcaagaccatttgtagaaaactttaaaaattcagagaagcagccctccataaagtactgtgagttagtaattttataaaaatattgtccagggtgttgaactgtgggagaggttttggagcctgggctcactgttcacacctggcggtgggcatttctcctaacgtacagttttcagttctgtacacaaggctcttggccttcacccatggcacgcaccgataaatgattaaaccaccttcctcaaggaggacgaaaaaggcaggaacatacgtctgagcagctgagggtaatacagacgactgatggtttcctttatcccctactgtacactgcaactcacagcactgtttcaagtcatggtggcaaggagaaacatctctgttagtactgactcaacctctctctttctctctcaccgtgcctaacctacagatgctcatatgttaactctataaacattttctgaattgatctgtatcaagtcataactctttgtcctaactggccccttatcctgagttcctttatgcacttgacatgtacaattatattcctgtatcctggtgcctgcttgcaacgctatgcaaataagtgcacagtgaaaaggcatgttcttacccacagtactagtgtgactaaatagagtatctctttcatcgtgccctgtgttctgaagaaggcactggctgtcagtgctcgctgccttccgcagggcatggagatccagctgagctcctgggtgcaagctgagctactgtggacaatctgtccctctcgccacattagaggcaggttgaacttgaagaccttgtggccaactggtgtggcaggataatccagagtcctagtttcctggttctcaggttccagcccactgctgctgtagcatgtgcctgg

SEQ ID NO: 1244797 - DNA, 4001 bp, Homo sapiens
tgcctcggcctcccaaaatgctgagactacaggcgtgagccaccgcgcccggccacagtgtgatatttcaatacgtgtatgtaatgtgtaataatcaaaccagctaattagcatatccatcacctcgaacttttttttttttttctggagacaggaccttgctgtattgcccaggctggagtgcagtggcgcgatcacagctcactgcagcctcgacctcccagactcaagggatcttcttggtcagctcccggaatagatagatggaagcacaggcatgcaccaccatccccggataagttttgtatttttggtagagacgaggtttcgccatgttgcccaggcttatatcaaacatgtattatttctttgcattgagatactttgtgttttaaacatctttacataaaagtgacaaggattccttttcttttgagacagggtctctctctgtcaaccaggctggaatgcagtagtgcaatcacagctcacagcctcgaattcctggcctcaagctatcctcccacctccgcctcccagagtgctgggactacaggcgttaagtcaccgtggcggggcaagcaccctttgttctaagagtgctggactcctgatcactggcaagctgtttcacattgttctgcaacttttggtgtatcctttgacagcatctgtggagaccagatacttattttgttttcatcccgttagccccccagcaaggttggtagggggtgcgcagatggaaaagctccaggaagggaaaggctggggctggaggcctctccctgaggctgccgggcccttccctcctcccaaacccagacttcgcacggcttggtccgcctttcttaagctaagcgaaatcgttttgcggcttcttcagtcaccggaaccaccacctgctagaggccggctcccaggttctcctcgtgggacacccaggaaagtgcctagggaggaggagggagtggagcgcaggacgcggcgcggggaggagaacgcggatggagccaggagtcacccctctttccctcgggcgcccgcctcttcgcggatcgcgcccgcactgggcttatccagacacggcgagcggaagccggggagaagggagcgggcgcggggcggacagagaccgcagcgggcgggaaaggcgactggccgcggcccgacggagggtccccgcgaagttggaaaccggagacttgggcccctgcccaaaaagcagaatctgacgttaccgagggagagttcccgacaaaaaaggaagtttttatctgcttcggggacccagccagatttcgacaatagaaagtgtacttatcaggccggggaggacttcaccaacaaggggcaccggggcgggtcgccagtgcacaggggcgaggtcttccttggacccaggcaaaggccgcggggtccgggcagcgcgaggtcaaggctgggagagggttctggcgacaaagggccgcggccgagtcctcgctgagagctgccccagaggggtccacgcggaggttgggctgagggctgcgggccgccggggagccctgggctggggaccctccccgcgccctggtcgcccctgcgccctcccgctctgcgctcggcagcccctacctggctccggccgctggccccgggtaccgctgcaccgccgagaagtacagggcaaagaggagccccgagcaggcagccgtgagcaggagcagcagccagaagaacgacccgcgcgggagccccatacagccccggcccgcgagcgccccgtccgctgacgtcccaggcagaagggagagaaccgggtgggccgggtggcacttgcggaggcggccgtcttgccctgccccgccctgcccgccgggtgcctgcggcgcctgcccgcccggcagctccctctcggccccggctgagtggccagaggctgccgcaccctcgggagctgggcggcgggtcccccggggctggagtgtcgtcccggcgcccagagcgcgcgctcctttggccctgccccctgcccgggggacttcggcagcggccactcctgccactgcgctctctccagagcccagccccgggaggccgccagtctcgggttgggcagggcgctttcctcgcgccgtccggggctagctaggcgcgggtagacgccgccacctgctgcgctggctgcgctctgccctctgcgggcccggcactcggcctctagactctgtggcgggtgggcggcggccgggaggagatgtgcccggctccctccaaaggaccctcagatctgtcagtctgcggacgccaggacagctgggagggggcgggcagggtggaggagcaaaacccgacagctcagtctctgggctggcggtagaggggggaaaagggggtgaggtggggagcttgccgtgatgggtttcgtgggggagctaaggctgtcagcgcttatttggtaaccatccagggtggccagtcccctcaatcgcattgagttcctttcacagaacgaggccagtcagagagaccacctgaaatgttcagcacaacgggttcccaaacttattggcaccagggactggtttcctggaagacaatttttccacggaggggggtgggggtgggggggttggggatgaaactgttccacctcagatcatcaggcatgagttaagatgctctcataaggagcccgcaacctagatccctggcatgcgcatttcacaaaagggttcgcactcctttgagactctaatgccgaggctgatctgaaggaggcggagctcaggcggtaatgctccttccccctccactcacctcctgctgcgatgccctgttcctaacaggtctcggaccaggcttgggattggggacccctggtctagcaggctccagcatcagaaagggctgggaagctcagcacccgtgctctctaagtggaacactccctggcagtgagtgatggatgagatgggtgtgcttcagtggccactgttcggcaagctgtgacatgcggcaggctgtgacatgccccagactcccaactgtcagcaggctgcaaggatgagagggacctaggctaccgtgtcacgggcctttggctctaatctgttcttcatgtatccgaggaagtctgggtgcagcaacaggtacctgtctgattgcaaggcttcccgaaaacctcccagggcctgggcctgtggtcaggaatggccattcagtccatccagtctcagtactcctaccaagtcagggtcactggaggtcactcacattgggccagttctttccttcaccccaagactgctcagcagagccagactcatcttgctaccccgcagatgggcactacttggaatttatggtgtcacgactttcatttcaatctttatgggtttacttgtcaaaattcctgtagatgttacttatcccctgatcactggcttctcacatttcctcagaccttctctctgtgcccataaatatccctcctagcccttgctctcagtaagtgccttaccctctacttcatggagaaaaggagaatcattcattagtaatttattcaacttccacttacaaacctacaaacttggcccccacacacagcccagcctctccctgccgggactctagtctttttttttttttttttttttgaaacagcctgttacccaggctggagtgcagaggcgtgatctcggctcactgcaacttccacctcccaggttcaagcgattctcctgcctcagcctccccagtagctgggattacaggagtgcacccccatgcccagctttttttttttgtatttttagtagggatgggggctttaccacgttggccaggctggtctcaaactcctgacctcaggtgatctgcccaccttggcctcccaaactgctgggattacatgtgcgagccactgcgccaggcctcaggactccagtcttaagagctggggagagggtgctctcctcctgtgtgggagttaaccccctatctgtgttaat

SEQ ID NO: 1244798 - DNA, 4001 bp, Homo sapiens
gagggcaaccgaaatcaggggcattggaactcaggggaggttcagctcctagaccttctgcttgacagaagttgtcacaaatattccaagcaatatcctcccacccaaacatcttagtcctttcccaggagagactgagacttggctctctaaaggggagtcagctctggcctcacagaccagagtctcatttttagaagggggcaagagagagtcaggtgtgcatgtgaagacttgaatgtggagacctgctgggtcccctggtgcaggatgggggctccctggggtgcctctgccagactccaccctgaccctacggcctcctcctccggtcactcccttgatgaccttgaccttgaattaacctcagctcctgcgggatggtcaagatggaagaaggaggaagggggacagtggaaagaagcctagcgaacccaggacgcctccggagcccaggctcccatcatttctggtcctcactgtcccctttcgcctctggagaacaggagcaggatgggaacaaaataccgggtgaagggggagggaggaggtcttggcctgaagtctgggaggtggcagggcgcgcccttggcacagccctttctatcccaaccccaggcccgctcaggttgatcccgcagaaacagaacttctcgcgggccagtcgccagcacctagaacttgggaagggagcagacggattagaggtcgggggagtgctgagtgtgagcggcggcctccccacacccctttcagcgccaggagtctgggctccgcctgccttcgcggggagtaatttattcatggtgactccctcaggagtaacaatcatccataattagggttaatgatgacattcattaattacgatgacttctctttttgcttctacccgctccccctcctctggtcccgctcccgtggtggggcgcggggctgcctgtctttctggtctggagccacaaccgcaggcccccgtcctcgcccgtgaccgacggccggcgctgctgcaggccccctcgcggactccgcagctgcgcacccccggccgcggcctcgcgtccccgagcccaacagggctaggagcggggaatgcaggactgcggaggggcagggagagacgccctgagacgcggagataaacacccggagacgccgggagagacggggagagacgcacacagagacaccaagacacagacacgcaggttgtagagacaaattcagagacacgagcgaggatagaggcgcggactgagcccgggactgggacccggcggccgctggagggtgcgcctcgcacgcacagccgggcgcgtaccccgcccgcaccgctccacgcgcgccctccggcctcgctgcgcccatctctccaacgaagaccagtggccgcctccccagaaggtcgcgatggcgcgcgcgggcgtgcggtgccggtgtgatcgggggctccttgtggcccctcgtcgccaacccactcctacccccgggagcggcgcggagcctcagtggtcacgcgggcctcgcgaccgcgaccctaggacgcccgggcccacaggaggaccccgccgggaagagggcgcccgggcccggggcgcggacaggccttgcgccccccaagttaccttggtttcctggagggcggagacggtccctggggggctgtgggtggccgcgtcatccggttcgttctccttctcgctcatctcggtcatggttcggggagaggggaggagagggtgccgagatccgacggcaggcccaccgcgggcaggctgcgggtggcgggcgtctccgggactctgaagccgttctccagaggctgcccccagttagcccccggcacggcagcccccaacccgcgggagcgggcagagaaagttgccggggtggcgggcgaggggaggccaccacgctgagccgcaggagcgggacgaccccgggcgcgaggaccgagggtctgcagaggatgctgctcgcagcgcggggaggagggaagtggggccgcggggatgagccgagggagggagccaaggagctgtccgtgtccagccggctccgccgtccgctgcgcccgccccccatcccctcccctcccccgccggccccagcccggcacccggcggcccctccgcccagtcctcgccgcccaactttgatttaggaggtcgcctggtcccgccccctgccctacgccgctcccccgcgcagccctgcaaatcaggctctcagctattggctgcctcggtggccaggagggcgaactgggcggagtcttggggggctcgacacgatggggcggggcttggcggggaaagaagcggaggagggagtttcacactgaaaaacccgggatggaggggcgtgaccagattgagggaagcttggggagatcatagtagcgtctggatgggttgcagggaatagaaataggttggggccgcagcaagatagcggagagtgagatcgaagctaggacttccaaagagcgaagattgatagatgccagaggttggtgaaggaagaatggggacccatctgtgccattaattggatgcctttataccctgaaaaggctctctccaaatatacacacaactggactatggtgtatgtgtcaaaggccaggccggacaattcctccttgtgatggaaagccggatgactctatccccttccagtcttggcgtctgaacttcagcagagatgggggctcagtcctcacacccaaagtccccaaacttctctgagacacgctcccctcctaaagatcctaccacaactggagttagatcaggggataatacagagaggtgggggaagaggtcctcaccatcaccttccaaggtgcccctctctccacaataaccttctattttttatttttttatttttttatttagagacagggtttcactctttcacccaggctggagtgcagtggtgcgatcataactcactgcagtctcaaactcctaggctcaagcaatcctcccacctcagcctctctagttgctgggaccacaggcatacgccaccatgcctggctaatttttaaaatttattggtagagacaagtcttgctatgttacacaggatgatctccaactcctgggctcaagcgatcttctcactttggcctcccaacgtattgggattacaggcgtgagccactgtgcccgttcaagatatttccaatatttcttcttctccttctcttcttcttctttttttttttttttttttttttttttttttggagacaggatcttgctctattggccaggctgtagtgcagtggcttgatcacacctcactgtagcctggacctcctgggctcaaccctcccaagtagctgggaccacaggcacatgccactgcacccagctaattttaaaattttttgtagagatggagtctcgctatgttgcccaggctagtcttaaactcctaggctcaagtgaccctcctgcctcagcctcccaaagtgctgggattacaggtgtgaaccaccacacctgaccaagatacctcttctaatgcatgttgattatctgggacccattttctcaggtccccctccctcacctccagccctctttccttctgccccttctggctctgaccagcagatctggcttcctctcttggtctgcccaagaaaagggagatgcactggtggctgagagaacctttccctggtgtgggtggagagacttctgggtttaagtctccctcctcctctgctgtgggtggtaagattgtgggtggggggtgccacatggggggcctgaggtgctgaagggggcccttatgctagcctgaaagttgaggggtggggtgaacacctccaccccccactcacctccccccatgcacacagccattcataggatctctgccctcccaagcacgagctcaccattggagccctgctcaggttaccctgtccaggaatagagatttatttgccagtggcagaagtaggacaagggcacagt

SEQ ID NO: 1244799 - DNA, 4001 bp, Homo sapiens
ctagagtgcagtggcacaaccatatctcgttgtaacttcaaattcctgggctcaaaggatcctcccacacgtaccaccatgctcagctagttttttaaatttttgtagcgatggggtctcactatgttgcccaagctagttgcaaacccctggcctcaagcgatcatcctgccttgcctcccaaagtactaggattaatgcatgagccactgcacccaggcaactcactttaatttattgagcattcttgtgcctagcactggtttaagacctaaacatacaatattccattcaatcctcacaactctatgaagtagagacattcctacctccattttacaagtgaggaaattgaggcactgacttcatcaaggttaccaaacaggtcagaacccaggcagtctgatccaggagtctgtattctcagctactatgctattatggacagggtgctacaggacacagaagggcaattaaccttgggggttaggcggaggcagcgctgcctgcgctgaaaaacatgtagaaggtagcccagcagacaagagaaggaggaggtttccaagcagcgggggctggtgtgtgcaaagtcatgaagatacgaacagcaagggtaggcatggcgcatgctgcagtgccgtattattggaccttagggtgcacacaggagactgctaggtcagatcacagagagctgtgtaaattgtgctaggggttcagcacataggcaatagaaagccagaaaaaggttatcagcaaggaactggcaccgtaagacttgtgttctaaaaggatcacaagagttacagtttggagactgggttgcaagctgccagggctggactgttgggaattgacaatacatcaacagcgtggtaacagaagagatggagctggcccaggtttgaaggatgttcaggaagttggcagtactaggtcacttttaagatgtgggacttgaaagagaggagaaagtgtaaggaaattaccagacttccggctgggttggggtagaggaagaattaatctgcaaggaaaagaccagttcaagtttggacccagtgagctccatgtgaagcagagctgtcccaatggccgctggatgggcaagcgtggagctccagggaagggctgcgctgaagatgtggatctgggtatttagttggtgtaaagctgaagccgtgggggaaaataagaccactgagattcagtgtacagagcgaggggttgggcgacagaggaaaacgtgaagcgggactttgaccgactgtcagagcggtacgaagaaaaccaggagacattgactaacccaaaaatgcggggtgagggaacgtgtcattagaaatgagtgtcaatggtactatgcacctctaagaactcaagacttcaaagggcccttttaataccaattaggaagttattcacggccgtttcgaaaggaagttggggagacacgggatgacactgagacgcagagctaccggaatgcgtagatgttttcctctcaccccagattccgacccctccccatacctgcccctgctcataacacccagacacctcaccctctcctctcccctcagttaagacggaggctttggaaggagatcccgaacgtcctccccgggctccccaggataggcggggtcgccaagagtcattgctggagaccccaacccgcgcggggcggcgcgaggccagacagaggaagggggcggaacctgagacgcagcgggtgtgggaagggtcggacggaacccagcacggacagcgggcggcgaagcgggttcgaccggcggaagacggccctcgcacgccacccgctcccagcgaccgctccgggacccacctgctccatgtcagccacggccccggctcttcccgccccaaccgcagtccggctccgcggcctcagtagcgcctcagagcggaagaagatcttccggcagcgccacttccgccgctgagtccgcccccgagagcgaagcgggacttgcgttcgcctgcggccccgccccttcgccccgcctccagccccggccctgcgcagaagcggactcaaaggccggagtctaagggcctacctaagggtaggggagtgggaagaagaccagggccgtcgttattaggccacacaggcctggcactgagggaaaaaggggaatttcccgaggggagtcctgtggggatggggaaatctttggaggaatccagttattcgagaaggacttccccaccccacctgcctccttcagccatcccaagcagcagctagaacttctgtagttcttcctctgagtgccccgagcctgctgtctgccagaaagactcctagactagaggattggacagtagggtcaaaaccctaacccttggttgaccaccggccttccctatcaggacgccccattacctcccttttcctcctgcttcccctgaaagaggagtctcagcagttatttacaaagatttattacagcacgggaggggttcaggcctggagtcagggaagaaggggaaaggggcagagcagctgggggacaaggaaaacctggcgccccccgctgtgtgccccaccggggacataaactaggcggcattcctggcatcaaagcacaaaacgcaacaaagaggtctctgccagtccatcttccaggcacccaggaggagcaagggtgattaagggaagattcccaaaatgttgaggctatggagaaaaacgccttagtcctggaccctggtagaagccggtgagagaagtggtgacttggaatcctccataggaaagtgggtagaaaaggatctaagggtacctcaaggttctcaggacctcctttccccagatcttagggtcctgccctgtgggtctcctgtgtccaggggagaggatctggggagtagaattgtgaagggcaaatccctgttcccggttttctggattttccaatgtgggctgtctcacatcccacctcccgctgggtgaatggaggaatgactggcaggggtgggcatcaggcagcaagtgcccaggttctctgggtatcagccaaaggtgggcaaacaagcaaacacagaccagccttagtcttctagaagtcagaagccgcagccctagcaggcgaggggaagagcacaaaacagggtgaggatagagtgggtttctggggaacagcgatgtcccctccacttcctcctgggagatgcaggctgggtgcctatgtgccaggctcagagggggaagggcgctgaggttcctccccaggctctgaaaggcaagcagagagggactcagggcctggccccacccaccaagatcccagcccctcctccccatttcacactcccaagccttaccacttagtgctgggtcttccacttggtcctcagagcctccatctctctcggactcatccagagggggtgggcgctcccagggcccttccagaccctggccacaggttgtcttttgcccagctggggatgggaaagaagagataagaacacaggctctgcgtatccatccggctgtcctggagtgtgagctaagtgtctgatggctgaggttaagctttccaggggcatcatggaagcatggagagagaactgggctagaacagctctcccagcaactagccatatggcttacgtaagtcagttagtacctttctgaaggaaatagaaagggggaaattgtgtagattaccttaaacaagatgtaatagtgaataccctgcccagcccagcgccagcacccaggagccactaggagtcgtggtggtttatattgctccatcataggactatcatttgacccggtgcccttctgcattttttgtttgtttgtttttttttgttgttttgttttggttttttgtttttgtttttgagatggagtctcactctgttgcccaggctggagtgcagtggtgcgatctcagctcactgcaacttccacctcccaggttcaggggattcttctgcctcagcctcccaagcagctg

SEQ ID NO: 1244800 - DNA, 4001 bp, Homo sapiens
ttttctttcctttcttcctcctttcctttctttctttcttaaagatgggttctcattatggtgcttagactagactctagacccaattcctggcctctcaccatgttgcccagaccagactcaactcctggactcaaggaatcctcccacctcagccttcaattagctgggatcagaggtgtgcaccaccatgcctggcactgtggatatttctaagtgattattcttctcaaatgaactacataaaaaacaaaagattcatgaatttactaatggttctttgtgatggatgtgctaatatagagactaaaatcaaggctccaacctctaaaacatttttttttaaattccagacttgtttccccatcccactgtgcaaactgaacaaaaactgggctagcactcctgtctggaacatgtaataaggaaataaatgtgctgactcagagaacacagacatatttaatataaaataagatagaaaactggctgaaccaagtcataacacagtctaaatccacatataaaagattgagatgattttctgctttgctttattcaagcccaatgctttatcagcacagccagccaaaaatttacaacccatacacagactatgtaaacctttagttgcacatacagtaagaccagcaggtacacactatacacatttttaattaaaaaaatgactaaccactgattttgtcaccacacttaacaacgacctgatatggcacagagtgatgtgtaccaaacatggaaataccaacttgggcgacggtttgaatcttgttaacttcagtgcaaccacaccccccaaatgcatgtaaagtttgcacacatggttttttcaaggccagcctgtctttgtttccctctcctctgcatttacccaagatcttggctctgagacagaaaactcccactctcaattggttcattccgtcctatgcaattaagcaacaccacaatccagtaaatgcaatggctcaattatttatcttctggccgactttaccaggtatttggaaaaggacaatgtcaagaggtttatttctctctctagagctggcttgacgggttgatggggattttattttgtctttttttctcttttttacaaggcggggacgtggggggagcataatttaacctagaaaaagatgcgagggaatttagaaagagtaccggtctgtcaatttccctacaggaaacttgattcttatgcaataaagcctacccacgaccagccagcccgtaaggctgcaggcgacagacacacctattcctgcctccaaaagggcacagctgtctcctgaaggagcgggaacagggcaagcggaggaagtggctcagcgggagccgccgaccgggcggggaggaggcgctttccgaccccccactcgcgccggtgatccccgtcggcgtgacagtcgctccggtggccggaacgtccccagggccccagggagcaggaaatcgggggactgtccctcactcctgccgccgcaaccgagtgcgccctcgccccacggtgccccctcgagcgcgttctgtttctccgaagaacgaaacttccctccagcgccccgagtcccttccgaggcccgctcctgtcatcccgaagagtcttccctcagggcgaccctccgcgtctcttcatctctcccggccccactgcagcgtccatcacaacatccccaaggtcccagaggccccctgccgctgcggagcccccgggtccccaggcctccccaacggccccaccctgcacccccttcacctgtttctccggcagaggccgagaggccggggctgcgcgtgtgccggggacgggcggcgaggctccctcaggccgaagggcctctccgagccgagggggagagacagcgccaagccggggtgcctgtccaggatccggttggggcttgttccctcggctgcgacgtcggaacccccggctccccctcccagtctgcgccgccgcagctccggaaaccgctgaattacagccccttcagccaatcctcgcccagccccagcctggccgaggcacgccgtcatgcataattcatgaaaggccagctcgttcggccacccagaggtcccagtgcgtgtgcggtacagccgaagccccgcccactgaccaatgaggagagcagctaggagaaagggcggagccaagaggagactgatacgcccctgtgctggctgttccgacagttcggtgctcctccctccgccacagcgagggaagagccgaggacttgggcacagaagcccggggggagggagggaagatgaccggaatgtcctgctgaaaactcagctgagttcctggcagtgcgtgacgtcaaggcactttaaatgcccctgatacagctccctcctgcccgctctcccttttcccggcccttggcaccacgtggtggcgaggttgagagcctcttaccacgcgggaatcagctagttagatagtccccaggtatctccagatcctctggggacccaactcctgaattgggttctggggacaacaaaaagaacatgggtgactccgcctgctttgaacttcagtttctgcgtgagcagggacacacacacccggaaacatgacgtggaaatagagtaattactagagtgcgtggggagagggtagtggatttaaccccgtactccgttccatcacttcaagcatcaaacgccgaccagctagcccattggcccgtacaggcgaatgcagaagacggtgtatacgaaagctgataacgtgtagggcttgacatttttatgcgtctgaattgaaatacatgaaatgttctgcctttttcttttccaccttgcctacttggtatgcaagttttactgaattgaagccagtggttgataggaaatgtagacattttgcctttcataatagaggatgaactttgcataatggagtgatttctgtgtatgtgctgatactatcagggtttttaatttttatttttttgggtctttaaaaatatgttattaatatttgtgtttgtttaatacgaacaggtataaagacaaaaatctaaaaaggacccattatctcactgctcagctaacccctgacatattttttttcaatgaacctaatacatgttcctgtttagaaaatgcagaccgttcagaaaggtcaaaaatattaaatgaaaatctttccctacccccatcattccttctccccaaggatagctgttcttattaatttctagtgagaaaaatcaatgactcttaacctttgaaggcagtcacagatccttctgagtgtttgaaggagactagattctagccccagaaacaatacaaggttttactcacatggttccccagatacctgaagcctgtctaagtctacagattcagaccgctcgtaccacctcatatccaatgagggacagaggcatctacagggcaattcatagggtcactggtggtgagaattgagaacctcctattgccctctggtagacacagctcagtatggaaattgctgtatttacctgtagagtgtgtgtgtattgattaggctgtttatctacaccacaggacagatatcccccatctccgcctatagtctcttgtaactacgctatcccgtgcggccaactgcctccctgataacatagggtctaggatttgtttagtgatttactgcttacaaaggacttacacaccttatacactccctgcctggtttctttctcacaatcatgaatagcagataggagaggccatattatccgctgatagaaaactaaagacaacataatatgacattttcaagatcacagagaaactcagaaatataccaggttcagagtcaggtttgggggctttacgtcccatagctttgttccattcattcaaaccctgccctgcttctgacttctcaagagctggcctctgtttccctcattggcctccccaccagtaacacataaaatctacctctgcgactatgggtttga

SEQ ID NO: 1244801 - DNA, 4001 bp, Homo sapiens
cctttggcctcaattttcttatctacgatattagggtaattgttatgtgaactacccacctcacaagtcctttgtgggttaattcataactgtgctgtgggtatttctttttctttcctttcttcctcctttcctttctttctttcttaaagatgggttctcattatggtgcttagactagactctagacccaattcctggcctctcaccatgttgcccagaccagactcaactcctggactcaaggaatcctcccacctcagccttcaattagctgggatcagaggtgtgcaccaccatgcctggcactgtggatatttctaagtgattattcttctcaaatgaactacataaaaaacaaaagattcatgaatttactaatggttctttgtgatggatgtgctaatatagagactaaaatcaaggctccaacctctaaaacatttttttttaaattccagacttgtttccccatcccactgtgcaaactgaacaaaaactgggctagcactcctgtctggaacatgtaataaggaaataaatgtgctgactcagagaacacagacatatttaatataaaataagatagaaaactggctgaaccaagtcataacacagtctaaatccacatataaaagattgagatgattttctgctttgctttattcaagcccaatgctttatcagcacagccagccaaaaatttacaacccatacacagactatgtaaacctttagttgcacatacagtaagaccagcaggtacacactatacacatttttaattaaaaaaatgactaaccactgattttgtcaccacacttaacaacgacctgatatggcacagagtgatgtgtaccaaacatggaaataccaacttgggcgacggtttgaatcttgttaacttcagtgcaaccacaccccccaaatgcatgtaaagtttgcacacatggttttttcaaggccagcctgtctttgtttccctctcctctgcatttacccaagatcttggctctgagacagaaaactcccactctcaattggttcattccgtcctatgcaattaagcaacaccacaatccagtaaatgcaatggctcaattatttatcttctggccgactttaccaggtatttggaaaaggacaatgtcaagaggtttatttctctctctagagctggcttgacgggttgatggggattttattttgtctttttttctcttttttacaaggcggggacgtggggggagcataatttaacctagaaaaagatgcgagggaatttagaaagagtaccggtctgtcaatttccctacaggaaacttgattcttatgcaataaagcctacccacgaccagccagcccgtaaggctgcaggcgacagacacacctattcctgcctccaaaagggcacagctgtctcctgaaggagcgggaacagggcaagcggaggaagtggctcagcgggagccgccgaccgggcggggaggaggcgctttccgaccccccactcgcgccggtgatccccgtcggcgtgacagtcgctccggtggccggaacgtccccagggccccagggagcaggaaatcgggggactgtccctcactcctgccgccgcaaccgagtgcgccctcgccccacggtgccccctcgagcgcgttctgtttctccgaagaacgaaacttccctccagcgccccgagtcccttccgaggcccgctcctgtcatcccgaagagtcttccctcagggcgaccctccgcgtctcttcatctctcccggccccactgcagcgtccatcacaacatccccaaggtcccagaggccccctgccgctgcggagcccccgggtccccaggcctccccaacggccccaccctgcacccccttcacctgtttctccggcagaggccgagaggccggggctgcgcgtgtgccggggacgggcggcgaggctccctcaggccgaagggcctctccgagccgagggggagagacagcgccaagccggggtgcctgtccaggatccggttggggcttgttccctcggctgcgacgtcggaacccccggctccccctcccagtctgcgccgccgcagctccggaaaccgctgaattacagccccttcagccaatcctcgcccagccccagcctggccgaggcacgccgtcatgcataattcatgaaaggccagctcgttcggccacccagaggtcccagtgcgtgtgcggtacagccgaagccccgcccactgaccaatgaggagagcagctaggagaaagggcggagccaagaggagactgatacgcccctgtgctggctgttccgacagttcggtgctcctccctccgccacagcgagggaagagccgaggacttgggcacagaagcccggggggagggagggaagatgaccggaatgtcctgctgaaaactcagctgagttcctggcagtgcgtgacgtcaaggcactttaaatgcccctgatacagctccctcctgcccgctctcccttttcccggcccttggcaccacgtggtggcgaggttgagagcctcttaccacgcgggaatcagctagttagatagtccccaggtatctccagatcctctggggacccaactcctgaattgggttctggggacaacaaaaagaacatgggtgactccgcctgctttgaacttcagtttctgcgtgagcagggacacacacacccggaaacatgacgtggaaatagagtaattactagagtgcgtggggagagggtagtggatttaaccccgtactccgttccatcacttcaagcatcaaacgccgaccagctagcccattggcccgtacaggcgaatgcagaagacggtgtatacgaaagctgataacgtgtagggcttgacatttttatgcgtctgaattgaaatacatgaaatgttctgcctttttcttttccaccttgcctacttggtatgcaagttttactgaattgaagccagtggttgataggaaatgtagacattttgcctttcataatagaggatgaactttgcataatggagtgatttctgtgtatgtgctgatactatcagggtttttaatttttatttttttgggtctttaaaaatatgttattaatatttgtgtttgtttaatacgaacaggtataaagacaaaaatctaaaaaggacccattatctcactgctcagctaacccctgacatattttttttcaatgaacctaatacatgttcctgtttagaaaatgcagaccgttcagaaaggtcaaaaatattaaatgaaaatctttccctacccccatcattccttctccccaaggatagctgttcttattaatttctagtgagaaaaatcaatgactcttaacctttgaaggcagtcacagatccttctgagtgtttgaaggagactagattctagccccagaaacaatacaaggttttactcacatggttccccagatacctgaagcctgtctaagtctacagattcagaccgctcgtaccacctcatatccaatgagggacagaggcatctacagggcaattcatagggtcactggtggtgagaattgagaacctcctattgccctctggtagacacagctcagtatggaaattgctgtatttacctgtagagtgtgtgtgtattgattaggctgtttatctacaccacaggacagatatcccccatctccgcctatagtctcttgtaactacgctatcccgtgcggccaactgcctccctgataacatagggtctaggatttgtttagtgatttactgcttacaaaggacttacacaccttatacactccctgcctggtttctttctcacaatcatgaatagcagataggagaggccatattatccgctgatagaaaactaaagacaacataatatgacattttcaagatcacagagaaactcagaaatataccaggttcagagtcaggtttgggggctttacgtcccatagctttgttccatt

SEQ ID NO: 1244802 - DNA, 4001 bp, Homo sapiens
cccttggggcagggcagaagagaaaaacctactgtggcacctccttgggcaaggaggtcagggagctggaataaagtggaaaccccaggctcatgaccgagggcactccagggcccacaagacttgttcccagcagctccacagacatccgagtctaaaaacattctctgtcctcccaggcttcccctttcccaggggcaccaccccttccgcacaaagaaggacaggcaggaccagagtcacaccaaaccaccatgagtaaaactagaggccaaagggcctggatggtagggaccctctgaggaggggcagggcgggacgtgcctaccatggctggctctcaatccactgggccaagtagtgccggacctcgatggggaagtgctggccgtacagcacctgcatctggcgcagcgcgtctccctgcagctgctgggcctggatccagcccgccatggccgttcacctagggcgagccgagcgctgaagcgctctcctctgcagaggccaaggaaccgggcctgcccctggccttgccatgcctacctatccctggaccgcggccaggccaggcccctcccctcccacagatagctttcctgtgcgggaacagagatggtgaggagtggagggccgcccatcccctccaacaaggaacccgctgaaggggaggggaaggtgctctgcagaggcaggtgccctccccgtcttcctctcccctcgccccaccggagcttccctagtgagggggacggccagaaactgaaagagaaacttgacggcgggaggcccacaggccccctggagagggctgcaaggatcccccagcccacctcgggcccggtttctgggaaggggagatattccaacccgaagttaggccagcgccacgacggctcccactcgacggctagggcttttcgggcacgtggctggggctgttcaggagacagggctgaggacttgggcgctcccctcttcggctgctcccccatctgtgcactagtgcctccccgggtccagcccgacaggtgctccctctccgaggcgtgccaggacggcgccctccctggcctctgcctttcatccccgacccctgtccccacgtccccccgtccctcgtctgcgctgggccaactccctcgcagtgccggggactgatccccgcgctgcgcccggccgtcgagctccgggtgccggaggtgccggggcggcagtagagtgtcccctctcggcgcgccgccgaggacgcgccaccgggtcacccacctggtggggccgcaccgtccggcagccgggccggctctgcgccccgcggctctcgctcccggccggggttcctggcggcggcggcagcggcggctgttactacaggaaggagcggagagcagcgatttcctcctcaaaggtcagctgcctgcgatagaccatacacagcgcgcgagcccgcgccagcagccctcccagccccgcttgctccctccctgcctcgccctcagtcgccggctcccctgcaagtgcgcaacagcggcggccgttcccggcgggcggcgccgggcgtgggggctgccccgacggcggggtcccccgggagtcccagcaggccctcggcggcggctcccagggagcgtcccggaaccggggcgggtcagaatagccgggggaatgtggttgtcgggcgttgccgggaaatcccgggctctggaaatcccaaacctgggcctcagttttctcatccgcaaaaagggaggagggaaaagtggaccaattggcgacgccttccagctctggcgcgtgtcatcttttgagcccctagattaaaaaataaatgtgtggggtgtgtgtgtgcacgcgcgtgtgtgcgcatgtgtgtcttgggggccacaggttttgtgacctcagagacaaaactgtagagaggggaagaactggggattctagtgaagccaagatcacccccaccaccgcagcacctccctccttcttttactccggccatctaaactcaaccctgacggaggaactggaaagaatcttggcagtcatgtgtttcagccctccccctctccacaattttgcaggtaagaaatggaagtcctgagagggaaaggggcttgcccggggccacccagggccacacagtaggcacgtggcctcaccagccgactgtgatccataaactagccagcgcccccgttcacccagcctagttacttatgaggctggttctaccttcagaaaagtccagggagggaccgtcttgagtcctcctaacttcgaaactctctacaggccttgccacagcagtgaatatcctgtctagagcctcagtccccctctccaagaggccccttcccacgaggcccaaggggtttggtaaggtcgggctggacgccttccatcccctttgcccagcttccctctcctctgggcctcccctctgcctggcagcgggttggcagcaccagaggaggggccagcccagctgcccactcacagcacagctgggccaagactgcatgttctgttggggggggtgcattctcatctgcctccctccccagctgcttctcagagctgcccttttctctccatttccactctcctttcttgccccttactacctctcccagtttcattcttttaacttcagaggaaaaaaaaaaaaagaacttcaaagctgcagaagccaaaatgtctgcgttctccccaccttctctgtgtggtcacagtgtcttagttggcaggatcacgaggaaaggaattgaaaactctaagggggtgcatggaggatgtagggaagccttgcttcccagatgctctgcagggggccccagggaggaggaagtatagtccctctcctctcctttcccactctgagcaatggatttggcaggggagggtcagacacagagctagggggtcaactggaatgaaagccaagtgccacagctggaagtgaccataaagatgattttacaagtggaaaaacaaaggccagagaggggaagtgactttgccaccgtcatgcagcctgtcggtggctggatacaaacccattgccacatttgggtgggtcccacttggcacctgtgccctccagcagttcccttcaggcaggtgtggaagtcagttgatgggagcagattcctcaggttttcaagtcctctcacccaggtctggagggcagagggccacccttgccatgcactgacatctgggcacctgatggggtgggggtgcctgcttaagagagggggtcctgcctgctctcttccaggcagccacctctctagacttctcctccagggcctgcagaggcctgttgctccagcaggcagccccacccaccaaacatctgtcttggttgggccgggcttggctttagtgtgggtagtcctaggtcctaaaaagctagcattgaggtgccagagtacagaatgggaaggatgggcctaaaagggtgtgtggctgtgttttcagagccctcccgtgcctcccaccctgaccctgtgcccagtggctgtgcccttggttgaccatccctcatttggtctctgactgtaaggccccgaatatctgtgtctttcattgcacatttccccttctgggttttttttttttttttttttttgagatggagtttcgctctcgttgcccagactggagtgcaatggcgcgatcttggctcacagcaacctccacctccaaggttcaagcgattctcctacctcagcctcccgagtagctgggattacaggcatgtgccaccactcctggctaattttgtatttctaattttgtatttttagtagaggcggtgtttctccatgttggtcaggctggtctcgaactcccgacctcaggtgatccacccgcctcggcctcccaaagtgctggaattacaggcatcagctaccatgcccggcccccactctggcttttattctctctgtgtctctcccttgtctccttaggtctccatctggttctctgattct

SEQ ID NO: 1244803 - DNA, 4001 bp, Homo sapiens
tcctccccgtaggtggcccagagcctacacccacctggagctgcgtggcgtagtgccccagcttgatcttcagtaaaaacccatcttcccccacctggtgctccgccttcttctgcagctcctgcaccaggccctccaggagctgggtggcttgggctctgtcctggggattgtccaagtcaatggcatcccttggggcagggcagaagagaaaaacctactgtggcacctccttgggcaaggaggtcagggagctggaataaagtggaaaccccaggctcatgaccgagggcactccagggcccacaagacttgttcccagcagctccacagacatccgagtctaaaaacattctctgtcctcccaggcttcccctttcccaggggcaccaccccttccgcacaaagaaggacaggcaggaccagagtcacaccaaaccaccatgagtaaaactagaggccaaagggcctggatggtagggaccctctgaggaggggcagggcgggacgtgcctaccatggctggctctcaatccactgggccaagtagtgccggacctcgatggggaagtgctggccgtacagcacctgcatctggcgcagcgcgtctccctgcagctgctgggcctggatccagcccgccatggccgttcacctagggcgagccgagcgctgaagcgctctcctctgcagaggccaaggaaccgggcctgcccctggccttgccatgcctacctatccctggaccgcggccaggccaggcccctcccctcccacagatagctttcctgtgcgggaacagagatggtgaggagtggagggccgcccatcccctccaacaaggaacccgctgaaggggaggggaaggtgctctgcagaggcaggtgccctccccgtcttcctctcccctcgccccaccggagcttccctagtgagggggacggccagaaactgaaagagaaacttgacggcgggaggcccacaggccccctggagagggctgcaaggatcccccagcccacctcgggcccggtttctgggaaggggagatattccaacccgaagttaggccagcgccacgacggctcccactcgacggctagggcttttcgggcacgtggctggggctgttcaggagacagggctgaggacttgggcgctcccctcttcggctgctcccccatctgtgcactagtgcctccccgggtccagcccgacaggtgctccctctccgaggcgtgccaggacggcgccctccctggcctctgcctttcatccccgacccctgtccccacgtccccccgtccctcgtctgcgctgggccaactccctcgcagtgccggggactgatccccgcgctgcgcccggccgtcgagctccgggtgccggaggtgccggggcggcagtagagtgtcccctctcggcgcgccgccgaggacgcgccaccgggtcacccacctggtggggccgcaccgtccggcagccgggccggctctgcgccccgcggctctcgctcccggccggggttcctggcggcggcggcagcggcggctgttactacaggaaggagcggagagcagcgatttcctcctcaaaggtcagctgcctgcgatagaccatacacagcgcgcgagcccgcgccagcagccctcccagccccgcttgctccctccctgcctcgccctcagtcgccggctcccctgcaagtgcgcaacagcggcggccgttcccggcgggcggcgccgggcgtgggggctgccccgacggcggggtcccccgggagtcccagcaggccctcggcggcggctcccagggagcgtcccggaaccggggcgggtcagaatagccgggggaatgtggttgtcgggcgttgccgggaaatcccgggctctggaaatcccaaacctgggcctcagttttctcatccgcaaaaagggaggagggaaaagtggaccaattggcgacgccttccagctctggcgcgtgtcatcttttgagcccctagattaaaaaataaatgtgtggggtgtgtgtgtgcacgcgcgtgtgtgcgcatgtgtgtcttgggggccacaggttttgtgacctcagagacaaaactgtagagaggggaagaactggggattctagtgaagccaagatcacccccaccaccgcagcacctccctccttcttttactccggccatctaaactcaaccctgacggaggaactggaaagaatcttggcagtcatgtgtttcagccctccccctctccacaattttgcaggtaagaaatggaagtcctgagagggaaaggggcttgcccggggccacccagggccacacagtaggcacgtggcctcaccagccgactgtgatccataaactagccagcgcccccgttcacccagcctagttacttatgaggctggttctaccttcagaaaagtccagggagggaccgtcttgagtcctcctaacttcgaaactctctacaggccttgccacagcagtgaatatcctgtctagagcctcagtccccctctccaagaggccccttcccacgaggcccaaggggtttggtaaggtcgggctggacgccttccatcccctttgcccagcttccctctcctctgggcctcccctctgcctggcagcgggttggcagcaccagaggaggggccagcccagctgcccactcacagcacagctgggccaagactgcatgttctgttggggggggtgcattctcatctgcctccctccccagctgcttctcagagctgcccttttctctccatttccactctcctttcttgccccttactacctctcccagtttcattcttttaacttcagaggaaaaaaaaaaaaagaacttcaaagctgcagaagccaaaatgtctgcgttctccccaccttctctgtgtggtcacagtgtcttagttggcaggatcacgaggaaaggaattgaaaactctaagggggtgcatggaggatgtagggaagccttgcttcccagatgctctgcagggggccccagggaggaggaagtatagtccctctcctctcctttcccactctgagcaatggatttggcaggggagggtcagacacagagctagggggtcaactggaatgaaagccaagtgccacagctggaagtgaccataaagatgattttacaagtggaaaaacaaaggccagagaggggaagtgactttgccaccgtcatgcagcctgtcggtggctggatacaaacccattgccacatttgggtgggtcccacttggcacctgtgccctccagcagttcccttcaggcaggtgtggaagtcagttgatgggagcagattcctcaggttttcaagtcctctcacccaggtctggagggcagagggccacccttgccatgcactgacatctgggcacctgatggggtgggggtgcctgcttaagagagggggtcctgcctgctctcttccaggcagccacctctctagacttctcctccagggcctgcagaggcctgttgctccagcaggcagccccacccaccaaacatctgtcttggttgggccgggcttggctttagtgtgggtagtcctaggtcctaaaaagctagcattgaggtgccagagtacagaatgggaaggatgggcctaaaagggtgtgtggctgtgttttcagagccctcccgtgcctcccaccctgaccctgtgcccagtggctgtgcccttggttgaccatccctcatttggtctctgactgtaaggccccgaatatctgtgtctttcattgcacatttccccttctgggttttttttttttttttttttttgagatggagtttcgctctcgttgcccagactggagtgcaatggcgcgatcttggctcacagcaacctccacctccaaggttcaagcgattctcctacctcagcctcccgagtagctgggattacaggcatgtgccaccactcctggctaattttgtatttctaattttgtatttttag

SEQ ID NO: 1244804 - DNA, 4001 bp, Homo sapiens
gtgcctaccatggctggctctcaatccactgggccaagtagtgccggacctcgatggggaagtgctggccgtacagcacctgcatctggcgcagcgcgtctccctgcagctgctgggcctggatccagcccgccatggccgttcacctagggcgagccgagcgctgaagcgctctcctctgcagaggccaaggaaccgggcctgcccctggccttgccatgcctacctatccctggaccgcggccaggccaggcccctcccctcccacagatagctttcctgtgcgggaacagagatggtgaggagtggagggccgcccatcccctccaacaaggaacccgctgaaggggaggggaaggtgctctgcagaggcaggtgccctccccgtcttcctctcccctcgccccaccggagcttccctagtgagggggacggccagaaactgaaagagaaacttgacggcgggaggcccacaggccccctggagagggctgcaaggatcccccagcccacctcgggcccggtttctgggaaggggagatattccaacccgaagttaggccagcgccacgacggctcccactcgacggctagggcttttcgggcacgtggctggggctgttcaggagacagggctgaggacttgggcgctcccctcttcggctgctcccccatctgtgcactagtgcctccccgggtccagcccgacaggtgctccctctccgaggcgtgccaggacggcgccctccctggcctctgcctttcatccccgacccctgtccccacgtccccccgtccctcgtctgcgctgggccaactccctcgcagtgccggggactgatccccgcgctgcgcccggccgtcgagctccgggtgccggaggtgccggggcggcagtagagtgtcccctctcggcgcgccgccgaggacgcgccaccgggtcacccacctggtggggccgcaccgtccggcagccgggccggctctgcgccccgcggctctcgctcccggccggggttcctggcggcggcggcagcggcggctgttactacaggaaggagcggagagcagcgatttcctcctcaaaggtcagctgcctgcgatagaccatacacagcgcgcgagcccgcgccagcagccctcccagccccgcttgctccctccctgcctcgccctcagtcgccggctcccctgcaagtgcgcaacagcggcggccgttcccggcgggcggcgccgggcgtgggggctgccccgacggcggggtcccccgggagtcccagcaggccctcggcggcggctcccagggagcgtcccggaaccggggcgggtcagaatagccgggggaatgtggttgtcgggcgttgccgggaaatcccgggctctggaaatcccaaacctgggcctcagttttctcatccgcaaaaagggaggagggaaaagtggaccaattggcgacgccttccagctctggcgcgtgtcatcttttgagcccctagattaaaaaataaatgtgtggggtgtgtgtgtgcacgcgcgtgtgtgcgcatgtgtgtcttgggggccacaggttttgtgacctcagagacaaaactgtagagaggggaagaactggggattctagtgaagccaagatcacccccaccaccgcagcacctccctccttcttttactccggccatctaaactcaaccctgacggaggaactggaaagaatcttggcagtcatgtgtttcagccctccccctctccacaattttgcaggtaagaaatggaagtcctgagagggaaaggggcttgcccggggccacccagggccacacagtaggcacgtggcctcaccagccgactgtgatccataaactagccagcgcccccgttcacccagcctagttacttatgaggctggttctaccttcagaaaagtccagggagggaccgtcttgagtcctcctaacttcgaaactctctacaggccttgccacagcagtgaatatcctgtctagagcctcagtccccctctccaagaggccccttcccacgaggcccaaggggtttggtaaggtcgggctggacgccttccatcccctttgcccagcttccctctcctctgggcctcccctctgcctggcagcgggttggcagcaccagaggaggggccagcccagctgcccactcacagcacagctgggccaagactgcatgttctgttggggggggtgcattctcatctgcctccctccccagctgcttctcagagctgcccttttctctccatttccactctcctttcttgccccttactacctctcccagtttcattcttttaacttcagaggaaaaaaaaaaaaagaacttcaaagctgcagaagccaaaatgtctgcgttctccccaccttctctgtgtggtcacagtgtcttagttggcaggatcacgaggaaaggaattgaaaactctaagggggtgcatggaggatgtagggaagccttgcttcccagatgctctgcagggggccccagggaggaggaagtatagtccctctcctctcctttcccactctgagcaatggatttggcaggggagggtcagacacagagctagggggtcaactggaatgaaagccaagtgccacagctggaagtgaccataaagatgattttacaagtggaaaaacaaaggccagagaggggaagtgactttgccaccgtcatgcagcctgtcggtggctggatacaaacccattgccacatttgggtgggtcccacttggcacctgtgccctccagcagttcccttcaggcaggtgtggaagtcagttgatgggagcagattcctcaggttttcaagtcctctcacccaggtctggagggcagagggccacccttgccatgcactgacatctgggcacctgatggggtgggggtgcctgcttaagagagggggtcctgcctgctctcttccaggcagccacctctctagacttctcctccagggcctgcagaggcctgttgctccagcaggcagccccacccaccaaacatctgtcttggttgggccgggcttggctttagtgtgggtagtcctaggtcctaaaaagctagcattgaggtgccagagtacagaatgggaaggatgggcctaaaagggtgtgtggctgtgttttcagagccctcccgtgcctcccaccctgaccctgtgcccagtggctgtgcccttggttgaccatccctcatttggtctctgactgtaaggccccgaatatctgtgtctttcattgcacatttccccttctgggttttttttttttttttttttttgagatggagtttcgctctcgttgcccagactggagtgcaatggcgcgatcttggctcacagcaacctccacctccaaggttcaagcgattctcctacctcagcctcccgagtagctgggattacaggcatgtgccaccactcctggctaattttgtatttctaattttgtatttttagtagaggcggtgtttctccatgttggtcaggctggtctcgaactcccgacctcaggtgatccacccgcctcggcctcccaaagtgctggaattacaggcatcagctaccatgcccggcccccactctggcttttattctctctgtgtctctcccttgtctccttaggtctccatctggttctctgattctgtctgggtttctctccatttcttcaggcctgttctccctttgagatgcagtggggaggaggaggagctatggaactttcccaggatgggcaaagggcacccaagggagtagagggaagggtgtcagagttgggttgggaagaggtgactgtagtcgtggctccagataacacaactacccagaaatgtcaaatttggggtttctttttgctttcagtccccttgtttgtccccttgtgtgggtgatttcccaccacaaagtgccctggtgattttggggaaccaggctgtggaggagaaaactgaggccacgggatgggg

SEQ ID NO: 1244805 - DNA, 4001 bp, Homo sapiens
tgacccaaggtgtggacttgtttgaattaaacgtaacagataccacaaattgtcacataggaagtttttcttaaaatcagcagccccttctcttatttagccatgtccattctaacaactgtgatcttccatgagatggaaactggtacccaaatgaataaacaaaacaacccaaagccttaaaataaaatcaatcaataagattctccccatttgaagtgatcagaaccactccaatatttacagtgttacaaaatgaaattttaaaacatgaaaggcacactcaataaaatacatcctcacctaggaactcacaggcaatgaacataacgcaatataacataagcaaatggacaacaatagaatgttggggagagaggcacagttctattaccttaattgaaagataacaaaattatttgaaataatgtagacccaacagctgaaagcttattatggcccaggcggctatccaacagctttggaaacctaagatccaagcagaccataaacaccacttgaagactgaaaaaaatgacataagcccaagtatgatattcagtgtcacgctggccctttcaaagggcattccctgaggacactgcagagaaaatgtatggaattgtatctaggcaaagatctgtatactgcacgatgctttgggaagagcacgaatctcagagtccttgaagtttcaatccctggatactcaacaaacagccgtgtcacctgagcaggccacttactccacctatctgggcctcagtttcctcatttgtacaataaaagaatggcatcatcgctgggttcctttccagctctaacattctttgacccacttttggcactatttatttgatacgaggtatggcgggatcacagggaccaagaagaaaagaactgactctggctctttggcaaagagagaatcggtatctcttttagtctttaaaattcttgtgcttttcattaatcccgtctttctaaaagctgacacttggttttcttctttggcttttccatcactgctggctacaagtgtttgcaaccgcctcttgctccgtgtgagttctttcctctttgttcaccccgaccatcttgccagattcctttagcctcagaccagcttttgtgatacaactccccttccgactctccatatctaccccccgacaccaggagcacttttaaccctttatccctgactagaaagaaaaagcacactgcatcccacggccacacgcacgagcccaggcctggcgggtcctgatgtgggatcccgccccccagagtcttatcgaaacgttcgtatttgttgtcttgattccttataaggccctgtttcttgaagctttgctaataccccccaccgcaccaggcacccccgcaggctcatcccatccccggagtcccgggaacctcttttgaaagaaagaagttaaagcaaggaagacggctggggatattcggaattgcaacgtgaaggtgtgaggcggctgacagcagccccctgagctcctatggggtcggcgcggggtccccacacacccactcagcacacgcgcacgcagcctttaaagcgcacgccccccgcggcgccgcggcgttcgcaagtccccctcgcgcaccccgcattgccctcagcctccccggcagccaacccggaccccctctccccgcgcgcgcccctcgcccagcgcgcaaccaccgcggcccgggagtgatggcggcggcgcggccctgacgggcggctgagcggctggagcgcgggccccgcccgggctggctccccggcctggctcccccggccccgggcccagggctcgccccgcagctcctacctcgctcggcccctcgggcgcccgcggctgctccggcccagctgtctggcttgcccgcccgcccgctcgctccctccctcggccgggccgccgcgcggagttgcctgcgctgggtccccgcccggggtgacggctccggccgccgactctcctcccgccggggcccgcgggggcgcgcgcgccgctcacgcgcggaggcccagggacgcgcgccgctggcaacccggagcgcgccccgcttcctggttccgcccggcgcgcgctcgctagcccgctgtccctcgcgccccctccgcgaccgcccttgaaggacccggaccccctcggcacacccgaggtggcggcgcgctcggcggtgccggtgccggcgccgcgcgcaccccctttctgcggcggtggggtgtcttcccggctcggctccctagccgacgccgcaccgcaagcacatgctgctttgtttgggttgggtcgaccaccactagcagggctagggcgcactgtcgtggtcgttttggttggccccctccgcggcccgcccacctctctccctgggagcccaggcccgcgttccgggtcctctcccgccgaggccgaggtcagaagtccacaggggccccgatcaataattatcctgggtttgcccccgggagggcgtctcagccagggctcctgccgcctgcatgggcacggcaggaattcacattcgcccaggccgaattcacctgtccgagttccagggtgaacctacgggggacggggcgcctggggccggttcccttcctgggaaaatctggctggctcccaccagtcagagctgcgggagggactgctctctctagagaagaaagaataaacagggtcatctgtaggatccaggggaagggggtcccccagatcctttccacgtgctgaggagggggttgcggttgtgggaagccaggctgagtcacccactctcctttcctctgctacgtctatctcccggagctggccagcggtttccctggcaaccctccaagggctagcactaaagcaagacataggaaagctccagaagccaagctgcaggggccaaaagagagagaaggacccctcccgcccccactcagacacacagagctcccctgtgtgtatgcaaaacgttcatgtccagagatggcccagagctgcaagttctcccatagtcctccctgggcagctctttccagcggccttctcttcacctccagaatgacaccagccacaaaggtctccagctggtcaaaaaacccttctccgctacccaggccactgctgcagtcccatactctgggccaacacctggcacagtgctttgcacagagtaggttcagggagcttggaggccagagaaggaagcaggaagcaggatggatgcgccaaccaaccccgagctctctggcaatctccctgacagttactgcccatgatgttttgacactcaggtgctccatgttctccatatttctcttttatcttttctttttcttttctttttttttttttttgagacggagtctctctctgttgcccaggctggagtgaaatggtgcggtctcagctcacggcaacctccacctcctgggttcaagtgattctccttcctcagcctcctgagtagctgggattacaggcgcacaccaccacatccggctaatttttgtatttttgtagtagagacggggtttcaccatgttggccaggctggtctcgaactcctgacctcgtaatctgcccgcctcagcctcccaaagtgctgggattacaggcatcagccaccgcacctgactcatgtttctctttcttgtgagctttcatccctgcacacatgctattccctctgcctggaatgtcctgccttcttgatgtctgcccttcggtgacatttgcttcaggcagcatgacctccctccttgtttcccaccgcgttattcatgcctctattacagcacttcttgtgttgaaggacaatttcatgttttcatgtttctgtctctgtccccaagggcagacgcaatatgctattcacttttaaatcctcctactcgtgttcaagcccagaacagacactcaataaatatttttggaacaaatgctatgctctaggaatgcaaatggaggttacaaggactatgcagtcat

SEQ ID NO: 1244806 - DNA, 4001 bp, Homo sapiens
cgtacaggattcattttactttacttttttgatacagggtctcgcccaggctggcgttcagtggtgtgaacatggctcattgcagccctgacctcccaggctcaagcagtcctcccacctcagcctctagagtagctggaactacaggagagtgccaacaggcccagctaattaaaaaaaaaattgtagagacagggtctccctatgttgcccaggctggtcttgaactcctggactcaagtgatccttctgccttggcctccccaggtgttgggattaggtgtgagccaccacacctggccccaacaaaatgttttaaaagctggtcctttgtctctgtgtctggacacactcccactcccgcaggccaaacagggcggggatgagcttggcaaaggggatgtgggaaccaggggctggcctggctgggtctgagctgactgaggaccaggcacttggaaactgcaaatagggatagagctgggactgaaagtggaaaatgagccactggatcagggtgcacaggaggccgcagtggttgaggttgagggtaggtgtcagcagtaagaacccagggccactgagtctcagccaggctgcacactagagtcacccaggggaggcccacctcaagatgacaacaggtccaggaggctcgggcactggaatgatgtttaaaagaattccctcttcccgccaggtgctcccttttacagtctggagggaacactgccacccacgactcccacaagatcggcggggcctacgggctcttcctgcctggcaccccacccagctcctcctccttgcctgcaatctctacccctacccagctggtgctccagtgcggccacctgattatctgcattttcctttcaaaataattccatttggggccccaaagcaatctatgttcactgtagcaaatcctgaaaacagagaaaagcacaaagaagaaaacagagaaaagcacaaaggggaaaacagacgttttccgtttttcccccaatgatttgcagcaatctgcggcagttttcagcctctgcaggttcccaaacgtgacttggctcctgctcttttccctttggtgttagcatctgttccggcacggttgagggattcttcagactccgccagctttgcctcttttgtagccaaacatttattgagcacttactgcatactgggtactacatgaggccacagggacccaaaggtctcagcaaaagctcgtggagccttcaggccagtccaggaggaggaggcctgacacccttcagcgggtcattttaaaggctcttgtgcatggaccctgtatgacatttttctttttcttttttcctggagattcatgtgttggtctttgttatggctgaggtttagtttcagacaatttttctaggctttcctggcatttaagggaggctgtgactgtgtcctctgccacttttccacacttcgtcccccaaaatatctcaagaaaagtcaagtcaccctttctcctttaaccctttagtagatttggacgtgctgcctccacccagcatggtgacgtcataacctggggctcccatctgcccctttctacacttggcatgaggtcgcctgactctcacccctcatgggcagaggcagggcagctgcagggtgggagggacagttctggccctgaaaggggccttcaatggaaagttgtcttccctgctcagccccattcctgctgctctcttcagagctgtaagaactgggccaaatggtgcccacaccttccaagccaacctcagatgaactcagggtcaacagggaagctacttcccatgctaagctgagggttctgtctctggcaacctgaatcatccactcacacagaggctgagttaaattaaccccgcattcaatgagggccggccacctgcacagtcttgtgggggctgcaaaaatgcatgagacttggcctccaccctcactcatggcccagactagggagcagcagacacatgctcagtgtggtcagagtttacaggggctttaagaagagagaggggaatccaggaagacttcctggaggagatggcaactgaacttggatttaagggaagggaagagataaggagagaaggacattccccaccatgggacacagggcagggtatggcagaacccaggggcccccagaggtgcatgggcggggaaccccagacggggagcagcagattcaggctagggggaagggagcaccttgtgggtgctgcttgttatgtgacttgaggagatcctggatggcagtctgggtgctggagcaggatgggggtgcatgggtgggcaatgggagaaaaggcaggaaaggccagtgagggcccctctggggtcttgggcagcaccaaggccaggcaccctggagaatgaaagtcacggtggtcccaagatggggcttctggaggcgactttcgagaaccgaatgaggactggaaagtctggagacgagggagcgcattgtccccagtggaagcgcaggacagtttccctcagctgcggtacaggacagaggccctgggtcacctgtgagttatttccccaaggtctctaaccaggccactgtggtggatgagggtccagagagcctcttccactacaagctccacatgcctgagcaggaaaaggccggaccttaatttaacccggatcgtttgccatcaggagggagattctgagatgttctcttccttccctccctcctgtgttccagggagctctgcccttgtccccacagccacaggggagccactgtctgtcctttcctcgatgagaggaggtgctctggggcacagccgagtcttctccacctctgtgcaccgcctggcacgcagggactctcaaaagaggcctgatgcacagaggcagggtctacacatgcgtcccttttaacccgaccgtccatttccatcccgatgggatgtgacactgcactcacaagcttgttcgggggcaggggggatcctgggtggggggaggtggcagggtttgaggcaaggtgcccatgtgcactggtggccaccctccgtccaaatgccccaggctcagacccaagtgataagaacttcaatggtgtggagagcgcctgcgtgggggaggcaagctgacacgcaggcccagggttccagaaagccccctagctccccgaggcccagtgcccagaaggcccagcacatctgcagcctcagagtgagctgtggtccttctcacccccagcctcctcttcacccttccccagctccccagtgctgggtggcgggagcggggtcctgggctgaattgtggtccccgcaaattcacatgttgaagccctaacccccctccccaacacccccgtaccttagaatgtgactctatttggagacagggcctttagagaggtgactaagtgaaaaatgaggtcatcaggctgggccctaagccatggtgggtttttttggtttgttttattttgttttgagacagagtctcgctctgttgctcaaactggagtgcagtggcactatctcggctcactgcaacctctgcctcctgggttcaagcgattctcctgcctcagcctcctgagtagctgggattataggcgcgcaccaccaccacgcccaggtatttttgtatttttagtagagacgaggtttcaccctgttggtcaggttggtctcgaactcctgacctcgtgatctgcctgcctcagcctcccaaagtgctgggattataggcgtgagccactacgcccagctgccatggtgttcttataagaagatgagcatgcgcagagctaccaggagcacacacagagggaagactgcagcggtgcaggacagaggtggctacccacggccacagagaggccttggaagaaacccacccgcccacacctggctagtgaggaggcatactgctgttctttcactgtggtgctttgtatgtcagccctaacgcacccagacgaggggcacagggacagg

SEQ ID NO: 1244807 - DNA, 4001 bp, Homo sapiens
ccctgggtggctggtggagccatgagactcagtgaggtggcccaggccaggcaccggcccacagccgccgggaaaggagccagcacggagagtccaggactgggggtgggggcagtgggcacccaggagcccagaaacaggccactaaaagggcaggtgggtgaactaccagccaggccaccagcatcggccacagggaggtcacagcacctcacccagagcagtccagcaggtgacaagcagagcatggacgggtgaagccctaagatgcagatggtgaagaatgttccccagcagcgggcagcagggtccagcatcccggcttgtccagcatcccggctcgtcctgagcccttgctgttccctagccagggtcccagtcaccacccgcatgagcccagtgccacctgctggtccttccagctgcttactgccagcagtaccagaaaggcaccagaaaaggtagagaaggcactatctccccacctgctccgggacccccaacactgctgccccaggccttggaaggaagaccacgccagagagtggcggatgccaggtctgcctcgacaatccatggggcttccccgtacatcggcagtggcctcggaaggcaggcccagcactggggcggttgtggagggtgcctaggacacagccagctttgccccatgacgtgggcgccacgccagggctacgggccccccactccccgtcattctcacgctcattctctgcaatgaccacaactccagctctggccagagcccctgggcctctagttgtcaggtgggcttgatagaacacatgacctcctggggtgtgtacccagtgccccgtctccggcagtggccttttggctactttaacctggtgttctcacaaccacccagtgaggtggcccaagcctcagtgactttctctttctgaattccggcaagaatcttcaactccaccaccagagttccccacaccgacaccccccgccccccacgcctgctgccttgggtgataaagaagggcctgattcaggagaaacagaattctccctgcttctacagggctgaagtcctccctccaggatgggttcacaagggcctgagaccctcccttcccaggccacagaggcccacgaggccctgctgacatcgaggaagctcggtgccccaaccttcaggtagagcagtagaaaggttcagaaaccactctgcctgcaccgatggggtcctctgcacatggcacccccagagagctccacttccaggaacagggaagagcagggcacgccctccagcctgggcggatcctggctcagacggcctaggtctgaccctagccctgctgagtcacttaacgcccccgtgcctcagtttctccactggcaggtggggttaatccctgtcaagtgtgtgtaacgtggagcaccgaagaaaccacgcgttcctagcccagtgctggcgcccaccggggagcaaacaaaagggaaaccactgtgcctggcggctggggtaggtcctgccggctcctcgggctggacgatctcactgtccccgtcctggggcctcatctccccttaacaaaagaccccaggctcagggcgcagggcggcggcccagctcctcctctctcttcgccggcttggactccgccgtgacggcgcccacccctgcctgtttctgcagaccctctccaccttcccgcagccccggctgctccacgccccctcctaccagctgcgagacaccagcccacgagggcgcggggcgcgcggcccggccggagatggagtctgagaacgggcccaacctcaaaggcacagggggcggcgcgggggctggcgtctggccctcacagtgtcacgcgtgaggtcgggacggagcgtccgcgcctgcctagcccctgccctccggccctcaccttccggaagccggatccagctcctgctccctccatgaccgcagcctcaacgcgcgcccaccggaaccccgccccgcgcctccagccaatgagaccggagcgcgcccccggagccccgccccgcgcccctagccaatgagtccgaagcgcctgctctcggagccccgcccccacgtctcagccaatgagcccggagcgcgccctccagcagcccctccctcacgtcccgcagccaatgaacttggaacgcgccctcccggggcaccaccctcacgaccctcagccaatgagcccggagcatgccctcccggggccccaccctcatgcccctagccaatgaacctggagcgcgctgccccctctcagcttgcggcccgaaaggcgcgccagttcctttgttctcattggcccgcaccaagcgctgcctgcgcagagcctgctaggagttgtagttcccgcggcctctcccggcgcgccttgttcttcctggatactgaggccccgacgcggctgtcgcgagggcgggggtcggggctgcaggcggggcagggctgggtgggggcgcgcgacgcacctgcctgcttcctgcacgggtggtccccaagcactgcggggccccagcccaaagcggaccttgactaccgcccagccccgcgctcccaggacctcccgcccgcggagcccactcggattgctctccgcccgggtcggcggaggccccgtctcctgtacccggcgctgggactgctccgcaccgcgcggctccctttcagcagctgcgggagcatgcggaggaggccctgccggccccgcgggtcatggaggagttccggcgctcctacagccgcctgtgcagggagagtggggccgagccccaggaggctgtcctgcagcagctgcaccagcttcccaggggccggctggacctggccacgcaaagcctgacggtggagacctgcagggccctgggcaagctgctgccgagggagacgctgtgcacggagctggtcctgagtgactgcatgctcagcgaggaaggtgggcaggcgcggcggggtggatccctctgctccttagctgcccacaccattgcctcggcagcccgaggtcgcttcctctccaggctctccaatttctgtgccgtagttaaagcgagcaggggcgccccttcctgcacctgggagtagagggcagttcctctgtatgacgggggagaggccttaacattcgcggtcttacctggttccccgcgtgcagagccggcttggtgcctggcaggggctgcaggtgtttcaaacatgacttcgcagcgagactcttggccagcgccaacccagaccatcgggacagttgtcccttcctgggtctagggagctgccctgaaaaggggcccacggggagggccttggggtcagcaggggcagagagtgaccgccggccccccttacacaggggccacactgctgctccgaggcctgtgtgccaacaccgtgctgcgctttctggacttaaaggtgagatacctgcactcttgagtgtccgagtgtgccacccaagggcaagaggagaggtggaagatgccaggtctcgggggcctggggtctgggcaggtggctggaagctgtctgtgagtccccaggccgctctctgatggcctcctgtgtgtgaccatctccagagcaagagttcacattggcaaacaagccggcccttggaagccccctgaagacagggagcccaggagctgaggaaggctgcagggtgcaccccaggcttgtcccctggctgaccaaggcccttggggcatgggcgggaattcagagccagtcagggcacgcgagtgactaccggcctgtttctctcctagggcaacaaccttcgggctgcaggggccgaggctctgggaaaactcctccaacagaacaagtccattcagaggtgggtggtggtcccgaccccaggccctgtctctgtgtggttgaggattggccccgagcacatgcttctgcagcccaagagttccccattgccaggtgcccatgtttcacatacgttggcaggggtaggcagaggctccggcccatc

SEQ ID NO: 1244808 - DNA, 4001 bp, Homo sapiens
tacctgttcctggtttcaaactccggagctcaagcaatcctactgcctcagtctctcaaagtgctgggattacagaggtgggccacggtacccagcctatcagaaacatttaacactatatatatatatatatatatacatacatacatatatatatacacatacatatatatatatacacacacacacacacacacacacacacacacacacaacaaagcaatattactagtggacagacatagaaatagctttattggccgggcgcggtggctcacgcctgtaatcccagcactttgggaggtcgaggctggtggatcacctgaggtcaggacctcagagatcggcctgaccaacatggtgaaaccccgtctctactgaaaatacaaaaattaaccaggtgtggtggggggtgcctgtaatgccagctactcggaaggctgaggcaggataactgcttgtaccaaggaggccgaggttgcagtgagcggagatcgcgccattgcattccagcctgggggacgagggcgaaactccatctcaaaaaaattaaaataaaaataaagagagaaaataataaacccagcaaacatttatggcaaacttcctacgtgtcaggcactgtgctaaatgcttcatgagcagctcacaagtattatcatctctgttttacggatcaggaaattcaggtgtgcagggaggttaaatgcccaaagtcacacagataagtggtaggggactaattaaatctgttccaaagcctgcgctctaaaaaccagagtaaacttcctccatttctggggccacaactataaacactgcattccagccaaaacacctctaagaaatctgattaaaaagtaggggacagatttgaccagttcagcactgtaactaaaggctgaattcacaggcttttggcaggtgatcaaatttggtttcttccttaactctcagggacaagaaacagtcctgggtgtcttcaggaaggtatgagtgtcaatgaagaattgtcttaacgtcgcatatacgtattggaacatgcttctacttgaacagatattacaataagaaaagggcaaattccaacggctctttctccgggaaagtcaagttaaagtatgttaggatacaggagaaggctgggcagagaggttagttccctatttcctgagaactatgaacaattttacctacccactgcccctccctcgagctctcttccttatccccaacccccatctccggcgcccaaatcccctgcaggcacccaaaaaacatttctggaaaacaaaaagacaatgagctcttcgtttaggccgattctgggagtcatctggatcttgtgtccttacgaggacttgacccgctgcctgtcagcccaaagtgcgcggcggctggggacagcggggagcccaggaccggggtcggccgccactctgcctgaacaggacaaaccggcacccagccctaggttccccacctggaagtcctagggggtggggaggaaggggaaagcaggagcccgcctctctcgcccggcaactccgcttcagcgtctccccgccaggcccaagcctattctgctctcgggctgcggcgcctcattgcgggagtcgaggacgcgggttaaaaagggggcccgtggagggtgaggtgagcccaggatggccgctccgacgaaggcccgggcctggggagatggaatcggtggcagagccaggagggactggccccggcagcgtaccaggcaccccgccaggcaggtacctgttcctggagttagcaagcagccccgaccgtcttggctccgcctcctcagttttactgccgcgccgccgccagaccggttgctgggaggggagtacgcaacgtgccatgcgcagtggggcgaccgggaggactgatagagcgctccgccccaccccgccctgcggggaagtcccgccctttccgagtggccgcggctgcggcaggccctagcagccgccgccgcgccgagagcggttctcagttcccgttgtctttcccgccgcgcagcgcttccgcctacagcctccgcccccgcagcaggagggggaagcaggtggcttcaacaatgaaggaccagagaaaggcaaacttggctgttcctgagaattgtgtttttctcatttcatgtggtaggacttctaatggaaaacccgcctcgcacttttcttggacgacatctcaaatgcccctcactttggcctctcgggcaccagacaacaagctgcaaaggggaagcccatcctttctttgctccccactatttgtaaaacaaggaaaatagctcaactaatgaaaacgatcttgtcccctcagtatctttttttttcccccgaagccttcctcatccacagctgaagccgtttgtggaaacctatcaggtttgtccaagccaggttatgcagagcttgagaaatgaggaagcgatgaactaagcctcactcctgtgagactaggtttttcagtgacttatcccccgcgtgcgcaggagggggtatccaaaacgcggatatataccatcaggtaatgaacactcgctcttgccagctctgagctttgacacagatttagaccgtcctaacttccaagactgggggaggagtttagctacatccaagtagggacttatagaaatatgcccctggaaggccgggcgcggtggctcacgcctgtaatcccagcactttgggaggccgacgcgggtggttcactaggtcaggagatcgagaccatcctggttaatacggcgaaaccccgtctctactaaaagtacaaaaaaattagccgggcgtggtgacaggcgcccgtaatcccagctactatggaggctgaggcagcagaatggcctgaacccgggaggcggagcttgcagtgtgcagagatcgcgtcactgcacttccagcctgggcgacagagcgagactccgtctcaaaaaaaaaaaaaaaaaaaaagaaaaaaagaaatatgcccctgaaactgtgggacctgtatgcacatgagttctcatttgatcttacatacatcactttgattttttttttttttttttttgagatggagtcttgctctgttgcccaggctggaatgcagtgacgtgatctgggctcactgcaacctctgcctcctgggctcaagcaattctcctgactcagcctcccaagtcgctgggactacaggcgcacgccacaacgcctggctgatttttgtatttttagtagagacgaggtttcaccatattggtcaggctggtcttaaaatcctgacctcaggtgatccaccagcctcggcctcccaaagtgctgggattacaggtgtgagccatctgtgctgggccacatcattttgattttatcgagtgctttgacattgctaagggctaccctcacatgctctcattctcaaaataagatgccactctcaggagcaaacttggtaaactcacaaagcaacagagtataaacagagaagtaaaatttctagcagtgttctactgaagggtctttcacatgtggtcttttggaaccgagtattagagagactgtctgaaaagatgctaaacttcttgcagccattacaaatgggtagagaaaacatattgtctcagaactgttctgttttagcagtctgtaacagaagacactcctatgggtataactctttttttttttttttttttgagacggaagtcttgctctattgcccaggctggagtgcagtggtgcaatcttggttcactgcaacctctgcctcctgggttcaagcgattctcctgcctcagcctcctgagtagctaggattacaggtttgtgccaccgcacccggttaatttttgtatttttagtagagacggggatttgccatattggccaggctggtcttgaactcctgacctcatgtgatctgcctgcctcggcctcccaaagtgctgggattacaggcatgagccaccgcgcccggcctcttgtctctct

SEQ ID NO: 1244809 - DNA, 4001 bp, Homo sapiens
gcattattttgcaacataagacaattatgaggccaggtgcggtggctcacacctgtaatcccagcactttgggaggccaaggcgggcagattgcctgagctcaggagttcaagatcagcctaggcaacacggtaaaaccctgtctctactaaaatacaaaaaattagctgggcgtggctgcgtgcgcctgtagtcccagctactccagaggctgaggcaggagagttgcttaagcccaggaggtggaggttgcagtgagccatgatcgcgccattgcactccagcctgggtgacagacagagcaagactccgtctcaaaaaaaaaaaaaagaagaaaagaaagttatgctttcaaagaatgtccaatgacatagagaaatgctgtttatattatatatatatataaaaatatagattaaaataacaaattcattgtaaaaaaatcattaatggctatttccaaattatagagttaaagatgctatttattttcctttttgcaaattttcaatattctctaaattgaatattctctatcaaggggtgtatataactgttaaaattagggattttggggttttttatttttttttgagacggagtttcgctcgtgttgcccaggctggagtgcaatggcacgatctcagctcaccacaacctacacctcccgggttcaagcgattctcctgcctcagtctcccgagtagctgggattacaggcatgtactaccatgcccggctaattttgtatttttagtagagacggggtttctccatgttggtcaggctggtctcgacctcccgacctcaggtgatctgcctgcctcggcctcccaaagtactgggattacaggcgtgagccaccaccgcgtccggcctaaaattaggtttaaaaaagtaaatgctaaattaaataattggcccaaataacctagattccaggtaactcaactttgttcttggaatccattcttctaatatccaggatgtgggcaacttaaacaattataaactatattagaaataacaacataagacacatattccaacaagaacgttatagagctgtaatatgtttttaattattaagcagaaaggtcaagtctatgttcaataacaatacgttccttgggatcaaacaatatgttccttgggatcaaaagttgcatctttcatcatgcagtccttgggattaactgctaaataaatcacccttatcagctattgttttactgcagaagctactgctaaaggaaaagacttcatgatattaactcaagaaagtgcaaaatgccttataaacaagtgcacaatttccctcccaggttcctgtatctggaagggcccccaagatctaggtcttagccccagctggttactaactggctggtggccatggattctgaacctcggtttctccacctgtgaaataagggggtttaccgggatggactgacatgctacaaaaacgttatttcgacttcacttttataggagtccagggaagcctgcaccagccagctagctccaaaaccaggatgggcgggaaatccccgcaacgagatgcagcccagaaaagctaaaggaatattcagagatttggcgtaagtcctcagctctccagcggaccacctggtctccttcccgggccacccttgcaaggaccaagtgtggcgggatgtggctgagccccctcagtaaaggaaaggtctcgctgcccctcccctcatcccgaaaggccaccagcggcaatgcgaagtgattgcctgctctccggaagcccggcctccccgaaggtccctccacgcaccgccgccctcacccgggactcaccaggggtccggtgccatcctgcagactccgcccgccgctcggactcttcctgctcttagcagctgactacggcggcccgcgcggctcactccccgcagttcgtcccgtgcgcgaccggagcctggagtttgcaaagtgagtagctagggcctcagaactataatcagagaaagcaaagcgctcccctgcggacagtacactggagcaatctactcccaccaagagacgcgaactgctaagctcagttaaaattgttaaatagaaacaaagcattttcccaggaaggtgggagcgctgcaagacctctctgtagcagttacttaaaaatttatcctgcttcaaaaacaaaacaataaacaaaacactagattgcggtgagacttgcacgctgcgtaaactcactacaacctactttaagttaactttatgatatgtaaattatacctcaacgctttttaaaaaatctttaaaatttttttcacactgctccaaacaggggcccaaagaagtatcaattatatatattttttatagcagccttcctatcagtcctgtacgcctgattacatattttttaaatgccattcattcggtgcttgattttagagttactaagaagtcacagactctacacaaggggatggaggaattagttctgcgcagttagtgccatcccctaaatttccagagaaatagcacaaaaaaaaagaagaggagtcccaccccatctctcttccagtccccataccccttcatttccaagaatgctaatgaactcgaactcggcaggctgggtttctgcgcgggcgtggagctggagcgcatgcgctcgtccgttaccataacgaccagaagacgctgcagccactagggaggagagcaaagtaatcagaacctcccaaggatggataacaaaatttcgccggaggcccaagtggcggagctggaacttgacgccgtgatcggcttcaatggtgaggcctccagcatctttgggctggctggtttaggaattcggaggacgtgtagtgcaaacaggaatagtgagacaccggggacacctgaaaggcagtgtgggacaacggcaggagccctggccagggacacgcacaggaggacccgcacagcctgacctgccccaaggccttggagagtcacttcctcgatccaagcctcagggagtgagatggtttttaccagctcggacaagcgccagcacctaaaagggaccaaatgcctcttccccaggcgggccggatgagtacgggtggttgtaacccttctcccactaggtcagcccttcctggctctgaaccccacgccgctcgcaaagccctaggctccttcgtaaccacacagaaggatgctgtctgtgtcggcccctgggaccagctaggaaatctgctaaaatcccaactggcgtaccagtgagaaagggctgggagggaacgtgtgtttgagcaaccccctgaggggatgttgttggtcctctaatcctaaggaaggtttctaaatgatgaggatttcagaccaggacagaaggggaaggggacgccagggggagctaaagcggagagaaaaagggactgggccgctccgctgaaatcttatttgtgactgcctattgttttgaagattctgggaagaaaaagctgtggggttttattgttcgttttgaggggttttggttttttgagggatgagaaaacaatgaattagattttaggagaagcaaaacttttcaaaaatgtgtgttgtgatgcctgaaagctttaagaatgtggatgcagaacaatcactgtctaaagttttaagcatactctaggacttagctcttgactcttggtttaactttaacagtctccaatagaaagtgagtgctttatacatttcggatatcagatatcttgagagttggttacaagatcattgagaaacaattgagcagcctacagtgggttgcataatgtcacttgttgagccaatgtagaaccacacacatagaactctgcaactgaggccgggggcagtggctcatgcctgtaatcccagcgctttgggaggccaaggcaggtagatcacctgaggtcaggagttcgagaccatcctgtccaacatggtgaaatcccatctatactaaaaatacaaaaattatccgggcgtggtgg

SEQ ID NO: 1244810 - DNA, 4001 bp, Homo sapiens
atatatttatactgctacctggagctacaaagaaggggtgcctggagaaacagaatggtgagtggaaatgtactgttggtatcaaggatttcagtctatgctgtaagaaaattaaactttgagaaatctcatcctagaagagctgagaatctggtacaagaaccaaggtgcatgcagatgaaaaagattttcaaacactgtcatcacacaatatgaataaatttgtagaatcatggagacctgaaatttttgagacagtatgccagagtatagaaagaagtcagaaggtatttatattttattggttctgcaattttctggccctgtgaccacaagttaatcaattactcactcaaggtgaccatcatcactcatgtggactactgcaattgcttcctaattgttctacttccattcctccccctacctttaatccattctccacaaagtaatcaatatcttttcaaaaatgtgagtcagatcacatcacttgtatgtgtcaaacattccaatagcttcctattacttttagaataaaatccaaacccttggacatggcttaaaaggctggtattaccaggcctttgttacctgttctgaccccatttcctaccactttccactctgctatgttgggaacacagtggccttctttctgttcttcaatcattctatctctttccttcccctgggcctttgcttggcctggaattgttattgagtaggtagctccttatcatcgttcagatctaaactcaaatgtcacctcttcaaaacgtccttactttactaccgcttctcatgactgtcaatcatactatgttattacattgtcttcactgcactgattgttatctgaaattcccttatttcggtaactgttacttgattattttctgagtccctcagcagaaaggacactccatcactgaagtgatctcccgacttgttctgtgctatagtgccagcaggtcgattggtgtcaggcccacagttgagagggcaataaataaataaaatgtcgaatgactagttaaaatttctcaggcctccaagttcctcatccacatagtggggataattatacctgctctggccattagaaatggccacgtagcaagtagaaatacagcctaacttttaactacattcttactatgcctcagtcatcatgaaagacgttatatgaatattattcatttactgttctgatttccattttacaagtaaggacaccaggtcttagaggacaagtaactgacctaagggcacagggccatggtgaggacccgggtaaaaatccagaaccccctaacctcagaacctgagctcttaactgctattttatagtttctagaaagatgcttccttctaacacagtaaaatccgctatgctgtctgcccccctcgagttcgtcctgtgggacaactgaagaaagctattacatcctcccacggggttcgtttctttcagtctctccttaaatggccctcctatcctggtcactctctccagaacaaacttcagcgtgacagcctccctcctgctccagctgtggtgctttccactgggcaagttgtaaggggcatcagagcaggggaagccgactgcccacgggctgagaaaatgcaggtgtcgtgggtgcccatgagggctgcggttaacacagcaaggcttcctgagagaggtgatacttgaactaagtccagggcagtgagcacaggagccagcggccaagggaccccaggagaaaagaccgcgggagagcgtcgccggggctgccgggtcgagacaaaggctggtggagtttaaataaagatcacaggcgcaaccccaagtgatggcaagcttgcacgcggacgggcgaaacgcattttcctaaatgttaagagacgttctggcgagaagcgaagtgggagtaacagtcacaaagcaaaacgcaaacttacccgtaatctggcaacccggcctccgtagcccgactgcaagcgctgccacctgaggagcctggtagccaaggcagcggcaggctcaacccagatctcgcgagacggagcacgcctcgcgagatttgacctctcgtccctgagaggcgggtgggtgttagttcagagggttatgggagggctctggcgtcctggatggaggtgcgttcctttctgtggctggcgctggatccaccctgggtctccaaccagggctgcagagagggtagagccgtttcttaggccagagtggagtgggacaggaggtgccgagagaggactgaggtggcttgggacatggaagcgctgcagccttcgagcccggcatccagcattgcagccgccgcggcggcctaagagctcgaaccctttcacacgcgcgcaggaggaggagcggcggcggcagaacaagacgaccctcacttacgtggccgctgtcgccgtgggcatgctgggggcgtcctacgctgccgtacccctttatcggctctattgccaggtaggggccggcgccgcccgcagggtggcgcagacgcgagaggtgggggtgcaagacaaatcccgggacaagccctcgctctgcgggtcgtaggtggaagaggtttccgatattatctacctaagaggagagaggttcaaaacagtcacttaacacccaaagtcaccaaagaaattggtgacaaaactgcaagtagcatccagttcttagtgattgtgcttataccatgctgcagagtgaaacccctgatctatgaactgcacctcgccaaaaaaaaaaaaaaaggtccgcagcctctaaccgggtatctagcagtctgccttaccctcctgcgcacacacgcttttaaaatgtattattcatacattcactctgcaaaccacatgtggtttatgtgccaagggtaactctggaaattggactactcgtgtttcttgggcttaaactgggattagcagttcctccgtacaaagaggcatgaattaggcctttgaggctctctcgccccacccctgttaatatataactgtaatgtacttaacctggaaactgttaagtacattgcaacggttctgggagtgtggcgcccaggaccggcagcatcagcatcacccgggaacctgttaaaagtgcaaattctagggcccgactccaggactgagtcagaaacacggggtgggggggtggggcggggagaagaaggggagtgggaccagcactctatattttagttaagtcctgtagttgattttgagggcaagttttgagaaccacaggcaaagacaagtttcacgtattttagagatttctcctttgttcttagctaataatttgcagctttggctggccattaggatcacctatggagcttaacgttaaatacacgttccagggatcccctaccccagagattctggttaggaagtctagggtagggacaggaatttcggtttaaaaatcatgccacaagtgattcagtaagtgtttaagatagtggctcccaaaattcattgtacagcaacattgggaatcacctggacagcttctaaaaatccacacacattacccattttatcacaaggccacagtgggaaccaggcatcagtaattgtcaagtatgttttaggtgattccagcgtgcaggaaagtttgggaattgtttttttaacaccatgactggtattcttagctggagttcactctttccgtgtgtgtgtgtgtgtgtgtgtgtgtgtgtgcgcgcgcgcgcacgtttatttatttaaatttgtagagacgaggtctccctatgttgctcaggctggtctcaactcctgggctcaagtgaccctcctgccttggcctcccaaagtgctgggattacaggcgtgagccaccatgcccgtggaaatcaatttacctttcttttagatgatgaagcagaagacaaaaggacttttcttttctggcatagtctcctaatgccagcatttatgtgggaatgtgcaatagttgattttgaggatgagtatagaat

SEQ ID NO: 1244811 - DNA, 4001 bp, Homo sapiens
aagatttttaaaaatagttttattcagtggaagtacacatatgaattcctcacctgtcgttcacaataggctttcattagtttactaagtggtgtatgcctcttaatcttaaactgcaccacagaaccatcctgccccgccaccttcaaattaatatgatcgttgttctcagtcttgactccttcctgttaaaagaaaaataaaagtataatttgggaaatgtgatcaacgaacacgttttataaagcagcagcagccctagttgcttcaaaaatcaacaggtttctcatactgtatgctaaaacggcatactgctgttttcagctgctgaaatcaatgtgaaagcggaaaaatcctgcagtaacagtattagatagctgtcagatacggaaaagcctacatgcaatactatcagtagcaacaatatgtttaaagttgggtcctattcagtgtattgcaacgttctcttgaagttaaacttcctaaaatgacatatatcactcccaaaatactttaccccccaaaaaagttaaaaatagagtcccttctcttttctaagcactttaagtacaactgcaagaaacaaaacaataaatctacagcctgccattcaaaactcattaccgttgtcattaaaaagttaccaaactcagtttaataacctaaatccaatctccattaaaggaaacacacaaacaaaaaaaacaatcgaagaatatcccgattccccccggaacagcggtaatactcagtcaggaccacagttaacgttctcctctattagcagcttcatttttattttcggttaagagcacttattctcccctccccccctttgttgtcatgggtcaaatacacagttttatcctgatttgtttcttgtagatttcgacccaacctaaagttgtccaaaatcgagtgcagaagcaattctgtagccctaaaacgctccagaaagtaaaggcgcgggaggcggggggtgccaccaaactaaaagcagcaagtcccgtgtgccccgatgatgggtgtccccaagtcctcccgggaagtctccgggtgcctcaaaagccgcgttcaaaagttaagccgcacaaagtctctctgctcgtacctgtgcctccaacttcatgaaaccacatggtgttcgcggattaggggttcgttggcacccagggaaaagccgctgcccctcccccttcgggcccctgaggctattaaagtgggaaatactccacgggaatccccctacccccaggcccaggacggcggcccgcgggcatccaggttcctgcccgtccgcagcccattgattcgccccgaaccctcgccccgccgccgcggccccaggcaggggtccccagatgcccgcggttcctacccgagaggtgaagcccgagcccagaggactcctcgccgcctcggagactgcaacacccgacgcggggtcgacagaaggtggagaccccgcgcgccctaacgcccctcctcacgcgcgccggccggctgggccaagaatccccgttcggggctggtgggtccgcgggcgtccgctttctgcccgcccaactcgcgcccggcgcgcactcggaggccgccgggggcgggagagagcggcggggcctccttcggcgcgggagggaggaagagagggagggaggaaaatggcgcggagcgcccgggcctgagccgcggccggccccgtggggggcccgggaaagcgctgggagccagcggcgggctctggccggaccccggcccgcgccatgacccccaccgcgcggcgaggcgaaggggccggcggcgagctcaccttgggcttttcgtcggccatggcgagcgccggagtctcctcagctgccgcttcacaaaagaggtaccaggtccgcaccaaacgagcacacaagcagcaccaggagcggcagaagaaggaggcggcagcggtggacgaggggagagggtgcgcgcacgtcgtgcgctccctccccccaccctgcgtgcgcgagcacgagtagccgaagcctcccattggctggcgcctcgcgggagcgcgcaacgcttacataaccacccccaccccccgtcccacgccaccgcgtcctgggccaggcgcccgcccggccggcgggaagaggcgcggacacgcgcacccggcccgccgcgggggcgcgcctggctctgggcggggctgtattgtcctccttcgtggtggagcataatcaaaatggcttccagctggtcctcggtgggaacgatgaggctcgaggctttagacgtaagccataggccagggaaggcagacttactagaggaggaaggggattcctaaatcaaagccccagcatgaggttctggaaaaatctctctcattcagtggaccagcagccctcccatggttacttcctctcagtcaatctcaacctgcttcccaccggactcttgcctaaaatgcagtgtcttcttcttcttcttcttcttcttttttttgagacggagtctcgctcagtcgcccaggctggagtgcagtggcacgatctcggctcacagcaacctctgcctcccgggttcaagtgattctcctgcctcagcctcccgagtagctgagactacaggtacccgccacaacgcccggctaatttttcgtagagacggggtttcaccgtgttagccaggatggtctcgatctcctgacctcgtgatccgcccgcctcggcctcccaaagtgctgggattacaggcgtgagccaccgcgcccggcctacagtgtcttcttctgtcctgctggtaaccctagactttgactagctacgggaaaatattcatgtattcattcaacgagatccttactcatcgcctgtcttccaagaggaaacagtatccataagcgagaactacccaacaatcaagcttccagccaatttaatcctttcctcgttgcatccagttaaaacatacacatgcgtccctcctgtctgaagaacaatccgatgtgtgtgcactggattccatctcgcttcttcccccggggctttattatttccttttgtccctgaattttcttcctctcctccgttagtatagaaaaaaaaaaaaaagctcccaattctatgaagttaccatcctatctctctccattcttggccaaacagctcgaaaaaatgtccccgccagctgtctccaacccctcccctcccactcactcctcaacccactgcaatctggtgctgtccccaaagttccactaaaactgctctccacaaggtcaccgcagacttctttgctgaatccagtatgcttctcagtttgtcactcctcttgaactttgcaggaggtaggttttcctctcatctctagcctgtcctttgttctctctgcaattttttttcttactcactccttcccttaactgttccttagggttttcttcaagatccttttatcactccattccctctccgaggatgatttcaccgattttcattaccatctctttgctaatgatcctcaaatccattatttctagtccacgtctttcttctgagtttccagttgatttctgaacatctccacttggatatcccagaggcacctcagacccagcaactctcaactaaaactcctcactttaccttccacatgggtccttcttcctgacctgtcactcttaaactgagtgacacaccactacaacagctgccccaagctggaaaggccagcaacattcctgacttcttctccttcacacactcctcatccaatcaatcttggccaaatcttgtctattccaccttcttaccaaatctaatttctttggcctctggatggagctgcatttgctggccttctgtaggttctctttggggaggaagaggcttaagaccttagatgtgtgataggccaaagcaggaagaccatctagttcagatcaacactctcaaaagaggccgggcatggtggctcatgcctgtaatcccagcactttgggaggccgaggtgggaggatc

SEQ ID NO: 1244812 - DNA, 4001 bp, Homo sapiens
cgctgtggctcactcctgtaatcccagcactttgggaggccgaggcgggtggatcacgaggtcagcagttcaagaccagtctgaccaacatggtgaaaccccgtctctactaaaaatacaaaaattagctgggtatggtggcaggtgcctgtaatcccagctactcaggaggctgaggcagagaactgcttgaacctgggaggcggaggttgcagtgagccgagattgcgccactgcactccagcctgggcgacagagcgagactccatctcaaataaataaataaataaataaataagtaaaatggctaaaatgggccgggcatggtgactcatacttgtaatcccagcactatgagaggccgaggtgggcagatcacctgaggtcaggagtttgagaccagcctggccaacatggtgaaaccccgtctctactaaagatataaaaattagctgggagtggtggtgggtgcctgtaatcccagctactcaagaggctgaggcaggagaattgcttgaacccaggaggcagaggttgcagtgagccgagactgcaccattgcactccagcatgagtggcaagggcgaaaagtctgtccaaaaaaaaaaaaaaaaaaaaagcaacagcttttgggcaatgatctaccattactacacctcccttcccttcattttcaaaaaaaattttcatgcatttaacaaacattattaagattacattctttcttctcatgttaagtctttgaaatctggggtatattttatacttaaaagcatgtcttaatttggactagacacatttcaagtgctcagtagctacacgtggatagtggtcactgtattagatgcatagcactagtatgtcccaaaataactgttgaggctggacacagtggcttacacctataatcccagcactctgggaggttgaagtcagaggatcattccacgctgcagtgagctatgatcatgccactgcactccagcctgagccacagagcaaaaccctgattcaaaaaaaaaaaaaaaaaaaaaaacccacacaaaataacccccaaaaacgaatggctgggcccaactaggattaacacttgccctgcatttacttctctgggtgcaggttgggtaatgcagaagtgaatgatggaaactgaagcggcttacccatcaaaggaagagctagtgcagtcatataccatctctcggttacccttcatttgtagatatgcatcacaattgtcacaaccatcatattcaaactggtctatagtctgggagtgaaagaaaaataaaggaaaaggagagataagcatgaacaagaccaagagaaaaagtagctttctcaatacttcgacctgctcaatttcttgtttccctatgttgactgtgtatcctaaggttccccacctactactctcaaagcttcattcctaagtcccaccctcccactccttcctctctcgttcccaattccgttttatctattcctttctctagtctactcagggtcaggcatcctttccgactactcactcagcagcggatccccacccgcctctgactcccagtgtctttcggctccaacgtaagttcaccgaacgtctaagagctgaggattcaaaggcatgtaagaccgcccctgccctcagctgcaagacctgtccgcgatcctacgaggtaaacgatggcctccttcggcttctcactccccctgccacctctgagttctgagacttaacttttctctttactgtcccacagccccattccgccctctttccccgaccttggtcccccatgggccctacaaccaggtccccgactgacaccttgaccagcgaacacagcaaacaggcccgcagatgccgcaggtccttcggcaccgtctccagggccatcttcgccgatgggaagaacaacagggagatagacgaccacagcctgtgcacccgcaggaagtaaatagctcgttacccagaatgcccaccacttccggcgcttagacttcctcttccggtgtgggcggacgccagctccgcccctacccccgccagaggagatggtttctcccgccagcaggcggggaggctgggcggccggccgccacctgggccggagcgcgtcgcagccacctgagcccgccgagggcgcggcggaggctgtgtggggtagtcagcgggcccccggggcgggggggcggctgcgcttgcgcgggagtgtgtcgggctgagccgcagcgccgagacgcgggctgtttgatctgggctggtggccctgggcgtcggtcctgttccccgatggtaacccgaagtttgtttttttttgttttgtctccccgttttagaagcattgggggcagtgaatccactgtctccctctggattgtctctgcagagaccgagaagaaatccagggacagccccacccctccttcctaactgcgagagcgctatagggtttccacttgcttcccacaggaatgctggcctgggagctacggcggaaaaaaatgcgtatttatcttttaaaactccgtctgtttgctcgttccggctgataatttatactttgcgcagttcttagcgcttagacacggttcctttactaaagaccatttgtaggagattaggtgtcctttttttccctttcatttcaccgtctaggaagcgaaatgccttgttctataggcactaaaccaccacccctaccaaacctttctcggggaagcagaaggggaacttgtgccttgtgaggaagcgacaaaggccccttctggccctggagacttcacgccaatggagcaccagctctctgtcctcgcaatagcccgagtgcaggcagaacgcagtcatttgtgtttatctgagaggagctttgggatataaatagtttcaggccccgctgcgctgtcattccagcccagcctcctgattgagctgcttccgggcgggctttcttcttgttggcggtcccatgctgtgttcagatgggctctgtgacaggtttggatgttttctatcactgaataaaactttccactttggaacatattttctacactctattatctcatgtaagtcctgcaacaactattaagtaggcccattttatggactgaaaaagcgaggcacagagtatttgcccaaggtctgagtcactgaagtatgataatgtgtgaagtgaacagtataataataatgactgaagcacagtaagaatccagtcatgctttctccttccctgatctcactaagccacacttttaggggcttacaaaccagttcttattgccaagccctctactctaccctatcctttcatgaatcggagcctagcctctgataacataaataatttacttctcttgatgtagaaagagatgacgttgttaccctgagtgacagtcacgacagaacaaaaccacaagaccagaccacatttgtggataaatatattagcaaataaatatatttcttaacatagtgcctgattcaagcgtctgtctggttcagatataaatacccatgtgggtacctaggtgctagtctccccactaactgagggaaaaaggttcccaggtggggtcctctgcccactttgccaccacattcacattccaaatgggataatgcctgaggggccaagagtggtcaggctgccctggggtgaatgtcaccctgatgaggcccatcagctcttgtccactcagtgaggccagacttgtgctctaatccactctcctgtgggtccctggcctgtatggcttatactggggagctgggcctctgggctgtccaaacccaagggtcacactttgcttttcctttgttgtccccattttccatccttgctctaagacaaaacttttcccagagaagaactctttgttgtccccgctcagctgtaattctgccttttctaccttcattccatccttcctctgcccagataaagtccagcagaaattcctcctttctacctctctgggactctgagacagga

SEQ ID NO: 1244813 - DNA, 4001 bp, Homo sapiens
ctgcccacctcgacctcccaaagtgctgggattataggcatgagccactgcgaccagccccagcatttagacattagatagagagcaaaagttgctagcaaatgagactcagaaggaacagccggagaaatggagaaaatccaagagtgaaatgtcaataaagccaagatgaaagtttggaggcaggagtaactatgttgaatattgcagagacagaggaatatgagaacaaagtatccattggatttggcaacatagaagtcactggtgaccttgataagagcaacttcaatggagtgggcaaagtagatgtggtggcacttgattactagaagctgcctcaggaggactgcttgagctcaggagttccaggtggcagtgagctatgatggggccactgcactccaacctgggcaacagagcaagaccctgtctccacaaaaaaaaaaaaaaaaatggagtgggcagaagagaagccagattggtataaaatgaagagtgaatgaaagttgagaaagctgagttggtacaggtagaaatctatgaatggaaatttaaaaaattggcatggtaattggagagggatgtgaaggataccagaacataatttgtatgctgatgggaacagtttcagggagagacaggatttggtgactgattttattgggaaatagtggacaggaaggaagacaaggattacaggcaggactgatggtagtgccatttattaaggtcaagaatatagaatcagggcaaacgtatttgcctacaaagatcatgtttccaccacactaggtaggctttcagaggaagaactgtaaaatttgactaagcctctccagacggtaccactttctgatgtaattaatctcctgatgaagttaaaacctcctagagttgcaaggctatgctaatccaatctagcagccacacaagccaagtgaataaaaatgtacttgtactggtgaaagggacattactcgtaaaaaagggctctaaattcacagctgatggaagagcagttatgtttctgtaatcaaaacactgaagacttacaaactggtaacttccagataaacagtggaaccagacatttttccgaagaaattaatcaaattcaatattgtttacactccctaatgctcattaatgatgtagcttcatacacccttgttacttttgatattacagtgaatttccacggaagtattttcagagatcttagccctctgaaataagtatcagttcttgcaacaacccaggaaaattaacttctccagctggttcaaaggagtgcctgaggagaaaggtagaaactagaagatggagttttgacttaataactaattttgatgttcatgataggcctctggcaaacgtttgaggaaatgaatctatagagaatggacgggctttaggacttctacaagaccttcgatctttagaaagggatgaaggatgcaaccatctacaaaaagttctatttgtattattcagcaatatgtaaagagctggaatttggcatcgccctctagcctgatggccgagctgctgaaagctccacaggattcatatccccagaacaaacaactcgatcacctgatcctggctcagaagccccaggtcccttccatccccaatccttttgcgtggcccagttttaaaaacctgcggagagaaggacgggatgccaggaagcctgttgattcaacgtgccacccgattcacgggttccgggtgtcactgggctgggaaaagctttcggactctgagcaactacagcgctttcctcccccttccccccatagagcagggaaggccaggctcccccttcttcccgcatacggctccccactgcctcttcccttacgtgaccaggccctaggagcccggttccccacctgactcctgcgagaaacacgctctccagtcggaactttacctgtctgaagcccgccgctcctccagtgcgctaagcccccaccgaggaaaatggagtcgtcgaaccgagactgggaaaagatagtacggacccaccgcacggcccctccgccgccaccgccgccgctgctgcgtcaacgtgctacgtcatttccggctccctgtcaccgggagtgggcgggccatttcttgttctctctcccgctctcggaagctttcgtctcgtgggtgcgaaaggtaaccgaagcggctcaggaaggcagctgtcactgagcccctggaacagagcgagagtatcgtaagtaaccaggctcagccggtttctcaggccgctctagtcaaataaaccataaagatcagactcgggcttcttcacttccttctctccgtggtttcgccattagcttccggttccggggaggggccgagttttcttcgaagatttggggctccgcgatacagttaggatggctgtagtacctctgctgttgttggggggtttgtggagcgctgtgggagcgtccagcctgggtgtcgttacttgcggctccgtggtgaagctactcaatacgcgccacaacgtccgactgcactcacacgacgtgcgctatgggtcaggtaatgctggggaccgggctcgggtgggctagggaggactcggaggctctggaggggcggggcctatagaatatctgacagtgtggtctgggaaagttaggggttccctgggaaggttcctcaggtctagagagtcggagaactgaattgttctaaggcatcttaatcgcaacaccacctaatatttggtgagctacaggccaggcacgttacctatgtcctttttccgattattaacattgttgtaaggtggacagtattgttatcctcatttcacagatgaggaaacagacgcagagaaattaaatcgtttattcaaagccttgcagttagcaaatgacaaagtcggggttctatccaaatctatccaggttcaaagcctgctttagagacaagaaaattacagtaagtgctgtgtctgaaattttaaagttacagtaagtactgtctgtgaaactttaaactccaagagctcactcgttgactacaaccctttgtcttccagctcttctgcatcttacacttgctcctcagtttccatctttggcccccttctacccaaaccttaacctccttcttgtaagaaacttggagcagtgacaggaattgcagagaaaactgcttttttttttttttttttttagcgtttgaaattaaaatgtttagtaataaattatttgtggattcattcagcataggtcttaatgagttcctactacatggctagaattgtactacatacaggagattcggtggtgataatcagtcaagaaaattacaatataataaaaacagactaaaaaaagaaagtcttatctgcctgaaaaaaaaagataaagttaaaaaaaaagaatgaaggtcagctagtgagatgtgagaggcatctaagatagctggtagatttttgtcttgaatgactgatgatgctgtttgctgagggaggaaagagttctgtcaggtgggctagtctggttcatgattcccaaaacccatctgatcagtcagactaggcaaggacatgagttatcatcactgcgatgtcttaataattctagcacccattcagtgaacacctaccatgttgtcaggcttattttttactttgttttggtttcctactttggatctactgaattagagtggaggtggacagaggcttggcagtagcaatctgtaggtttaaaaagctcttcaggtggttctgatggacagccagatttgggaaccaggttcagtccggagctcagaaaagggatctgtgctgagcctgagatacaacattaaatataacatcttgtacagactgtggttgaagatgtcagggttgtagatgaaattgcccagaatgaactgtgattctctatctgggattaatttgaataactggagaaacttgttaaaaatacaaatgcttttgtcctgaccctcaacaattgtttaag

SEQ ID NO: 1244814 - DNA, 4001 bp, Homo sapiens
tacattaatgacctattagtgtcacgttaggtcattatacagcagtatcagaataaaccaaatagaaataactatgtgaataattacattcaagtatttaaactttccagtaaacaacttcgagttgttttatgaccagatctagctcttaatgacacttgacttccctgaggtcgactcatcagaacgcaaatagttaaaactttcttggaggatgtgtcttaacattcagaaagaacttttaaaatttccacctaaatcttcaattggttttattttaaattaactaaagggagatgagatactttagaaggggtacaaacaagtatcattattgtcaccactgcccttcagttctacatcctatttccaattaaagcctctctagatatttcaaagtatactaagaaatacgtgaataatgtgaatctctctgaagcaggttcaatattcgtttccataaaaactgaaattccttctattaagttccaattagaatttcatgaagcactaatgagagagaatgaaggaagggtattaaacaacgtaatacgtctttctaagcacagctgataccatgcccttaacatatgccacagtgaaactgtaaataaggacactgggcggtagagccaagtttattcaagtttctgtaagattatttagctattaaagatcacccaaattataacacacaaaagcaaaaaagggaaccaatcaggatataacattccttaaagaacaatcaggattattcatagtcacgatgtttttaataaattctattgtttgtttccagacaccttgctctcctttccaaataagtcagtttcaccttccagacagaacttagaaacagaaattgacgcaagaaaatgttctgtaagccaggtagaaaaagcagaattccggggtcgtctccagagaagatgcttgaccactctctggctcagtttacatatccacaaaatgggtggatagatttgaagggttttaagcatccaaaggtgccataggaacctgcagcaccaagttagcgcgaaggcatttcagactaaggacactttcttcggttccactgcactcatcccttcacaggcttcattttgcccctcaaaagctacaaccgaaacccctgtatttctagagtccgaaaggcatgaaagaaaacaagaaccagtctcgggatgtgactgcggctcagttcaactgctacctcctcatctaaaagccgcctgctctgaacgtggggccccagtcccgagcctcttgcgtcaatcttgggggagtcaagaacccgcccggaccctcttttccagctctcccaaggccctggactccggatcccctggagacgtaatctccgaaagggggacatcccctcaattcctccctccactaccacacaagtggactcccgaggaggaagggggcccagcagagtgtcccatccccggtgttggcagagtgggtcttcctgccctcaaagcctcgcacacactcactctcaaaggcctggaggaaaagctcgtggtcagcctggacgtgctccattttcggcttcttcaccggtaacaccgcagcccccgccgctgccgccgcggaggaggaggaggaggccgagtaactgccaccccctccacagctcccgccgccggatttgccgcccgaagccgtcgccgccgccaccgccgccgaacccccgaagccgcctcccccggaccccgcgctgggccccgagccgccccctcccccaccgccgtgcttctgaggcgccatcgcggttcctgcctcctccccccgccagctacccgccgggcggccccggagagcaagcgcctgcaataccaaccgctcgccccagcaggctccggcggaccgaggggggaaggaggagagaggggaggagaggggaagggaagggaggaggagaggagggaaggagggaggaaaaaaaaagtgtctcctcagagccccgctccgcttcggaggccgctcaccctaccctggcctcgctccgcccacttcccccgcccggcgctctgattggccggcgggagcgcgcaccgccgggccgcccagcccgttggcccgcggattcccccgtcagtcacgcggaggcgcttctcgcggaggcgcggcttggttggcccgtgcgcgctgccgatcgcgggcccggccgcctctttgaactgaattcgcgggaaaattaggggtcggagcggccttcctgctggccccggtgcattgtggggagagaaggacccagcgagcggtttagcgagtctagatccttagtttgttgcccccaaacaccgtaagagtggtcagagaggtaaactggttgagaagtacttacatacactcttctcttctttaggatctataccttttcagctcagaaagctgagaaggaatccggtgttttgcgagtcttgcttttttttttttttgagacggagcctccctctgtcgcccaggctggagtgccagtggcgcgacttcgtctccctacaacctgcgcctcccgggttgaagcgattctcctgcctcagcctccagagtagctgggattacaggcgctcgccaccacgcctggctaattttttgtgtttttagtagagacagggtttcaccattttggccaggctggtctcgatctcctgacctcgtgatccacctgcctcggcttcccaaagtgctgggattacaggcgtgagccaccgcgcctggccaggtcttgctttgaacgatagacacataggcccatttcagtcttctggcacagattggtttggagttgagctaatgatttgaatttcaggttggacaagatgatctctaaggatgttcttccaatttttatattacgttaaaatttcaaaaatcccaacctataaacatagaaccatttcatactctaaacagcattttttaaatgtctacttgggttctctatagttaactgcaaaacactgtttacaaaacaagtgtctctggaatggttattcaagttgtttacaaaactagttatctttgtaatgattaaatacctaaagtacaggttttatcaaagcctttgctacttaagaaagtgatctctgcaaatgacgtatatagtatttggcatttcaggaacacatctgaaattaggtataccttcttacctgaaataaggaatgcctgttgttaaggacaagctatattttatattcagacaaaaagttcagaatcccctcttgtttgttacactatcctctgtagtcttttttttttttgagacggattctcgctctgtcacccaggctggagtgcaagggcgcgatcttggctcactgcaaccttggcctcccgagagaaataccagtaagttctcttggtaacaaagccacaggcactgctaacactactatgatttgtcacctattagtagttgaaggagatgctaaattctagctagaggttagtgtaaataaatatatatattttttgtcattcaagttctcagacttcctgaagcctgttcaagttaagaacctttgtgttatagcagcaagtctttttctttctactttactgttaagctcttggggcacggatgatggatgctttggtagctgaggtgtctatcactgtgcctggcatagaatcaggattcatccaatgagtcttgatgaataaagttggacaccagcgcacaaatataaattaggataataatgactgagtgcttactatgtgccaggcaatactttaagtttttacaagcttaacattcaattctcacaccaatcctctgaggtagacatttattaatatctccatttcatagatgaggaaataacagcaagacttgttaagaagcttgcacaaaccgggatttttaacccaggcagtgtctctggagccctcatgcttcactatcatgccagaaaaataaagagttttgtttgttgttattgttgttgttgttgttttgagatggagcctcactctgtggc

SEQ ID NO: 1244815 - DNA, 4001 bp, Homo sapiens
tcagcctccctagtagctgggattacaggtgccctccaccacacccgtatttttagtagagatagggtttcaccatgttggccaggctggtctggaactcctgacctcaggtgatccaccctcctcggcctcccaaagtgctgggattacaggcatgagccacctcgcccagcctgctgtccccttttggaggctgacatcttagcccctccaaacttgtggaggtgagctgatgagcaaagtgcttcctgatgcaccccaggatgagaatctgcaggcaccagggggcctgcccctgggaatcctggaccggggaggggtggggaatgggcagggacctcctaggcaggggctgctcctgccccatcggcctgctgcaggaatcattctgcttaggtacctgatggatgaagggcagtccttccatccccagcccaacctcaccttgaaagaggtttaaccaagacaggccaagtcacaaagactacccatcccccgtcaccttcagcccaagtcacttctacagcacccagcctctgcctgaacaccttggtgaaggtggacaggccctcttgggaaggccatgctggcgcccctgtgtcttcacctcctggaacccctggaaccctccctggttcagcctggccagctgtctccacacaaggacttgcagcctctgtggcatcctggtccctcccagtctgtctcccaccccacagagggccctgcatgcacagggcactacaaggggactaactcaggcctgtggatacagctctgaactcagacacctggaggacccagggtggatgtaggggagctccagccccttgggaagagccccataccacctccctaaacttgaaggccaccacccacgcctgctccacctcagcaggtgtgggacaggtctgtgagcatcaggatccctctgggatggccccaggactctcccctgccagtcctgccctgttgtcccagggagctctccatagggctctggagctggcagtcacaggccccgcccccagatggagatgaagccggatctccgggatgatgggagcagggtgcccatccaggactcctggcactgccatcccgacccactgggcacctgattcttggacacagcccaggacagaggcgatcagatcccacagcctggctgggagctggtgtgggcgccctggaggacctcagaagctccaggcccaggcatggtctgggcacagcaggcccacctctgcctgccccctcatgccaccccctccagctttcagggctggctgtccaagaacaggccccctccccgccacacacacacacacacaaaacctggttttggaggtattgcccaccttacagggagggggtacatcttggggtccctcaacttcgggtgggaaggcggacccgtggcctgccccgagtgggaaggacaccctgtttccgggcgttgggtcgccccccgccccctcccttaccccacgtggcttcggaaaaccccgtcccggtgaactccccaatctgggagtcgcggcgtgcgggccacctgtccgggagccgcccccaaactcctcccactgccagcgaggcaggggcccgctccctgcggagatccggacaccccgcgtcggggcgcgaggctgggggtggggtgggtggcgggacccgggaccgggaggggacagcgggacagactgtggagggcgggaaggcggggcccgggacgctggacgccggccccgctcgccgccaggccccggacgcggccgccgccacctgtcgcgctcgtgggctaggggccccgccgggcctggcgacggagagggggtccccagggtgccctcggcccgccctccccgggctcaccaagcacacggcgcgcgccaccacctgcggctgcgtcaggaagcgccgcaggtcgaaggagccgcccgccttggccgcgccgtaggccccgctctccatgtcgccgtcgccgccgctgccgccgccgcggaacgcagaggaacctgcccggcgccccgcccgactccacccgccgggggcgtggccaggcgccgctagggaccgagggcaaagtgcggccctcgcgagcggcgggcgagccgcgggactgcgcttctagaggcggggaggggctgtggccgcggagcacccgggtccaccccacctcggggttgaggggctagtctccgggccacgccggccgcagcacggaccagaaagggtcagagagtcccccgggaagacggacgaactgaggaccgctcaccctctttgcccctgccctcccaccgcctcctctaggaagcccaccacctaccaagaacccacccaggctcataagcaacccctcccccatcccactgaaaaacccaggccacaccctggagcccctccctgcctggcctgccactctttcctcctctctggggctaagcctggggtagggtcaaagaccccctccccattcctcctggtctgggcagagccccaaggctgtgaagggcagtgtggcgtcacacttaagatggtgtgcaaggccgggagcggtggctcacacctgtaatcccagcactttgggaggccgaggcggttggatcacctgaggtcaggagttcgagaccagcctgaccaacatggagaaaccccgtctctactaaaaatacaaaaattagcctggtgtggtggtgcatgcctgtaatcccagctactcgggaggctgaggcaggagaatcgcttgaacctgggaggtggaggttgcggtgagccgagattgtgccattgcactccagcctgggcaacaagagcaaaactctgtgtcaaaaaaaaaaaaaaaaaaaaaaaaaaagatggtgtgcaaggccgggcgcagtggctcacacctgtaatcccagcactttgggaggccgaggcggttggatcacctgaggtcaggagtttgagaccagcctggccaacatggtgaaaccccgtctctactaaaaatacaacaacaacaaaaaaattagctgggcgttgtggtaagcgcctgtaatcccagctacttgggaggctgaggcaggataattgcttgaaaccggtaggcagaggtggccgtgtgctgagatcgagccactacaccccagcctgggcaacagagcaagagtccatctcaaaacaaacaaaacaaacaaacaaacaaacaaacaaacaaaaccaaaaacgaaagttagcgaggcgtggtggcagctactagcagtcccagctattccagaggctgaggtgggagaattgtctgagcccaggaggcggagtttgcagtgaaccaagatcacgcctttgcaccccagcctgggtgacagagtaagaccacatatcggccgggcgtggtggctcacgcctgtaattccagcactttgggaggctgaagcaggcggatcacgaggtcaggagatcgagaacaccctggccaacatggtgaaaccccgtctccactaaaaatacaaaaattagctgggcatggtggcgcgtgcctgtagtcccagctacttggcaggctgaggcaggagaatcgcttgaacccgggaggcggaggttgcagtgagccgagattgcaccattgcgacagagcgagactccatctcaaaaaaaaaaaaaaagaaaagaccacatataaaaaaatatatatatggcatgcaaacagaaatgaagttttcagggcgacaggcagatggcaaagtttaatccagttccagttcagccccctctcgcctccgtccctctctacctccatcccaagaaaaaccggtacagagggtctggtgcagggtaggctggggcaggctctgtgtgtgttggagtggggagcggaggttgtacagacagaggtgtgggatcacaggctgactgaacccggaagaattccagacccccctttgctagttgcaggtgcagattaacaacagcaggtgtgccaggtggggctcacagtcaacccaggtgagctggac

SEQ ID NO: 1244816 - DNA, 4001 bp, Homo sapiens
ttgatcaaattaataccatccagggacattttagaaactgtaatcacatataggaaataaatagaggatgccgggcgtggtgactcaagcctgtaattctagaactttgggaggccaaggtgggcggatcacttgaggccaggagtttgagaccagcctggctaacatggtgaaaccccgtctctactaaaaatacagaaattagctgggcgtggtggcgcacgcctgtaatcccagctacttgggaggctgaggcagaagaatcgcttgaacccgggaggtcgaggttgcagtgagccgacatcgtgccactgcactctagcctgggtgacagaacgagactctgtctcaatcgatcaatcaacaaaattagccgggcatggtggcgcgcacctgtaatcccagctgctccgaggctgaggcaagagaatcgcttggacccaggaggcagaggttgcagcgggtcgagatcacgccgccgcactctggcctgggcaacagagcaagacttcctctcaaaaaaaaaaaaaaaaaaaaaaaaacaagacaaaagaaaaagaaaaaacaaatagaagggaattattacatatgtttcttctccagccagaaactggcttacacgaagtatttattttttaaaaaaccctctaatgaaacaacggagagaacaaaagagaaagcaaaaagtttaaaaatctaaagttaaagatgtgcagaggaaatgaaaaatggggttacacacaggtggtttattgaacagccactgctcgtttcctgacaagcacctgcaagaggtgataactttaaggtccttacacttttgtagtgttcacgactccgaaattgaaacactgcatataaaaaaaaaacctaacacttcgttttccaaagacaatttaggatactgaagatgcaaagctacttttacctccaaatgtgtgtgctgttgtgtgttggttagtaaaacaaaatcagactaggtcattatagaagtggagtgaaaacttcctagaataaaatatttccttaaatgataacgaatctgtcagcttgtaaaacgtacatctcccttaccattctgggtataagaaccacggcagttcttggctgaaatgtggcagagggcagatttgtttaagggctgagtctggaagctttgttctaataaatgcgcaactgctgtttaacagtgcactttctttgtttttaaatgcctttttaaaaagaagacagacaagtcttaagagttagtgtacaagacaagaactctatctcaagaccattactaattcagaggtctttagatgttcctgctgtttgtcgcgggttaaggaaataaagaggacaggacactctaaaaggggaagagacaaatagtccacacacacaccccccttggaaacagtcctccagctttgtgaacagatttttaaagccctccctccaacatatccggttaagtctagaaagcccaaggaaagggaagaccctggtcgcttcagaggcagctaggactaggagcggagtcgcggttcctgatttgccccgcccccccccaccccaagaggaccctcatcttctctcccctcccacactgggcgcgcgctcgctccccgctcgattccaggcggccggcgcccccaactgatcccggaacaccagcgtccagcacctgggctccacacgcccctttcggcctgggtccctgggggatgaccctcctcccgcagcccagttccaaggaaaaggatcagggctggagaaaactgccataactgccaagcgcccctcgccgcccccgcggaggccagcgggctcccgcccggctcttcacacctacccgcctcccccggcggaccccgcgccagctcccgcggccccgccgccaccagaaccagctcctggccgcagcgccatcttgctcccgacctgccgctgccttcgccgccgccaccttatcagcagctgtcagctgaacacagccacttccgggtcaaacaccaggccccacctcgccgcggaccgggcgatggggcggggcctcgcgcccacgtgactcccccggccctcggggaggcgtggcgcgcccacggcacgtgacccggcgccgcaggggtcccccagattcaattctagctctcgggctggtggggcggtcgcgggcgcctctccaagggagctgattcattgtctggtaggccctctgcagggcccagctggcggcccagtggcaaagcgccgttggtcctccgtttgaaaaccatgatcgcggttagtggaaagagtaggctgagtcctgatttttaaactatacggtgggtacactggtgttcttttattgttactctttacacacaaagaacagataggtcctgaagggccctttgatagtctcgcagcactgatgagtgatcagctctcccctctttctctggaactcggtagcttcatgttggcacctatcacagacgctgaaggcatttaaattttattttaaatcaaccaagagcccaaaaacccaacccatatttcgaaaaaactccaaggtgtactactcttgtttggttctgccatcctgccaccttacagtccttttgtttttcctattcttgcaggcaagtgcaaaacagtggtttttggaaggcaattcataattactctgaagctatttcggcatattttttactgattttttttttttttgagacagggtcttgctctgttgtccaggctggagtgcagtggcatgatcatggctcacagcagcctcagcctccctggctcaagcgatcctctcgcctcagcctcctgagtagctgggaccacaggcatgcaccaccacaccgggccaatttttttttttttttttttttttttttttgtagagataggatctatgttgcccaggctagtttcaaactgctaggctcaagctatgctcccacctcggcctccaagtgccagggtgtgagccacatgcctgggctgtgatttttttttttcttttaatcaaactactgtctggaagtaaaacatgaaagttgagtaattttctcaagcacgtagtttgcttgctaacaagtaatggattaattagctttacgttttcactcttgtctcaaggtttttactgggtaataatttgtaataagttattaggcacaaaccactggtcaggaactgtacacgcattttaaaaaatcctcagtatccttaggagttacaattggcatcttacagatgagaaaatcaaggttagaaacagttactgtcatttgtccagatcatacagctacaagcaatgaggatcaggattcaaatccaggccagtttgactctaaagtccttgctcatttcaccagagccagctattcaatttttatgttttttcttttgctgtaactgcctgttcactaatttcactccttcccttccttgtgtgaagctgaaatttatgtagcacatagttccaactgctttgaaggagctaaatttagtattaatacactgactaagttgatacaggttactgtagatactttaaacagacacaataaagtcaaggatcatagatgtgacctcagtttgtcctggaatcctttttgttcctcttctttgcctattggtttttacatttgcaggattcaactcaggatgtcggccttccatgacatccccaatctgggttagatgccctcttgtgatgctttagcatcatggccttacatctaacagagcacttgccacactagtcatgtgctacatgatgatgttttggtcagccacagacagcagatacaatggtgggatgagaagtgggggtggaagacagtgagactgatgatcctgaccttttgtatgcctagcataatgtgtgtgtttgtgccatggtttttaacaaaaaagttttagaagtaaatagtaaaacaaaacaaacaaacaaaaattaatagaaaaaaagcttctagaataaggatataaagaaataaagtatttttcta

SEQ ID NO: 1244817 - DNA, 4001 bp, Homo sapiens
ccttcaggtgcaagctggagagaatggccacttatgaattcaataggactgacctttctcccccactgggtttctgtgcctggtgggggggcattcggagacattggtttcccattcactccgacaggactcctgcccccagccggagccctccatatccatttaacccaaatccccaactccagggatgactacaggttgggggagccccgagagcaagggaggtaagtgatgcgatcatgccccattcctgttacctcattttttttttttttttgagacagggtctcgctctgttgcccaggttggagtgcagcagcacaagcacgactcactgcagcctcaacttcctgggtcccagtgatcctcccgcctcagccttttgagtagctggggccacagatgtgcatcatcatgcctggcaaattttgtttatgttttgtagagatgggtctttctatgttgcccaggctgatcttgaactcctggcctccagcagtccttctgcctctgcctcccaaagtgctgggattacaggcatgagactccacagccggccgtcacttatgttatgcttagcatcccacagcatttgtaagttcttcctgacttctaacccagtctcctcccatattccaagccctgtattttgggaagcagagggatgtgatattaaaggagagtgaaaggagagtaaggattagacccagctgcaggatgaggtgcttttgggaaacagtccagcagcactagttgaagtttttaacgtttcccatggggctgcgtagtgaggcccatcacccagcaaggcttctgtctctagaccaggtaccctgatgtttggcactgactataaaagcatatcaaagctggagaaaagccttggggggtcacttccctcctccgttttgcaggtgaggaaactgatgtccagaaagaagcaggcatcagtggagacactcctagccctgctgccctctcctcactgcacacacttccaggttcagacaaaccggaaaggaaacccaccatgcaggactgtccatgtgatggctcttcccgtggctccatttctaagcgcctccgaggacctcatcgtggcccaggaccgcaagccaaggccaccccagtgtccttaccatcctgggaatgggaggagtcaggcccagccttgtcctgtctgcccccctggaagccttccctgagcactggcctcttatttacccgtctttgtctctggcttgttggtatctgtcccttgtctgattagggaacgcctgaggtcaggatctttgcctccccaatcagattgtcaggcaggagtgggggtagtgcagatgctgggtcatttctacatgtgagaccaaatagtggtcctgtttaagttgatccccttgaaagaaaattctggaaaagctcctcagatgcacagatacacagaatcagaccttgggcaaagtgtgtagttgtgcttttgaagctgtgcaaccttggacaaactacttgacttctctgtgcctcagtttccttatttgtgaaatgaggggtagtcatgataccttccccatgaggttgatgggaggattgagttaatatttataaagcatttcagacagtgccagagatataccgtgtgttaaataagtatttcttacacacacacacacacacacagacacacacacacacacacacacacacacacacacttcggaggtctgccaggccagggctcatagccttgaatctacccatggtagagagtcagacaacttgccttgcagactgcctgctctcccagcagccatgcaggggatcttctgcctctgcactgccgattatcccctgccctcgtcagagcctctccccaaaagtacctccaaggccacaattacccaggtctctgcttcagtgctgagtgtctgttcctctccaccatcacctgccacagtgcacacggacagctccatcaggagaagcagggcgaggcaaggcagcatggtgagcctgcactgtcctggaatctctgggagcccctctcagcttgaagatgcctcctgcaggctttggtttgctctttggctccttgagtgtagataggggaaactccccctgttttctggtccttccagctgttcctgattccttccttcagcttaactgatccccaggccagtttctgtgactcccctccctccctggctggacaggccaatgatattaggagctgctcaggaggagggatcagacctcttccactgctgccccctaacatttgatcccagggcttaacactctgatgcaacacctgcctcacctttggctgtttccctggtggcaggtgcacagtggggcagtgtgtgggacctggagcttgcagcttccaggctggaaaacctgaagggaccttctcatcttagaaataagggagggggccatatgccttctccctacctggtgctctgctcccctgtacagagaggcctctccctggaaattagcagtatcccctttctgtctcctcttcctgtctttgagccccctcctctccagcattctcctccatcaatagtccctgtgtgtgcaaaagaacacgtcttcctttaagagaaataacacattgcttaaagaaatgaggctcctcacgagtgggaattgggatttgccagaaaaatggctgcaggtttcaagcgtcattggctctaagtgatctttcccctgttgtcaaagtgatgtttctaagtccctaaactgacttgtctctcctgcttacaacctttcagtgtcttcccactgcccttgagtgaattcaagctccctagtgtggcgttcatggtgtttcatttagttcttccctctcgcctatccacccagatccattcatccatctatccactcatcggtctagaacaagggctctgtggtcacagaggcctggattccaaatagttgtgtgactttaggcacattacttaactcttctcgagaatccttgtctgtaaaacaggattaataatagcacttgttaccaaagtttgaggatgaaatgagagaatgccctggagcacttagcataaagcgtgatggtcaatatttaccacctgctgactttttttttttttttttttttttttgagacggagtctggctctgttgcccaggctggagtgcagtggcgtgatctcagctcactgcagcctctgcctcctgggttcaagcaatcctcctgcctcagcccctgagtagttgggattacaggcgcccaccaccacacctggttaatttctgtattttagtagagacagggtttcatcatgttggtcaggctggtcttcaactgccaacctcaggtgatctacctgcctcggcctcccaaagtgctgggattacaggcatgagccaccgcacctggcttgaccattattactgttactgttatcggcattgggtgaggcagtgggtggtagaagatgagtaagacattcatcctgtagcatatcacagttcaggcacagagacctctggttggcagataagctacgtttggtttgacatgtgccagcgtagcggtgggagcaagggaaaggcacgtgcgccttcccagtccacccctacccctgttccaggacaggctgttgcctctgctggacctccctttccgcctggtgaattcccattcattcttaaagatccagcttaatactcgcctcttccatagaattcttctgtctctattcctgtctctagcaagaagtaattggctccttttgccaacatctgccacttggatctctatggcttcccacgggcctctatgtgaagttgtgcaggttgtgtcctgcacaaggctggctgcagagggggccagtggaggtgaaacgcatccccagctctgctcactgatctgcgcagcctagctcggggtgttcacccctggaagaagaagcttggctccagttctcccaaaagggacagctgggctgagggcatctctgctagtc

SEQ ID NO: 1244818 - DNA, 4001 bp, Homo sapiens
atggcatgcctggcacaaaataaacacaagttggttgaacttcattgggatgcagtggctgatacctgcaatcccagcactttgggaggtggaggtgggtagatcatttgaggtcaggagttcgagaccagcctggccaacatggtgaaaccctgtctctattaaaaatacaaaaaaatttagccaggcatggtggtgcacacttgtagtcccagctactccggaggctaaagcaggagaatcacttgagcctgggaggtggaggttgcaatgggccaagatcacgccactgcactctaccctgggtgacagagtgagactctgtctcaaaataaataaataaataaataaataaaagttgcttgaacttaatatcaagaattttgaagaaaaggaagcaaacaaataccaggcatgagctgagggggtaaattaacattaactgaatgcctatgatgtgccataaaccataaactacctcaaggtgggtattatccttgtttcagagaaactcaagttaagctacttgttcaaggttagtcagtgacagaaaccagtcttcctgactccaaagtccacagtttctctctctttttttttttttttttttgagatggagtcttgctctgtcacccaggctggatggagtacagtagagcaatctcgcttactgcagccttcaactcctgggttcaagcaattctcctgcttcagcctcccgagtagccagcattacaggcatgcaccaccatgcccagctgtttttttttttttttttttttgttatttttagtagacacagggtttccccatgttggccaggctagtcctgaactcctgacctcaagtgatctgcctgcctctggcctgggattacaggctgtgccactgcgcccagtccaaagtccatgctttctacaggacttttcctttgctcctacagatgtctggccctaaacagaaaaaaagccttttcagtgtggcgacctaagggagaaaagacatggctgcaaatctaccttccaaggaaatgtgtcttggggaaacattaatgaagcaaactaaggcctaagctaaggcctaagcacttaagtaatagctttactcagtgcccctgccacaaccaataaggtacttgaggcgacttcagaggggttgatttgtctcttcaggagagacacacatctgccctgactcttagggcttgtttctattaagtacccagctagattaggatgaagtcacttctaccttaccggcttatcttcttaagagcagctccctctctgacaaactggccagatgctcagcgtctggaaaagtgagtgagaacctccaacgtagggtaggtgttttgaggatttatgaggtgggcaatggtgggtactggggaaggaaaacaaagtgaagggccggagatctaggtgggcccaattccgagaggcaagcgaggctgcgggcactgagagggcagcggcagccagtgctgggtgaccgtcagggtctcacctttcactgccaggcggatgttcaaacagagtttggagaagatgcgactcctttcgacgtccttcggacccttgatgtgcctgactttggaccacttgttgtgcccggcggggacagccgcggtaaagtgcagcgtcctgcccggagcggcaccgcagccccggggctcggggtgggagggccgggggtcgcgcggaggagccgccctgaccccggggcctcgtgccagcaagcatcgggcagcggccctgcttaggctggcagcagcccaagccgacatcggtcccgaccctggggttcaagctgctagcagcagcggccaacgccggcgcgtctcttccactgccggaacaagcagttccggaccccgcggccgcctgtgccggtcacctgagatccaaaggcttgggcccgcccggggcggctcaacagctaatgaccctacactgtccccgcggcacccgggactgggggcccttgatggcgtagcacacttcctttaccgggttcgctccaaaaacacgtccccactgcccgcaaagtccgttccgtggctgcacggtactcgctcctctcttgcccttgagcagatctagttagtgctcaagccctcacggttgcctagagagcgccggactttgtttctcataatgttttagtggagacacatctgagttatgaaactgactttgcttccaaattgctgcctaaatctgagcaagtccagaatgatattttgttgttgcctcattgtactgggaaagaaactgctgccagagaagtgaattgcccaaatgtttaatctctctgaacgtcttccctatttataaataaggatctaatatttgctttatcaacataggaaagttagaaacacaaaatgagcccttagagctttaaagtaataaagttttatgtaaatagccacagtgcacttaagcccctagatgcaagagatggtttgggacagactcagatgagtcacaggcctttgggagagggagaatgatcagacaagccctttggagctaaactcccctcttcattttctctctgctgtctcgaaagagaaaaccgaatccgttagaagatggagagaaacaaagcggcagctgctgaaaagctttgtagtgactcccatgctggtgagattaagtccaaagggcatgacatatcaggtagagaagcaggacagccgggcgcggtggctcacgcctgtaatcccagcactttgggaggctgaggcagacggatcgctaggtcaggagtgccagaccagtctgaccaacatggtgaaaccccgtctctactaaaaatacaaaaaaattagccggccgtggtggcgcgcgcctgtaatgccagctactcagaaggatgaggcaggagaatcgcttgaacccgggaagaggaggttgcagtgagccgagatcgcgccactgcactccagcctgtgcgacagagcgagaatccaactcaaaaaaaaaaaaaaaaaagagagagagagagagagagaagcaggacagtgtgaagtccaagtttgtgccctctgcagttagactgggtggcttcaaaccctggttgttccattttctagtgtatccttgggcaagttcctttactttcctgtttcagtttccttaccatagaatggccttgtgaggactaaatgggataatggatgcaaagcacaaaagcatagattttttattttttattatataagaacctccatggggctgggtgcggtggctcacgcctgtaatcctagcactttgggaggccgaggctggcagatcacttgaggtcaggagttcaagaccagcctggtcaacatggtgaaaccccgtctctactaaaaatacaaaaattagccaggtgcggtgggtgcccatagcccttcatacatgcttgcaccttagcacttaccttttaaaaaaatatcaaaatgtttatatctgtttctaccgtaatactaaattctctgagagtaggactgtacttcctatgcccaacacagttctcattttttaaaaaattaagttttgacatatttcacagatcacacagatcaccaattcaaagtgtacaatgtgttatagaatattcagagctgtgcacaattgattttacattttcatcatccccaaaagaagtcctgtacccattagcaatcattccctatttccccccaattcccacagccctaggcaatcaccaatttacttctgtctctgtgggtttgcctcttctggacatttaatatgaatgggcccacacactatgtggcctttggtaactggcttctttcacttagcatgatgttttcaggattcttgcatgttgtagcatgtatcagtatttcatttctattgccaaataatattccattgtatgaatataccacgttttatttatctgttcatcaggcaatggacatgtggttgtttccaccttctatgatgaataatgaggctgtgaacattcatgtacac

SEQ ID NO: 1244819 - DNA, 4001 bp, Homo sapiens
gcaacatttctgctaacgctgccatcaaagaactttccctttttggggtggggtaggtctccctttgctgtcctctcaggaaaagttgagctctgaagaaaaatgagtctagcaagggtgtattacgaacgcagcaatcaaataactgccaaatttactgaactttttcaatttgctaggtacccgtgggtaccaaggtgtggggattctttgaatcctcactcccacacttttggggcaagctgctttttcaaaagcaagcaagctctgaaagagtatgttacttgcgcagtgtcttacaagggatagctgtgtcatttcaaatacagatgtcaaggctggacgcagtggctcacgcctgtaatcccagcactttagcaggccgaggcaggcagatcacctgaagtcggcagttcgagatcagcctgaccaacatgtagaaaccctgtctctactaaaaatacaaaattagctgggcgtggtggcgtatgcctgtaatccagctacttgggaggctgaggcaagagaactgcttgaacccgggaggtggaggttgcggtgggctgagaacgcgctgttgcactctggcctgagcaacaagtgtgaaactccctctcaaaaaacaaaaacaaaaacagacgtccagtaaaggatgcacagtcaatagggactgatcaacactcgaaaaagcacagtaggaggccgggtgcggtggctcacgcctgtaatctcagcactttgggagtcccaggtgggcagataacctgaggtcaggagttcgagatcaacctggccaacacagcgaaaccccatctctactaaaaatacaaaaaatagccaggtgtggtggcgggcgcctgtaatcccaggtactcgggaggctgaggcaggagaatcgcttgaacctgggaggcagaagttgcagtgtgttgagatggcgccattgcactccagcctgggcgaaagaaacgccatctcaaaaaataaaaaaatagtagggccgggcgtggtggctcacgcctgtaatcccagcactttgggaggccgaggcggaaggatcacttgaggtcaggagttcgagaccagcctggccaacatggtgaaaccccacctctgctgaaaatacaaatattagctgggcgtggtggcccacgcctcaggcacgagaatcgcttgagcctgggaggcggagattgcagtgagccgcgatcgtgccactgcactgcagtacagcctaggagaaaaaaaaaaaaaggcaaaaaagcacaatattgcagtctgcagaatcttctttctccccctttcacaagagaccacattctgacaccaacttccgtggaaacactggcgctagctccaaactaacaatcgccaaattcgaatcagttaccgggagaaggaagtgaggcacttcgccgggcaggagtccacgttgggaggaggaaaggcgcaggctcccgagttgtggagccaacgttcaaatccttacggggtgggaccggcctgggccagtcattttacctgcgcctcagctctaacagggtactgaaatacctactttggggggcctgctaggaaattcaaatgggcaacgctggtcaggggcatctggcacagtggccattcttggtagagctacgcgctccagggctgagcgggaaatggcgaggccggggcactggggcaccgcccagacgcggggcgggcccccggggtcaggcccggccccacaccgccctcccccacagagcggcgaggcccgccgctgcccgcccgccggcccgccagcctgccgcgtcaagcccgccgccggggcccgcagcccgcgactcctcccccgccgcacctcgtggcccccgcttctccctagtcccgctagaggggctcgcgctccgccacccgcccgcccgcccgcccagcgctgcctggcgcctcacctcgccgagaccccctaatccgcgccaaagagccgccggtcgcgcgcgcctccgggctttgcgtgcgcgcccccgggcggcgcagtggcgagcgcgccgcgtgccgcgcgcccgccgcctccgcccctcggccgtggaggcccccgccgggtgctgagcgcccgccaccgccctcttggccttttcccggtccccgccgcgcgcctgctgctgtccccgtgcccgaggactgggaggatggggctgagccgcttgcctgacttttgatccgaccagtaatcactttgcccgtgtggcgcgtggcccgttgcctgaggcttcctggcgcgtggggctgtttggtcccctccggagtgcggtgaggcgggccgagccgggactgcctgggtttggggataacgttcccatctccacccctgttgcagcaagggaaattgaggctgagggaactgggcccagggacggcgagccgtggcgcctctccagtccgggccccgaagggctgctcgtggatgaaccagactgattttaaggggtgaagagggtgcgtttcaatcagatgctcctggaacgtcgaaattgtcttctttggaaagaaccatcccctctttgggcttcagaggcccaaattgaggcgcaatgatgagaggatgtggtggtctactctgatgtcaatcttgagggctaggtatgtcccaagatctcttattactgctgttaatgatgattctaatagctaccatttgtcgagtacttattgcatgccagacattgcacaaagcaggttacacatacggtctcatttaaaacttgtgaggtaggcacctgttgttatccctattttccaggtgaagaaatctaggcactgacataaataacttgggatcacactgctaggaagtactggggaagggaattcaaaccatggtttatctgaactatataactgttacatctatttagaagtctgcctttgataaatttgcccaacctttttttagaattcacttacactttatgcctgtgtgaaccctttcattcttttttggtatatgcataatacaagttcattccaaaaaaaaaaaaaaaaaaaagccctgccgggcgcggtggctcacgcctgtaattccagcactttggcaggccgaggcgggcggatcacagggtctggagttctagaccagcctgaccaacatggtgaaatcccgtctctactaaaaatacaaaaaattacgcgggtgtggtggcaggcacctgtaatcccagctactccggaggctgaggcagtagaatcgcttgaaccctgggggcagaggttacaatgagccaagatcttgccattccactccagcctgggcaacgagagcgaaactctgtctcaaaaagaaaagaaaaggaaagaaaaaccacctcccaccaggttaaataaataattaacattttggtatgtacccttccagacattttcctatgcatcacatcaataaatatatgataggatattttacatttgatgtatcctgaagattaattcaacaaatgtttagtgagtaggcttgttgtaggtgctgggaattcagcagtgaacaaaacaaagtctctgcctcatggagctcatattatagtagggaagactgtcaataagcaatatacacattactaaatgatagataatgcccagtaatgtggcaagttttatggaaaaataaatcaggataaaaggataagagtgatatggggattctcttagttagggtagataaggaaggcctcttagctaaggaggcacataaatatctgatcatttaatgagagaaggagcaacatggatttctagagggaaactatcctagaagagaagcagcaagtgcagtgaccctgaaatggggatttgtttggcatggagaaagggcaagaccagtgtggctggagcacagcaaatgagagaaattagatggaaatcaaggcagatcatgtatcatctggtaaggtttggattttattgggaagtgacagaatatgacgaagggttgagagcaaaggagtagctttgctgtaaaagga

SEQ ID NO: 1244820 - DNA, 4001 bp, Homo sapiens
taatcccagctactcgggaggctgaggcatgagagttgcttgaaccaggcaggtggaggttgcagtgagccgagattgtgccactgcactccagcctgggcgacagtgcaagatcctgtctcaaaaataaataataaataagtgaaagcagagactatatcggatacctatctgtatgcttttaaaatgccaagcatacaggaggaatacaataaacacatagtagtggactaataaatgttaattctacaaaaggttaatttatctttagcttttctgaagtgatttttttcaccctggtaatttttagcttggagaataattcatcactaagtgtgggcaacatttctgctaacgctgccatcaaagaactttccctttttggggtggggtaggtctccctttgctgtcctctcaggaaaagttgagctctgaagaaaaatgagtctagcaagggtgtattacgaacgcagcaatcaaataactgccaaatttactgaactttttcaatttgctaggtacccgtgggtaccaaggtgtggggattctttgaatcctcactcccacacttttggggcaagctgctttttcaaaagcaagcaagctctgaaagagtatgttacttgcgcagtgtcttacaagggatagctgtgtcatttcaaatacagatgtcaaggctggacgcagtggctcacgcctgtaatcccagcactttagcaggccgaggcaggcagatcacctgaagtcggcagttcgagatcagcctgaccaacatgtagaaaccctgtctctactaaaaatacaaaattagctgggcgtggtggcgtatgcctgtaatccagctacttgggaggctgaggcaagagaactgcttgaacccgggaggtggaggttgcggtgggctgagaacgcgctgttgcactctggcctgagcaacaagtgtgaaactccctctcaaaaaacaaaaacaaaaacagacgtccagtaaaggatgcacagtcaatagggactgatcaacactcgaaaaagcacagtaggaggccgggtgcggtggctcacgcctgtaatctcagcactttgggagtcccaggtgggcagataacctgaggtcaggagttcgagatcaacctggccaacacagcgaaaccccatctctactaaaaatacaaaaaatagccaggtgtggtggcgggcgcctgtaatcccaggtactcgggaggctgaggcaggagaatcgcttgaacctgggaggcagaagttgcagtgtgttgagatggcgccattgcactccagcctgggcgaaagaaacgccatctcaaaaaataaaaaaatagtagggccgggcgtggtggctcacgcctgtaatcccagcactttgggaggccgaggcggaaggatcacttgaggtcaggagttcgagaccagcctggccaacatggtgaaaccccacctctgctgaaaatacaaatattagctgggcgtggtggcccacgcctcaggcacgagaatcgcttgagcctgggaggcggagattgcagtgagccgcgatcgtgccactgcactgcagtacagcctaggagaaaaaaaaaaaaaggcaaaaaagcacaatattgcagtctgcagaatcttctttctccccctttcacaagagaccacattctgacaccaacttccgtggaaacactggcgctagctccaaactaacaatcgccaaattcgaatcagttaccgggagaaggaagtgaggcacttcgccgggcaggagtccacgttgggaggaggaaaggcgcaggctcccgagttgtggagccaacgttcaaatccttacggggtgggaccggcctgggccagtcattttacctgcgcctcagctctaacagggtactgaaatacctactttggggggcctgctaggaaattcaaatgggcaacgctggtcaggggcatctggcacagtggccattcttggtagagctacgcgctccagggctgagcgggaaatggcgaggccggggcactggggcaccgcccagacgcggggcgggcccccggggtcaggcccggccccacaccgccctcccccacagagcggcgaggcccgccgctgcccgcccgccggcccgccagcctgccgcgtcaagcccgccgccggggcccgcagcccgcgactcctcccccgccgcacctcgtggcccccgcttctccctagtcccgctagaggggctcgcgctccgccacccgcccgcccgcccgcccagcgctgcctggcgcctcacctcgccgagaccccctaatccgcgccaaagagccgccggtcgcgcgcgcctccgggctttgcgtgcgcgcccccgggcggcgcagtggcgagcgcgccgcgtgccgcgcgcccgccgcctccgcccctcggccgtggaggcccccgccgggtgctgagcgcccgccaccgccctcttggccttttcccggtccccgccgcgcgcctgctgctgtccccgtgcccgaggactgggaggatggggctgagccgcttgcctgacttttgatccgaccagtaatcactttgcccgtgtggcgcgtggcccgttgcctgaggcttcctggcgcgtggggctgtttggtcccctccggagtgcggtgaggcgggccgagccgggactgcctgggtttggggataacgttcccatctccacccctgttgcagcaagggaaattgaggctgagggaactgggcccagggacggcgagccgtggcgcctctccagtccgggccccgaagggctgctcgtggatgaaccagactgattttaaggggtgaagagggtgcgtttcaatcagatgctcctggaacgtcgaaattgtcttctttggaaagaaccatcccctctttgggcttcagaggcccaaattgaggcgcaatgatgagaggatgtggtggtctactctgatgtcaatcttgagggctaggtatgtcccaagatctcttattactgctgttaatgatgattctaatagctaccatttgtcgagtacttattgcatgccagacattgcacaaagcaggttacacatacggtctcatttaaaacttgtgaggtaggcacctgttgttatccctattttccaggtgaagaaatctaggcactgacataaataacttgggatcacactgctaggaagtactggggaagggaattcaaaccatggtttatctgaactatataactgttacatctatttagaagtctgcctttgataaatttgcccaacctttttttagaattcacttacactttatgcctgtgtgaaccctttcattcttttttggtatatgcataatacaagttcattccaaaaaaaaaaaaaaaaaaaagccctgccgggcgcggtggctcacgcctgtaattccagcactttggcaggccgaggcgggcggatcacagggtctggagttctagaccagcctgaccaacatggtgaaatcccgtctctactaaaaatacaaaaaattacgcgggtgtggtggcaggcacctgtaatcccagctactccggaggctgaggcagtagaatcgcttgaaccctgggggcagaggttacaatgagccaagatcttgccattccactccagcctgggcaacgagagcgaaactctgtctcaaaaagaaaagaaaaggaaagaaaaaccacctcccaccaggttaaataaataattaacattttggtatgtacccttccagacattttcctatgcatcacatcaataaatatatgataggatattttacatttgatgtatcctgaagattaattcaacaaatgtttagtgagtaggcttgttgtaggtgctgggaattcagcagtgaacaaaacaaagtctctgcctcatggagctcatattatagtagggaagactgtcaataagcaatatacacattactaaatgatagataatgcccagtaatgtggcaagttttatggaaaaataaatcaggataaaaggat

SEQ ID NO: 1244821 - DNA, 4001 bp, Homo sapiens
ataaagagtctagctttaattaattgaatgttaatttaaaaacaagcgtctagtaagtagcccttttcacacaccgaaaagccaatttcgtattttaaaaaatactcgaactacaaaataacaaatatctggtgtcttagtaacttgaagatcaatactaatgattaagccagcttatatgcttatatgatacatgaaaaagcctgtattttacaaatagcaaaccactaaaacttcgactttccacagaagccattgttttatatcaataattatgttaaagatcaagacaggctaaaagtttttaatgaggactgaaaccattaaaacttggtaaatttctccacgagggtagaattttaatttctgtttaaaccacgggtagatgatacactcttgtgagggtgtactataagaacttctaaggagctttatcagacttcatcccaaattacgtacctagaaaaagatgtaccaatgtctactttggaataagaaattatttcttgtttgagcaaggattaagcagaaactgaaagaagtgcagtttatagcctcttatatgaagtagatgggcacccctcaaaaacaaatcaatatcctggctccttaaatatcaacattaatctaagtaatgtatagcatgctcctgtccaaaggttcccgctaatttgtagtcttctcagatcgatgcttcattttagtcacacatttctatcctgcaagaccgggtacctgggttttttgtctagttttataacactaggcaggtttggccttactcaaaatataagactgcaaaatgcctgtttcacctcaaccacacggtttcaggaaatgttctgtatttccagcagaaaactggtatctaactctcatgatggtttctagcaagtggatagacacctgggtctttgcggcccgtgatgcagcctaacaatagaggaccctgtgtgaacagctagatctgctaaatcaagaggacatccatgttctagactttttattctggtttagcaggatccaaactggttgtcctgaagagactaatgcctctctttctcttccacacaatgggtggcctctgccaagttaactgcttcgtggggggaaaaaagattgcctttcctttggtctgcatgttttaaggtaaatgccacatacacctacaggagcttatcaataatagatagacaaggctcactttcaaactctttcaggagataaactggtggggaagacgaatggcaggagggtgaagaggaagctaaattactatgcaaacacccccaactcaaatccaggtggttactgcagagtgaataacgataagtacgatttcgtgtaaggcaacgtcctttgaaagggctcccagagcgtcaaggcccccacctgatgaatgggtgagtcaggcaggcccagctccacttcgaggatgggaaaactgaggtacgaggcggcgagatgactggcccgaggcctcgctgaaagatccgaggcggagcggagaaccagaagcaccgcttctctcaggctgatgctctaatctcggctccccccgcccctacgatggcgtagacggcctccgccccccgactcacacacaccctcccccgggaacggcaagtctcctcgggttccaaggacagggtcaaaagacaagaggcccgaggcgctcccgccgtgatttgcagccggggagccattgggagcgtgcgtgcctccagttcaacatggcggcggcagcggccgcccccccaccccaagcctccctcagggccggaggcttctcctcagggccctccggtgggcgggaagacagcccaaccccgccaggaccttctcgtcgctgccgctgctcgctgaagaagtcacctacccgacatgactaacggccgcggcgcggaggccccacagcccgccgagaacaacgaatacgaaagccaggcggcgcggcggccggagctgtactgagggcggcgcggcgggctgaggcggactgcgggaccccggcagccaatcagcgggcagcgggtggtaccacaaagctgcggcaggagggatgtttctgcactggtactagccgccgagccctgaggccttcccagggccctctattcccccctccgctagccgtaccattattgagagggaattgagaagagaaagtaccaatgccacgatcacgatcggggaggaagtggaacctacttgctccgtcttatttacaatcctatttctcactttattgggtgtgatggaatttgcggttaggaaacgaaagaggagggaccttataaacacagagtatttggttatgcaaagcctttctttccctacaatttcgaatggtacgtcctagctggcggcttttgctgcagagtgcttgggccacctgggggcgttcggagtcggcgagctctgggactgtgagtcgtgaccagctcgcgtacctgatcgcttcccggtttgttgtaactgtctcgccgagtagcaaacaaggatgctggaagaaaagggtacattaaaacgaaatcgtacacgaatctgaccctgagaatgtggcggggcggagggatcgagctttaattttcagcactataataatagctgactcttaattgtcaggcaccttacatcatctcatttaattctcacaacagactgatgaaatattttccccatgttgcagatgagaagacagaattcatttgacctaggtcgtacagctagtaaacggccaaggtggaatttgaagcctggtaacccaacgatatattgcatatgagtttaaccaaaatgctgcacggcccagcggggtgggcccaaggccgcttgggctctgcagcaggaaacgggctggaaaagctcagagagccagcaaagacgttttccgggaaggcatggtatctgagccaaaccctaggtgttgtgcagaagttgaccgagtaaagaagtgagcaaagtactttgcagactagttgtgtaacaagtagttcttcaaggggagagtagaaggagatgatgcccgaaaaggagggggctaaatagctggggccttgtcaaatgcattagagttcccactttatcttggaggaaatgagaaccactcaccagaggattttataggagaggagtaatatcagatttgtattttctggctgccaaatgaaaaatgcacggggatgagaggcgcttaaaagcagagaccaattaggtggccagtgcagtaattttggtgagagatgacagtgccctggacttaggtagtagctctggagacagaggtaagtgaagcgatctcagagataccccggggtagactagacaagagctggtgatcacctgggttggagagggtagtggagagagaagagtctggggtgaattctgggtttcctgcgtagacacgggggccgggtggtagtgtcattgactgtgatagggaacaaaaggaggagcaggttgcaatggaggtgaaaagggaagttcagagttaataccttcaggtcagaaaaaagacgtgaggtcatctctccccattataccagcagtgattgtgccctcaactctagataaagagggtcacagaacgctctagataagttccaacaagcaagactaaaggagtgaaaattatttcatgactaaaaaccattaaactgtttagcatatatattgaggaaggcagctcagcagagaagatgggcatgtccaacagaagagaattgggttatggaggggaggggaagaggtaattctagaagatccctaaagggacctagagggttgttcttttttatttattttctttttttgagaatttttttcaaagaaggaaataccaaaagtgttactcatcgactccttaagtttgtaccaccatttattcattcactcctccttcaattgccatctctggaggtttactatgtgacaggctctggaaggccttggagagacagaaataggaaggagagcctctgccttccaggaactac

SEQ ID NO: 1244822 - DNA, 4001 bp, Homo sapiens
tcacaatcataatgtggtattttatcacacttttctcagtaaataattttttaagtaaggatatgaaatgtttgagtgccatcattaacaaaactgatccacactgaatccagtaactgtgacattcacattattttcaggtacattcagaacattcaccaaaactgaccatatgattaactgtaaagcaaatctcaataaatatcaaaagaataaaataatacagaatagattttctgataatagtataattaagctagaattcaataagaagaagcatgacgtagtaaaaaaaacacacacacacacacaaaacaacaaaaaaaaacatatttgtctctgctcatttcctggcacacagctctaaaacttctgagtcttcagagtgataaaagtggttttctatatgctaacgagacgaatgataggtacctgggggctcctgaatagcctcaggacaggggctggctgccagggaggcctaccatgagagtcagccttaccgtctgatttctagagaggagagatgggctgaaggttgagttcatcaccaatgaccaatgaattaatcatatgtgcataatggagcctccataaaaacccaaaaggatggggttcgatgggattctgggttgatgagcacatggaagatgttgagaaggcggcatacccaaaaagggcatggaagcccagggccctttcccctataccttgccctacccacatcttccatctcactgttcctgaactgtattctttaataggccaataatcttgtaaagaaactgttttcatgagttgtgtgcaccattctaacaaatgatagaacctgagaaaggggtcatgggaacctccgatttgtagccaagtcggacagaggttgtgggtaacctggggatccaccacacgcaattggtgtctgaagtggaaagcagtcttgtaggactgagaccataacccatagggtctgtgctaactcagggtagacagcgtcagaattgaattgaattgtaggacatacagttggtgtctaccagagaactgaattgaatcactgtaggaaaaaaaaaaaaaacccacatatttggtggccagaaatgttggtgtgagcagtggaggaaaaaacagttttccttttgttaatgtaggggagtttgttcttacaataagataaacaaaaaatcagcaacagtttggaaactggtaaatacacttccaaatacttatgggtcaagaagaaatcacaattggaattacagaaacattttgaaatcaatgacaataaatacagtaccaatataaatttataaactgcagaaaaataagttgagaagattacgaagaatacaaaagtctaccactcattaataaaaaacaaacattctaatacatttcttttcaatattttttaccaaggaagtatatatagttttacctcaaaagcctaagacttaaccccttgttctaaaaaagaaaacccataaactttattttaatggctataaaaaattcaacttatatttcactttctgtataaatctttgaggacagttatttttataatttccttccccaaagagtgcctaggattgcaataatttcatttgttaattcaaaaacataaacttaggtctagaaggtttttaataagcaaatgcacagaaacattactctctaatatattagaaataaatatttttcttcacaaggttttcctttctttcgactattcctgatacgcattcaagtgttcctacctcttaataaagcgtatgaaagcccaaagaaatgtaaactttcttttaagttctaagttaagcattaataaagtgttacagcattaattcaggaccctaaaagaacttgtatttgtaaaatatcacgcacaataaatgtagcatagtcacttaccacttgacctgtttttacgacttgatttcccaccagtaagcagcatcttgagactattccgaaacatggttatactcttctactgcaaaactgtaaaagaaaatataggaaaatgtgtttaagaaaactttattttcatagcataagagggtgactatagtcaataactatacatgttttaataacttaaagggtacaactggactgtttgccactcaataaataaatgattgagaggacaggtaccccattcttcataatgtgcttatttaacattgcatgcctgtatcaaaacatctcatgtaccccataaatatatacacctactatgtacccacaaaaagtaaaaacaaataaaaatttaaaaagaaaaaagaaaacttgtctattcaaaatactaagaatttaaaattaattataaagaattaactatgtttacccccataaatatatacaactattatttacccataattaaaaatgaaaattaaaaagtaataaaagtgctaaaccagaaaaagataattaactatgtttaaatatatagtacaaaactgtaactatatgataaaaaagactattaaacatttaaataattccttaaaagaatacaatacttttgaccaccctaagaaataaaggtagatatcactgaggatgcagagcaatagaaaacataattaggtagctataaatactgtctacctttcacttgactctccattcttggacaattttcctacctgacgcacaaacacacaccgcccccccaccccccaccaccacacacacattctagaaacttacagcacctacagaatttccactggtcaagccagaattccatctcacaagactacagctatgcatgaatccgtgcttattccatgtcccactcctaccaaaggaaaactctctgactgctttggattacatcctctctcaccttctcaagaattttattttaaaaaatcatcttccttttctctcaaacagctttaattctttttctctctcctgaatcattccaatcataacatgaacatattttagtctatcttgttcaaaaagaaagtcccactctttactccaccacaattcaatgactgctcttatatcctcactcttctcaacagcaaaatttcccaaaagtgttgtaagtacttggtgtgtccagcagattaaatagagcaaacatgaagtgggacacaggtcaacagaaaatatccaaaccaaagcatagagagataaagacaaaaaattatagaaaagagtactagatgcatatggaaccactgaaaagttctaacatatgtataactgaaatttcataagagcgtgaaaattgggaagaagcaatatatgaagtgtgagcaaccaagaattgtctaacattaattaaagacatgaagccatatctgaaagaagcttgtcaaactcaagcagaataaccacaaagaaaaacactgagcaaatcatagccaaactgctaaaaactaaagacaatcttttaaacagccagacccccaaaaaacacatttaaagtagcaagaatcaacagactgaaagatactttcaacagtaatgatgaatagcaaaaaataatgacttaaaaattctgaaaaaaaaaaaaaaaaactggcgccaatcaagcaatttactctcagtttaaaaatatctttgcaaaatgaaaatcaaaagaaaaaacaaataatttattactaaaagggagttcttccaccagaaggaaaatgatactagaaaaaagcatatacatgcaaaaaggaagagccataggaagggtaaatatgttcttaagtattaataaatgactataaaaataacaatgataggctgttctttaaaatatatagatttaaaatgcatgacaacaataaaaaaggaaggagtagggtaatggaattgaagtttctaagatatctgtattacccaagaagagaagtaataattcatgttagacttcaataactcaaaaactcatgtagtaatctctaggatattcattaaaagcaaactgaggagataaaaagaataagtaaaaacatttgactaaaccaaagaaagtaaga

SEQ ID NO: 1244823 - DNA, 4001 bp, Homo sapiens
agtgcctagcgctactactaacacctttaaatccctatcttaaaacaggtttcaaaatgcaacaaacacaccaaaaaagctctattggacaacatttaatgacaacataaaatgtagatggcatttgaagtatttaaaaataagtcactaagtagagctgaaaacactaaatacaccaaagacaactcattatctgtacacattttagtcttcttcttcactttgggaaaaaattaattctattaatagtcatatgtggaatattttgaaatcacatcaccagtatttactaaacacttgaaaaaaatgtatcatcagtacatggagacttgaaaactactctttggtcacaaaaagcacttggcagcacatttccagaatgtttaaatttttatttctactcaactaagaacaaaaccaacaagtactactgtaaaccagataagatgatctgctttcagacaaacatgacaggtagcaaaagaagtgaaaaatgactgactacagaaaatagatcatagaataattaggcagattaataagaacaaagaaacagctgcagaaaggtttgtaaccttaccattttaaaaaaaatccaatttcaatattatacacaacagtatcaaccctaaaaattcacagcttagggagaaatgccctgaatcagacaggctgtctgtatgtaataattgttaataatttttttttttgaaacggagtctcgctctgtcgcccaggttggagtgcagtggcaccatctcgcctcactgcaacctccgcctcccgggttcaagcgattctcctccctcagcctcccgagtagctgggactacaggcgcgtgccaccatgcccagctaattttttgtatttttagcagagacggggtttcaccgtgttagccaggatggtctcgatctcctgacttcgtgatccgcccgccttggcctcccaaagtgctgggattacaggcgtgagccaccgcgccaggccaataattcttcatgaactacaaaagtcatagaaaaagaaaagggaaatgaggatgaggaggtacaaaattattttatttgaattctaactaaaatccaacctgctcacaaaaaatgtcaatccagacatctctcaaaaagagagacatcaaaactgttctaacaggagaggtgtccctctcgagaggccatatcccccaacaataacaccagaacagatacacttcccatggacagatctcaggggaagagtattaaaacgatactgtcgtcgatttaaaaccaaaggaaaaagagtaaccttttcaagggaagcgccattacttccctctcctgctccccctcccttctgtgtatacatgggtctgtgtatgaagaaactgccttggacttctgcagcattgcagtagactagaggatggggaagggggaagggtacggggagagaaacgcttccatcgcccctacagaagaggggtatagatttcctgtgctagggggtggaatccacccagcaagccacccagagcagtctcccttcccaagaatacacagacactacaaaggagaagaggagcaaaggcaccagaggggaaggggacctcgcgcctttaaaccggggtgcacatcaacccagtctccctgtgagggccacaccttcctcgaaacatcccccttccaccaccccttccggtgaccctcaggaaaaaggaatggaattgctctcgccccttaaaaccggagggcgcccagctcaccagcttcttcaccccacccacagaatcacagaccctccttttctccctcccccaccccactcccacatcccttcttccacacacaggcccgagtgggccgaatttccccgcccccctctatatccccctttcccaaagcagaggtgcccttaccctttcgccgacaggtctggggcggagcaggcaggcgcagccccctgcagcgctccggtagccgctaccctggagggtgaggagtgaggaggaggagggggcccggcgacagatcgccgccccccacccccgagccccagcaagccgcccagcccaagctctgcaacaaggggcggcggcggcggggggtgggggggggggcgaggggacgaccggggtcgaggaggcgccctcagcgcttgggctcagttaagatggcgcggggaagtgccgggagccgtctccgtcgccgcctcgggggaaccggcccgggcctcggccgcctctagtcctcacacagccgaggccctctcggtcccccgccgcggcccctcggcgggcgggcccacgcgcagccctccgccaccaacaccacccctggtaaggaggcgctcacaaagggaagagaggccgcgggccggccggcggacggcggggcggggtcccccggggccgggaggcctcagatgttcgcgagtgcctagtgctttcggcccgcgaagggcgcagggcgagcgggacccctcctctctcctcaggcaggcggcggcaccgactcagtctctttgccaccctccctctctctccccgagccctgaagccacagagcccggccgctgcccagcttccccccctttacccgacaccactcccctcctccagaccgtcatcccccgtctccgatctcgcgagattttccgcctgacaggccggaccctgcgcgagacacgactacatgcgcgcgcgcgcgccctcacaggagcgcgcaaggcttgctacgggcagagttgtcccggtggcccggagttccagcctctgtccagcatggcctcactgagttcgcggagcttctaatgccacgcgggcgtcaggtgcattcatttcaccccggagatctgaagaagaagagtttatctgcattccccttccttcctgcttcccacctccaaagcccgccactgatcctgcgaataagtttgccctgaagtgtggaatatcccattcctgcacaactcggttctacaccccctcccccgtgggattcagaggtacactgggcagcgcaatcagtatgcagttgagtttttgagattctaatagttgatactaattcttggaacgacagtaagacttggaaatacagatctaagccaccctatatattggtgatgtagaaaagagataacttcttgaaaagtgtctgtgggtttagtaggttgagtaatgagaagttttggaacaagagcagcaaacaaactaaagactcctatgcaaagaagaagtagagtttttattcttttatctcaaaacttttttttttttttttagggaaaactccctcagtacttattcaagaacctaaaagtgtaaggccgggcgcggtggctcacgcctgtaatcccagcactttgggaggccgaggcgggcggatcacgaggtcaggagatcgagagcatcctggctaacacggtgaaaccccgtctctattaaaagatagaaaaaaattagccgggcgtggtggtgggcgcctgtagtcccagctagctactcgggaggctgaggcaggagaatggcgtgaacccgggaggcggaggttgcagtgagccgagattgcgccactgcactccagcctgggcgacagaatgagactcgtctcaaaaaaaaaaaaaaaaaagagagaacctaaaagtgtacacaaagtgtagtcataaaaaatcttggttctttaaccaacaaaacgactgaaataaataaacctgttatatgagtttcatgaataaaaattaactctgggccgggcccggtggctcacgcctgtaattatagcactttgggaggctgagacgggcggatcacctgaggtcaggagttcgagaccaggctggccatagtagatctgtgctccaaggaaggagcatgttgatcagacctaagcaatccgtgtatacagtgtatgtatgaccttcctctagtctggctcagggatgggcacatgatccaattagagccaatgggtacaataagattttctctggctttttgggaaagaaactttcttat

SEQ ID NO: 1244824 - DNA, 4001 bp, Homo sapiens
aagactcgagggagaggccagaccatacacaccatgtccaggcacgttcctggtgttaccagaattagggggcatgggcctgcagttttggggaaggccctgggaccagttatggcgtgagggaggggggcaggaagcatgaggcctactgtgcctgggtcctcatgccccaaactgagctcctccaggcctgctctgccggcacggtcagaagattacaggcccttgggttgggagacagggctgtcactgatttgctgggtgaggtcacgcagaaggtggcttgctgtagctcctcacctgtccctgccccccttctacctaaagagcaaacctggtgccttctctctggggcaggtagggatctaaaaaagccaggctgggccgggtgtggtgcctcacgcctgtaatcccagcactttgggaggctgaggcaggtggatcaccagaggtcaggagttcaagacaagcctggccaacatggtgaaaccccgttctactaaaaatacaaaaattagctgggcatgctggtgcatgcctgtaatcccagctactcgggaggctgaggcaggagaatcgcttgaacccaggaggcggaggttgcaatgaaccgagatcgcgccactgtactccagcctgggcgacagagcaagactgtctcaaaaaaaaaaaaaaaaaaaaagtcaagctggtgcagggagggtgaagcttaggacagctgtcagctggtccagcaatgtttcctcctggcccaggcctgagccagtgctctaagctcagcctcacttgtcgcctttatcagtggcttctctgcctccacccacctgattgctggagcttctccagcacacccaactgagataacacacccagtccctatggctccagggcggggactttcgcttgacctactgcccaccgggcaggcatttcttctcattctctgaacgctgtcgggaggtaggcaggagacctgagtctttcctgaggtggtcttttctggctgagcacttctctctgggactccccacctctgtcatagggttgtgtccctctgtgacaccggcgtctgagtctaacgtcccagccttccttcctccctctgcctagtctaatagcacccagcacctaaaacaagccagagggcggccaggggcctaggctagcccccggagggtctactcaggactcaagtgccaggagggaggcctggacttttttgccttaagggctggagacccaggaaaagttcgaagaggaaacgctcatcgcagctatacgagcgtccaccctggaccaggcggcgagtgggttggaggagcaaggctggacaggaagggggcaggggctgccacggcaggctcgggagagccccacccccagatctccctccgggcggcggcgcaggctgcagcggaggaagcatttcctcattccagaggctgcgactcatggacgtcgggatcggcgcccgcccccagcagctccccgtctggggacacggaggcccgggaagggggcgcttttccaggctcctgcagccaggcctttccccgtggccctccccgccctgcgcacgcagtctgggctctgtccagggtctcgggaggctctcgggtcccggccatccctgtttcgtggctgggggaactgcggcccgctccggcaaagcggggacccgagcccttgccgccggttcgcaggagccccgggttcgatgctctgtcaacctgcttggggtgtccgtttcccgctctgcgaggtggggtcaggccaagacgaggaggagcccgcgcaagcgcactcaccaccacggcggtgaccggctggcccgggatgtaggacatctcgaccctgctctggtcgcccagcgccgctccgagaagccggcagcagagtacccgcggtcgcgccctcgctgcttaacaaaggccgccccgctcggcccgccccctcatgaatagttaacaaacctccagccaatcactggccggagcgccactccgctttcggaagtccctgcgcgtgcgcagaaaagcgggcagagggcggagcgtgtccggggcgcccacggcgcaggcgcggagggcggggcgggatctgggcgcgtgcgcagcccgagacctcccggcagtcttccgagcaagatggcgccgcgggcatttcttccactgcccgtctgagggaacgctaagtagtgtgtccggcgccgtgttccaggtaactgggccaccgtggccggggaacgcagacgcgccaccacctcccggccggcccggaccctcaatctcctcggcgtctttggaagatccgaggcccaggactggtgccaggtctcggaagctccagggggagggggcggcgtgaacccaactcaccgagctccgggcgccacttgtaacttggttttctccgcagctccgcgttgttccgcgagaaagcgagaggccgagcccgggctggtgcgatggccgcggtggtggccaagcgggaagggccgccgttcatcagcgaggcggccgtgcggggcaacgccgccgtcctggattattgccggacctcggtgtcagcgctgtcgggggccacggccggcatcctcggcctcaccggcctctacggcttcatcttctacctgctcgcctccgtcctgctctccctgctcctcattctcaaggcgggaaggaggtggaacaaatatttcaaatcacggagacctctctttacaggaggcctcatcgggggcctcttcacctacgtcctgttctggacgttcctctacggcatggtgcacgtctactgaaatgggggcccgggggacttttttaaaaaaccagatcgggaggactgtggccagcaattaacaccatgtagacttccttagttcttaagtggttgaattcgctgcttgttctgtaacgttataaataatttatatctgaagacggagagcctgtaatattcttcagattaaatgaagcgtgagacactttgtggagttctttcctgctgtaacgcttaggctgccactgatgcaaaatcgccgagatttgactcctggagagcaaggaatgggccatagccttgtgttaagtccttgtatttacacataggccattcagaaacgggccctaagggcctacataaggaaagaacttattaacatcctaagaagcagtaacagttaatatgtattaagagctccctgggccgggcacggtggctcatgtctgtaatcccagcactttgggaggccgaggtgggcggatcacctgaggtcaggagttcaagaccaacctggccaacatggcaaaactccgtctctactaaaaatataaatattagccgggtgtggtggcgcgcgcctgcaatgccaggtactcgggaggctgaggaaagagaatcgcttgaaccctggaggcagaggttgcagcgagccgagatcgtgccactgcattccagcctgggtgatggagcaagactccgtctgtctctcagggaaaaaaaaaaaaaaaagagttccctatatgctggcattgtgacttctactctacaccgatcctctcatttaattttagcaataaccttacagggtagatgttattgttagctccctcgtaaggaacctgaggctcagagaggttaaatacttctcccagaggagatacagctaggaagagacagagccaggattcaaatgcaggtctcttaatttgctcttgatatgtttgctgggtgtacctttcacaggccagcgttccctcccactaaccactactttcaggtatatatggtgtcattttagttccatttcatttagtgacagtcctttccataagaaaaaataaagtcaagctgtattttttagaatatgtctagggaagattaaacattgtttggacatttaggctgggcacagtggctcacgcctgtaatcctagcactttgggagtccgacggcaggcagatcacctgaggtcaggagtttgagacaagcctggcca

SEQ ID NO: 1244825 - DNA, 4001 bp, Homo sapiens
tggggagggagtacctcatgctctccacattgggattgtcttccccccggaagaactggttgttccgatctgtccggaccacgtctttgtccacagtgaactgcacattacgccagaacgctctgtgctcctcgggagtcatggagagcctgtgtggagccgagcacccagccggggtcagcgggtggcacccagaggcatcgtgtggcgcacacactgcaggaagccacccttcctcccaacccccgttccctggacgggagctgggcggctgctgccggctgcagaccctccccggatgcggcggatgggtggcgtgtatccaaggctctccttgatattaactcagcctcacagtctccagcgtcccaggaaggagagcaagttgcagcccagtgggtaatgaggccttggccctggcccagcgttctggaggggagctgagcacagcccaggggcttcacccagtcccagcctcctggagagagagctgagcccagtcccgggttagcagatcccaagtgggacacagtctccggatgccttcacccctccaggccctgctcccagccccagccttcagctgtgggacgtcagcgcctagttaagtctgttgaacgagaattctaaaaccttgacatgtgagctaacgagccccgcagctccgaggcccgagtgcttggtttaatgactgcacttatcccaccctatcactcacgttcctgggagacccatttttgaaagaaactatgggtcacgaaacatattatcaatgctgaattgcacctcaaattgccttttcaaatgacattttcctccgcggctcggcggggtgggccgggctggccccggcggttaccttttctgctggatctcagagtactcctttcgcttctgcagccgcagcgcctcccgctcctccgacgtggactcgtggctgtaatagcgcagcaggaagggccagacctccccgcggattgacacatcaataccgccaaagaaaatggcctggaggaagcggcaaaagttggggaggggataaaatggggcagctcaaagaacccccaaatccccagagatgtgtgttttggtggtttttggtgcgccttgattcagatctctgcaatttgcacatatttacaaggggaaagcagtggccttcaattcccatacaggacacaaacccggctcatttcaatgtcaatgccccccctggggtggcgctcagattaacgtgtcgttctcacgtcatggcctaatccctggttttggaaatgctgcatttcactgcaaacccttctatgcaggctgacacggtatccccccaaaccctcgagggaggtgttgtgttttgtttttttttttcaacgcagcagctttgattgctttatcggtgtgttcacagagagcctcacacaagaaaacggggccctcacgaggaggtggcccgtgggtgcgggcgggcggccaggccccggccctccttccctctcgctcgttcccggttcccggccggctctccgcggggccagctgggcggacccggacctcaccttccgcagcttgtactcctcctccacctggcccagctcattcaggtggttgagccaggcggagacgccgagcctcttgtacatgctctcctcggggtgcgtctcggaggacggcagcttggggcggcggatggagaactgcatgcatgtcttatcgggggcgacctgctggacgggaggaaaactgggcaaaggtcaggatctcagccgcgcggcttcagaggccagcagtgcttttcccaggaataaaagcctctctctcttctgaaaggagggcaagggccgtcccctgcatacaaacccctaaatggcgagtgtaattaggcgcaattaaaatgaaaataccttcatcttaaaatcggtttccctctgcggctctctcctccccggcccactgtgccgccgccccccactctctccaaccccagccgcaaaaacggaatgaatgcctcgttcggcctaacttccctctgccgggagggcctgcaatgaattacatgtgattggccacatacaaagggatcgctgttctgcgagcagggagccagcctgtcagattgcctccgcgagcagtcacgaatccagggcaaaactgcagctgacatttaattcaaaaatcaaaggttgttcaatgtagggggaaaaaaagccatgctactgtaataagggaagccagcaggaggctctgcgggaaggaagggaattttaaaatcggccccatttctaataagcacatacagtaccttaaacagataattaaagagctcttattacatttgtacgtagattgagcaaaatatggcaggaagtcttgtcaaaacatgatttttcaagtgcagggcactgactttaccgaaagccctgggcaaaggtttcaaacccaaagttgctgctctgacggccaaaaactaccgtgggtcacaccccgtaagcccccggggcccggggaccccagacacaggacccaggagggagatggggcccgtggggggtggggagtgtcaaccgctgggcattctggggccgtctgctgggctacctggtctttgagctgcatctcggtgcagtatttccactgctggaacacgtcagacagcttgtccaggccgccgtggtggaagtggaaaaccttgtactggctctctcggctggcaacgaccagctggccgctggtgcaggcctcgtcgctgaagggccattggaagggggagagggaagcccgatgaatatgtaaacacgggggttttatttccaagtataatcagaggccactgtcgccaacctcagaagcaggaaacagtgagtcccagtggagttggctgctagcgggaggggacagaactacaccgaacaaaaaccaccaccccctttgccgaagatggcaaaactgctccttcctggggggccctggagctcctctctggagacctgccagagtggccttctccccaccaccccctgcccggcaacatggtccctgcagtccgggagacctgggtcccaacgctgagtgccctggaatccagttctgagccctggcaggccatgtgctaagagaacctcctgggaacagacctccttcgttgcgtgtgggtggaactctgggagaaccctccagggaaactcagtaaacatccgtcagtgctgtcagcccagccccggctgcccttagatgaaaggctggaatgtggctctgggtctgggaacccccccagcttctggacacgccggcttcttctaagcccgggcctctcattggtgatgtctgcggctgggcagccctgactataaggaggaggatctggtgtggggaatgactgcaggaaactaggcatcgcccacccatcacgaaaggaagggagcctccatccggaaagctgcggcccgtcccgcacaggtggccgagctccagagcatcccccggcgatcagagccgccggcagctgctaccctctgccctggtttggtttcttctcccaagccagagttgcaagcaaccgctggctaccatcacgctgaaggtaggggagtgagttcggtagctcacccagcctgagaactgtcagggagctgcagtggggaatcactgcccacaagatcagcgagggaggaaagcagacgcttgggaagactccatccagggccctgtgtccccaagccgtgcactgcaccggctgcaaagcccaggctgccagggaaaacacacacaggccaactcccaggaggcgcccagagatgcttcctacctgaagaaaaggcggagggagcgcatgtggcccaggtccacgcggaacacgccgcaaatctgctccagggcgcacacccgctgcggctcgtcccagcgtggggtctgcaggaggccgttgctgtccgggaaccgcaggccggcgtcggagctggacggggggctggtggaacaggttatgtgatgatcgccacacttctccc

SEQ ID NO: 1244826 - DNA, 4001 bp, Homo sapiens
gtcccacctccttgcactgttatgaaccacttggaagaatgtttgtatatgaatggtgggcaccctctgtaagacagagggcaaagttgtacaacggttttctggagctgggacgtcctgggcctaaggcctaattctgtcactcctaactgcatgagcttgggaagttacttctctaagcgtcagtgttcccatctgtaaatgggcataactgcagtcctgacttcatgagcttgttttgtgggttaagtgaattcatgcatgataattaggaactactaacgcaatcaccaaaattgctagaggattaaataattccacagataaaaactttttttttcctttttttttttttttttgagacatagaatgttgctctatcacccgggctggggtgcagttgcacatcttggctcactgcaaccttcgcctcccgagctcaagcgattcccctgtctcagcctcctgagtactgggattacaggctcacgccaccacaccgggctaatttttgtatttttagtagatatggggggtttcaccatattggccaggctggtctcgaactcctgacctcaggtgatccgctcgcctcgtcctcccaaagtgctgggattacagccgtgagccacggcgcccagccataaaaactttcgccataaaaactttcgttagccatagtctcaccataaacatgccacttacaaaaaaatatgcgcacaataaccacgctcaggatgcaaacaacatccattaatgaactttgtagttaataccaaaagttactcctcactttattctttatttacaaaagctttcatggttcttaaaagtgtttagtattcaccaattttactgttagcgtttctaatgaggattttctaaaactgaggcatggatttgaaaaagtgttctgatcaatcagtaacagatttggaatggaatctccagcccccagtctttgcgcccaccctctggcaatatgccgcctcacgtgagcatctttaagacggagttccctttttattccagataaaagaattaggagccttctggtagaaaagaaagcagatcttcaggatcaagtcgcagaggctggccaatcagcccagcttctcatttgaacttgacccagacagtaaaacaaactttaccataaggcgagactaacttttgttatgtcttttctattcatttcctatttctgaatcaaatctgaactactttgtggccaatatacgacaccagcttccgagtgtgggaatcacaggatttcaggattcagcggcttccggcaggatcccctaggttatgtttagcaatcttcagttgcctttcctttttttctttccttcctttcgttctttctttctttttctttttttttttttcccaaaggaaagaacaagggagcccaggcggaacggaagtgagtatcccgacacgcggatcttaaacagcccagaccaccaagcccgacaggccgggaaagctgagcgcgcgctgctggggggacgcacactttggaggctgtgtgggcgcgcgccggcaccccacaagttctcatccgtctgctccgccgattcagccagacaaagaccgcaagttccccggtccaccgctccagacaggcggggaccagtctccccgaattaggcccattccgggcccgggcgccctcactcgccgcggggaaaagtccccaggtgcccctccgtgatccaggtcctcccacaacgctcccgctcctgctggcgccccgcaccccgaggacggcggccggaccccggcccctccccggtcccgcggctgcaggcccacgcgccccacgcgccccgcgcgcccccgccccagctccgccgagggggcgctgctcgctgcgcggtggacccctcggaccccgcccccgcggccccgtccgggccccgatacccacccgggtcccgctgcgggggccggattcgcgccggctccgagagccgccaccgtcgcctccgccgctgccgccgccagtgaggcgcggcggggcggggacgcgcggggaggcccggcccccggcccgcccccgggcccgcccccggcccggcccctgcctgcccccgccggtctccccgcccaccttctggcccagccctgggcccaagcctctagttccctgctggccctccctcaggcctcgccgcgtcccggcctcggggactgtgccccgtcccgagcctggcgtccccaaaggaaaggcagggctcctcggacgctccgcgtgcgcgctggccctccgctgccgccctctgcagggagatttctcctatttcggactaggaagggaagatacgctccggaagaccccccgggcgtccatgcaaggagtctccgtaggacccctggagaagggcaccggagccccctagggcaggagatggaaaagcgctcgccatgcgcggggtccccggcccccggtgcccccagcccgcctgccattcccgggcgcttagcagtccggggtccccaggtgcccggcaggtcccttcgggacctcgagccgcccgctgggcacacgctgacgccgctgtcgctttacagaaattgagcgcagccgaggcgggacccgggcgcagagagcgataaaggaaaagcatggtcgtgctctaatcattacagtctaagggacgacacgtcgagacggcgcgcgcctctgcgtgcgtggagatggcacaaaggccgcgccgcccccggcggcccccgccctcgcagcgcgcgtggtcccggcccggccggatgttgacagcgtcgcctagcaacgggaaatggcggaaccgggcggcgcggcgggccggtaagccgggccgaggggcagcgggtcttggagtcgccaggccgcgctctccgttcaccgctccaggtggcccccgcgtcggctcctgcctcgccccttcgcctccactcccccttcctctcgcctgtgtcccttctctcgccattttgctggcctttcccgtccactgcgttcagcccctcacccccccgccaacccttctcacttctcccctcctgtccctttgtcctctctcggcctccctctttcccctactccaagcgcgcgactccctctaaaacccgggaccgctcactctgcagtcaccatggcaaccactctgcgtggcggtccctgcgcgcagtcctcctaagagtagagggctctgcagggcgcggggctgttggataccgcccctgaccttgctccggggccactcgctgtggccggagaccagcccggccccgcgcctccctcctgcaaggacagatcccctctcgcaggcttgggggtgacccgcgatgggaggggtccctgcggttaggcggcccgcgatagtccgcggtcaccgtcctggggcctgggtggaagcactgagcgcgcacagggagggcggctgagtgaagatccctgccaccgggcctctgctcgcttaggctctgtttaaaaggatagaaacgattggaaagagtttggcctttttaccttagacacatcggtattgtttcatttttttaaaggtgggtctgtatgtattgacatggaaagactaaaggtattattaataaaacgataggcataaatgtaaaagggtaggtatactatgatctctaattcagggtgtgtgtgtgtgtttaaaacatagaaaaatgttgaaagaatgtggtcctaaatgttatcaatgattatcttgggaaggaaagggaagatcacagggaactgtcactgtctgtctctttgaacatatctatattcctttgacagataaaaatagcttgaatctttaattttttaaaaaagatatacatatatatatatatatatatatattcctgtgctacgtaaatcgtggagaaactcagagtccccagaacacttactctgatcgcgctactttctctacgttgtatttcttttccccagttttgtcccagacacaagttatatttgaggtgacttttctggggtg

SEQ ID NO: 1244827 - DNA, 4001 bp, Homo sapiens
tggctcttccaggaccagaccctgcctcattgaattccagaactcaaggaagatttggaatctagggtagagaggcctcagcggtcaaagctcaagtccagcatggcaaagggtagggctgagtgcacggcccgggtcacatctgggtctctgggccagtcaccgcctctctgactctacacatctcacctgtggaatggctacatttggggacagcacccatcgccacagagtttctgtgaggacaaaggagaggatggtccacgccgtcagtgcagaacatgcacccggtgagtgctcaggggtgaccctcctcggcatctgcccagaggtcactcacctgagtctgctcaggctgctgtgtctctcacttagaaaagtcgttcatgcaccacagaaccagacacctgtgtgcgtcttatgtgcaagtgctgcacaacacagaggtgagtgggtgggcaggtgggcggtcactcagcaccagtgacattttgaggtcatggcacccatcataatgggccattgcccaggtcaagtgggcccagagtcggtgtcctccagcccctaaggtgtcaaaatgtgtttgtgcaggtgagcatgtacgtttatgtgggtgaacatgtgtgtgcacgagcagcgtctctggccagggctggctgtcccacttacatgtgcacccaagtgctcatcaagtcttaatcagcgtcaccttcccttgaggcctgtggccagcatcagagcatccatgggtcctccccaacctcagaactccccacacggggcagtcctgaagatgcagatgggggctagggggtagagggcacaggacagggcccctcattagggggaactcagctagactgtaaaatgctgggtgtgagtggcaaggtcggattccacacattttttcacctcctcctcccagtagccttccagggtgccatgactcatttctgctatggatggaggcaaggaggctctaaggacaaaccccgtgcctgaggtcaccaagcaaccatctggccaggcccccactaaccagacccctgccggccaggctttcactgaccgttttcccagtgaccaggccttctgactaggtcctcactgatcaggcccctgatgaccaggctccaactgaccatgtccccactgaccagtttttcactgactaagccccagtggccaagcctctgctgaccaggcccctgatgaccaattccccactgaccatgtcctcgctgaccagtcccccagtgaccaggccttcctgaccaggtccccactgtccaagtcctccctgcccaggccccagagcagcagtgttcaaggtcctctaccacaactgcccacaggcggagggctccctactcccagacaagggaccccatgtgtccactgggtcccacggagaccctcagtgaccgcacgtgaagtctgagttggtgagacctcctcctgcagacacccagcttagggcacagacttggaccgagcaccacctccctccaccacacccataggagttccatcccagtggctctttcagggccagactctgccccatcaggggccagaaaaccctgggcagatttggaatctagggccacagagaccagggcatgcacagggcagggctgagagcacagcccaggatcacatctgggtctcttggccagtcacctcctctctgaccctagacatctcacttgtggaatgggtacattcggggacagcacccaccccacagagtccaccaggtcagtgcagaacaggcacctggtgagtgctcagggatgaccctcctcggcacctgcccagaggctagccctgcccaccaggtaatgactgtacccaggtcagcagggaaggaacagagcaggtcacactcacctgagtcagttgagtcagttgtgtctctcacttagcaaaacttccttttctcagaaccagacacctctatgtcttatctctaagagctccagacatagagacggcaagtggacaggtgggcgagtgctcagcaccagtgacattgtgaggtcatgacacccatcacaatgggcccctgcctgggtcagccgggaccagagccagcaccctccaccccttgaagtgtcaacgtgcgtgtgtgcagtgtttgtgcatgtaagcatgcacgtgtatgtgggtgaacccatgtgtgcatgcgtttgtcactgctctggctaggcccggctgccccactcatatgtgcacccaggacactgggtcacccttgtcactttctcccccctcgggacccatggccatcatcagagcatccacgggtgctccctaaactcagacctccccatccagggcattcctgggattgcagatggaagatagggggcagaaggttgagggttgggggcaaaaggcaaagggcaggtcccctccctagcaggggactcagctaggctgtaaagtgctagatctgtttggcagggctggattccacacacctgctcacctcctcttcccagcagccctccggagtgccatgactcattcccactacagatggcggcaaggaggctccaaggacaaaccctgcctgaagtcacctagccgccacctggccaggcttctgccagccagacccccactgaccaggcccccactgaccaggccttcactgaccacgttcccactgaccccactgagcagaaccctgagccgcggtgctcaatgtcccctgccaatgacccccctcagtccacagacctcccctccccgcatcagcacccacaggccatcccctgggggtcttctcgggtcaaggcccccactccaggacacagggagggacagtcggcctcaggctctgggtgcccagcttcatgctcgcccccaaaagccctctgtgctcacctcaaagggggcagtgaggtggcctggcactgcctggacatgatgtctcggcctattcctgagccgcagagccagaggaacggggggacgtttgtcagaccaggcaccccgttttgctgggtctcccagggttcttcctgcggaggctggatccagaggcgcagcaccgaggctgcagggtgaccggcccagaaccctcgagactgggctggggaccacatgagaactgtccccagatggccagaagaccctttgctaatttcccggtacctcatttcccaccagctacccttgccccaccaggaatccccttctggcagagtcaatgaggagaggaagatggtcacagaatccatggaaagaaagaaaacaaaatgacaatggaacatcatctatttcctgtccatctgaaaggaaagcctaaggaagcctattgggttccatcaccctgagggccccgaggatggcatcacacagtgcaatacccaatggcaggggcggtgctccatccctgcagacgtcatcgagagcacacctggggtcgtctagggtcatggacctggccacagagcagaaactgggtcaacaggagtgcacacacgcacacaggtgcacactcacacactggaataaaacgaatttcgtagcaagtggtcacgtgcgcgtgggagcgcgcgcacacacacacacacacacacacacaccacacttgttgctgatctgctgacttatctcactgccatgaaacagcagctaagcctgtaattgctctgcctttccttggatttttcctttagtttctctgactgctgggttactggcctgtgtttagcttcatgaacatgggtttcactttatttttatggggttccagctcttgctcatggaatccctccctgcctgttctgcagtcttcccttgtttactgcctgtggacttcaagtatcagacacagagaaagatttgtagatactgtttactcagcccccacaatttccatagcaggtctcttaattcccatcacctccagggagggtcattgctgggatcctaggaatcaagtgccttgtcttgatggccacagtggtaaccataatagtcaggtt

SEQ ID NO: 1244828 - DNA, 4001 bp, Homo sapiens
gaattccagaactcaaggaagatttggaatctagggtagagaggcctcagcggtcaaagctcaagtccagcatggcaaagggtagggctgagtgcacggcccgggtcacatctgggtctctgggccagtcaccgcctctctgactctacacatctcacctgtggaatggctacatttggggacagcacccatcgccacagagtctctgtgaggacaaaggagaggatggtccacgccgtcagtgcagaacatgtacccggtgagtgctcaggggtgaccctcgtcggcatctgcccagaggtcactcacctgagtctgctcaggctgctgtgtctctcgcttagaaaagtcgttcatgcaccacagaaccagacacctgtgtgcgtcttatgtgcaagtgctgcacaacacagaggtgagtgggtgggcaggtgggcggtcactcagcaccagtgacattttgaggtcatggcacccatcataatgggccattgcccaggtcaagagggcccagagtcggtgtcctccagcccctaaggtgtcaaaatgtgtttgtgcaggtgagcatgtatgtttatgtgggtgaacatgtgtgtgcacgagtagcgtctctggccagggctggctgtcccacttacatgtgcacccaagtgctcatcaagtcttaatcagcgtcaccttcccttgaggcctgtggcaagcatcagagcatccatgggtcctccccaacctcagaactccccacacggggcagtcctgaagatgcagatgggggctaggggttagagggcacaggacagggcccctcattagggggaactcagctagactgtaaaatgctgggtgtgagtggcaaggtcggattccacacattttttcacctcctcctcccagtagccttccagggtgccatgactcatttctgctatggacggaggcaaggaggctctaaggacaaaccccgtgcctgaggtcaccaagcaaccatctggccaggcccccactaaccagacccctgccggccaggctttcactgaccgttttcccagtgaccaggccttctgactaggtcctcactgatcaggcccctgatgaccaggctccaactgaccatgtccccactgaccagtttttcactgactaagccccagtggccaagcctctgctgaccaggcccctgatgaccaattccccactgaccatgtcctcgctgaccagtcccccagtgaccaggccttcctgaccaggtccccactgtccaagtcctccctgcccaggccccagagcagcagtgttcaaggtcctctaccacaactgcccacaggcagagggctccctactcccagacaagggaccccatgtgtccagtgggtcccacggagaccctcagtgaccgcacgtgaagtctgagttggtgagacctcctcctgcggacacccagcttagggcacagacttggaccgagcaccacctccctccaccacacccataggagttccatcccagtagctctttcagggccagactctgccccatcaggggccagaaaaccctgggcagatttggaatctagggccatagagaccagggcatgcacagggcagggctgagagcacagcccaggatcacatctgggtctcttggccagtcacctcctctctgaccctagacatctcacttgtggaatgggtacattcggggacagcacccaccccacagagtccaccaggtcagtgcagaacaggcacctggtgagtgctcagggatgaccctcctcggcacctgcccagaggctagccctgcccaccaggtaatgactgtacccaggtcagcagggaaggaacagagcaggtcacactcacctgagtcagttgagtcagttgtgtctctcacttagcaaaacttccttttctcagaaccagacacctctatgtcttatctctaagagctccagacatagagacggcaagcggacaggtgggcgagtgctcagcaccagtgacattgtgaggtcatgacacccatcacaatgggcccctgcctgggtcagccgggaccagagtcagcaccctccaccccttgaagtgtcaacgtgcgtgtgtgcagtgtttgtgcatgtgagcatgcacgtgtatgtgggtgaacacatgtgtgcatgcgtttgtcactgctctggctaggcccagctgccccactcatatgtgcacccaggacactgggtcacccttgtcactctctcccccctcgggacccatggccatcatcagagcatccacaggtgctccctaaactcagacctccccatccagggcattcctgggattgcagatggaagatagggggcagaaggttgagggttgggggcaaaaggcaaagggcaggtcccctccctagcaggggactcatctaggctgtaaagtgctagatctgtttggcagggctggattccacacacctgctcacctcctcttcccagcagccctccggagtgccatgactcgttcccactacagatggcggcaaggaggctccaaggacaaaccctgcctgaagtcacctagctgccacctggccaggcttctgccagccagacccccactgaccaggcccccactgaccaggccttcactgaccacgttcccactgaccccactgagcagaaccctgagccgcggtgatcaatgtcccctgccaatgacccccctcagtccacagacctcccctccccacatcagcacccacaggccatcccctgggggtcttctcgggtcaaggcccccactccaggacacagggagggacagtcggcctcaggctctgggtgcccagcttcatgctcgcccccaaaagccctctgcgctcaaccttaaagggggcagtgaggtggcctggcactgcctggacatgatgtctcggcctattcctgagccgcagagccagaggaacggggggacgtttgtcagaccaggcaccccgttttgctgggtctcccagggttcttcctgcggaggctggatccagaggcgcagcaccgaggctgcagggtgaccggcccagaagcctcgagactgggctggggaccacatgagaactgtccccagatggccagaagaccctttgctaatttcctggtagctcatttcccaccagctacccttgccccaccaggaatccccttctggcagagtcaatgaggagaggaagatggtcacagaatccatggaaagaaagaaaacaaaatgacaatggaacatcatctatttcctgtccatctgaaaggaaagcctaaggaagcctattgggttccatcaccctgagggccccgaggatggcatcacacagtgcaatacccaatggcaggggcggtgctccatccctgcagacgtcatcgagggcacacctggggtcgtctagggtcatggacctggccacagagcagaaactgggtcaacaggagtgcacacacgcacacaggtgcacactcacacactggaataaaacgaatttcgtagcaagtggtcacgtgcgcgtgggagcgcgcgcgcacacacacacacacacacacacacacacacaccacttgttgctgatctgctgacttatctcactgccatgaaacagcagctaagcctgtaattgctctgcctttccttggatttttcctttagtttctctgactgctgggttactggcctgtgtttagcttcatgaacatgggtttcactttatttttatggggttccagctcttgctcatggaatccctccctgcctgttctgcagtcttcccttgtttactgcctgtggacttcaagtatcagacacagagaaagatttgtagatactgtttactcagcccccacaatttccatagcaggtctcttaattcccatcacctccagggagggtcattgctgggatcctaggaatcaagtgccttgtcttgatggccacagtggtaaccataatagtcaggttttccctctgtgcaattctggaaca

SEQ ID NO: 1244829 - DNA, 4001 bp, Homo sapiens
tgtggcacatatacagccataaaaatgtggcacatatacagccataaaaaaggatgagttcatgtcctttgtagggacatggctgaagctggaaaccatcattctcagcaaactattgcaaggaccaaaaagcaaacactgcctgttctcactcataggtgggaattgaacaatgagaacacttggacacaggaaggggaacatcacacaccagggcctgtcatggggtggggggaggggggagggatagcattaggagatatacctaatgtaaatgacgagttaatgggtgcagcacaccaacatggcacatgtatacatatgtaacaaacctgcacgttgtgcacatgtaccctagaacttcaagtattaaaaaaaaaaaaaaaaaaagaacagtgtcatcatccagggcccaggtatggaagaactggttttgaaaacgtgcccacaggccagacctggacatcttcatgtggcgctctagggacaaggtgggcatcaggccaggagagttccctgggaagggtcagagcccacaccctgtgaccacttcagtctcccactgggcagtgccagatccttttgtggccaccccaggggtccagatgtgcacagaaggctgtggctggttgggggggcctgggcagggaagtgctcaccacactcctgactttcatctgggtcatgtgagggatgggctcggtgtcactgtgccctgcccagcccacctggccagacctcccccttggccagaacaggatcatgaggacagtgtgaggaagctgcccttaggctagtcggggtctgaccccagtgctccccaggccccactgggcacacgtggacttactcctttgaaccttaaaggcaatgcttgttatcagcatcaacatctgttccccttccagcaaatacatatcccacaggcacggggtgagcccgagagagatctgtggggaaagtaggcatgggaggacctggcccttccaggctggggctggtggctcgagctagcccattggggcttcactgaccttccccatgagggtcacccgacccctccaggaggctgggtcagacaaggtcttgcagctccttatgggggggcactcatttcagtgcagagaggggcttgcccagggcttgaggctcccctgagccctccctagttgggtcctggcccagtctgtccatgaggctggtcctgagccctgtcctctgcactgggatgagccctcttgggcagagggtcttgcttgtgtgtcctttggggatctgcctgagcctcctgtggactggggtgagctggaccccctggctggggaagcagggcactgcagggcaaggagggtccctgagccagggtctccctgtgcctccttaccccatcattcagcacccggagaagccagctgaatgaggaaccctgtgtgcatagaccttccttgtcctgatgggaggaacagaggtgctcagggccccatgggctgccctaaaaacctccctcttccagggccctctgaagacccttccccgagtgcagaacactgggcagtgtcccaggctccccgcaacatcttccccttccggcactcccggtggacacactgcccttagcccttctctgtgggagcagggcccccatccctgtgcctctgtctcctccagggctggaaaggaaacccaactcccagcccatggggaacccgacatcccaggtcaggccctggctgggactcagcctgtcaccagccccatgaggggctgcagcccccgctgttcctccagccccccaggatgcagggcctctggggaagagccgaggggaccataaactcaccagatgccccatggtcttgggttgtgatgtgggtaccacatgctcctgatggtcttggagcccctgaactgtcccgccatttgggctgtggaatcctgagaagcccccagcccgtcatgaaatcagagccttcccccaagatgtggagccatcagctggaagagctgggcagctgcagagccccccagaccccgaggcctcccaccctcccatctggtgaccccaccatgtggccttggccctggggaggaggggtgggaacatcccctggagcctggctggaggtgcccctggaggcctcctgggccagggtgccgggagggcaagcctgactttgaggccacgacagggggcggccagaacagggtgggtgctgggctttgtggtcgtctcctggaagtggggctgggccaagggacacgggatggggagatgctgccatctgggcttggtaccctttcgtgggtaccaagggcagctggagcctgagcaactgaagggcaggaggactctcaggttgcggagagccagctgcacagaatcagagccggagggcgtggctccaggacacagagggcagccacggggaggatgagatgccttctgctgatggggatgaaaggcgtctgacttgggctctggggggtcagttccgggttcctttgggaccgtcagcagagacgtcctaaaggctcccaacaagctggcgacacaaggaaggtgccttggctgaaagccgagatcacctggccagggtggccatccccgggtctggctgcgtgaagccccaggggcagctgttcacctaccctgcaggagtgcctctcactggccagcagctgcaccagtgcccagaatgtgtcctcctcaggcagataaaggaggaacaaggcagcgatgtggctcaggtccctgcagtagcccaccacctgcaacagccagagtcaccgtggaagtaagtcacttgggagggctgaggtcacctgggaggactcatgtcatcggagagggcagaggtgactgggaaggcttcctctgaagaagagacttcctcaggatgcaaattcatttcatgacaagagccatatccatcgggcacttcagcaccttgtccaaaatgtctcctgatagcaccattctgtgtgtgatgctgccaagctcccgggctttggggcagccccaggaggaggggcttgttccgataagtggtggtcaggcccaggtgacaccaggagtccaggccctgactcctctgtgtctcagcttgaccccttgagaccacccccttgctggaggtttatgccagcggtgagctggaatcctacctcctatatcctggtgggtcacaaatactaactttaaaagaagcaacgacactcccaccagacacccactcctgtgaatatggaaatacggcctgggaacctcactgccaggaatactcactgggttatacttcgaatatgccaggaggatgtagaatagttcctgctgcctgggaaacagagaaagggggctttggtttgtgttgtgcagatgctgttagtttcactttgtctacaaaccctaacaacaaatcccatttcaggttcagatgattcaccagataagcagtgagctcttcagggactttgactgttgaagaaatgtttcagtaaaatccacatctgtgacatgcaaatagcccagttgtacagtgacttgcctgatccttttcactctgaatgatcttttttttttcagtttgcacacacgccaattcagtctttgggtgtacaggtcctccatggttctaaaccaatgtgcagagtctcccggctaccactccagcccctcctggagcgactccttcatcctccaagtctccagggtggcccctatgcacccagcctctccccgatccgtcagcccctggccacccagactgcttctcagtccctatggtttggccttttccacaatggcctaagaatgggaatcctactttggtagcttattgggtctggcttctttcccttagcaaaatgcacctaggatccacccacgttcatgcgggcatcactggctcgttcccttttctcactgggtcttccgtttgaagggaggaccagccttgttctccccattcccgtgttgaaggccatccccgaaggctccgtgt

SEQ ID NO: 1244830 - DNA, 4001 bp, Homo sapiens
cagggaggagttctgtccctggaaaggaggttgacccgacctggtgagacatgtcctgcgtcagaaaggcctttctaaaagcaaacccatccctgagctgagacaggtgctttaggggtgaggggagtgcagaggactcactgtacaatccccaaatgatcgacgttgttgttgtagcttcgaaaaggcttaggccccttgtcctctggcagcccagctcggtgtccctgtagcccagagggagccttggtgaggggtccaaggtaaagggtgcaagggcctgggggcattggccacccgtccctgccctgtgctcctagggagcccaggaccctttgaccagggcacactggaagaggcctccctccaagaagcagaccgacttgtaccttttcgtatttcataatgatgtcctctcgctcttgtgcccaccaactgcccgcgacctctaccacgtccatcctgtgagacagaattgtctaaaggtcacaccgtacgcggcggcttcggagaacacctgaaccgctctcgccgggctcccagatgctggctggctgcgtaacccccattccaccgccgcccccagggaaaaaggggccagacccagtggcccacagctgctccagtctctggagtctcaagtcccaagcaggggtgggcatcttcccaaggacttgagtacagtgggacctagacagagaatcctgttgtcccccaatgccatgaaatggggacacaccggccccagcaggttgaatggtttccacctgccaagggtgaagggcccatgatgggctattccagggatgtggaggcagactggggtcagcgaccagaggtctctgtgcaatcggcctcctgggatgctcagggcctcagcgatgcccagtttcctacagggaacaagatctctcccgactgctcggttctactccgctcatcactttggctaccgtggctcttcagtctgaacagtgaagccactttaggaataacgcctgttgagcaggagggtgttgggtttgggggatgaggaagatctattgtacgcatggaaaccacgtctctcgcggagggactgtggagtccaccattctgagccgtcccaacaggaggaggcttcattttcctgggtcactgaggaagaacagtgggtccttggtcctggagaacagctggatggaccgtccctcctgggaatactcgaggcaaaaggagggcgaggcctcaagaggaccacgcagagcaagaaatacctggggagaaccctagtgcccggacccctttgaacacaagggaagatagtctcccctcagccagccctccagggctccttcattttccacagctgcccaagggcagcaggctcccccggacaagggaccatgtgtgttcagtggggcccacagcgaccatcaggacccagcttagggcacagaggtgttctgaggaccgtcagtggatctgtaccagtggctctataccagtggctctgccaggaccaggctctgccccatcgggatgggaaacctgggcagatttgggatctagggcagggaggtcacagggttcaggcctgaattccagcacagcacacggcagggctgagagcaaaactcagggtcatgtccggattcccaggccggttactgcctctctgaccccagacgtctcatctgtcgaatggggacatttgggaacagcacccactctacgaagccaccatggagacgaaagagccaatcgtctacacgggcagtgtagaacgggcgcctggtgagtgctcagggatgaccctcctcggtagctgccccacagaggccaacaccgcccgcaccgtagccactgcccccaagtccgcctggagggaagagagcaggtcacgctcacctgattctgatgaatcagctggcctgggtcatgcctctcagggagaaaacctttgagtccacagagctgctcacagataccactgcctgtgtgtaactgctgtagaccactgacgcaggccagagagcagataggtgctaagcaccagtgacattctgaggtcatggcacgaatcacagtggggccttgcccgggtcagcagtgcccagagtcagggtcctccgctgcctgaggcgtcaacatgcctgcctgcaatgtgtttgtgcacgtgcgtgcacatgtgtatgtgggtaaacacatctgtgcacgtgtgtgctgcttctctggccaggcccggctgccccactcatgtgtgcacccagttcctcatcactgtcacccccgaggcccagggccagcatcagagcatccatggctgctccctaacctcagccctccctgcccagggtggtcctgggatacacatagcggtggagggaagtgactgctgctgttggatctcagaatacaaaagctagtactattacctaatggtctttttagtgtctctaatggtatcgctttttcatttctgatattttaactgggtatttctctccatgacccttggatattctagctagaggatcctgtggggaaagtgccgggcacacagtaggggctcactcttctagacatgttatctaaaacctggttcatctgtccttccacacagggcctaggggatgccaaattccaggggccagaaagagcttgggataaaaagaaacttcaaggggacggctttgacctgggctgagtctgcctgtgccatccaactggagtctcaagtcctgaggcaggacgtccagatgccccagtgcagggtcctcctgatcaacacctgctcccctgtactcattagcaacctcacccaccctactctcaaagcacacttggctctcgtatccaggagctctgcatctgtagattcagcaacagcagatggaaaatattcagaaaataaattggacggttatgtttctattgaacatgtgcagactttgttcttgtcatcattccctaaagaatacagtatcacgaccatttatgtagcatctgcattgtattacacatcataaataatctagtaacggtctaacgtatacgggaggatgcgcatagcttatacgtaaatactaggccacgttatatcagagacttgagcatccatggattttggcattcccggggaccctagaactaatcctccatggataccaagggatgactgtataaactcactcaggaaggcttctcattggaggaagggcccggttcaggacagacagggacatcatccctggactactgtccatccatctattcatccattggcaccaccctctaggactgtcccaatgacagccctagcaagtggagataagaaaaaagactggctcaaatggtacagctttgaggtcttggaagatgttgcaccagtatgagaatagggggtcagtttcctccaggatccagaaagcatatcaggcaggctcagggagaggaaaggaacacggcctctccagcagccacacaggcctgcagtaggatggggctggggctggggctggggctggggctggccccgtttatcacttgggcctcatgaggggaaaagaaagaacagggggcagaggaggagcatgggggcagcgggttgcctaaggagaaggcgcctcagggaaggggtattagtttgttttcacactgctataaagaaatacttgagcctaggtaatttataaaggaaagaggtttaatcgactcccagttcagggaacttacagtcatggcagaaggcgaaggggaagcaggcaccttctccacaaggcggcaggagggagtgagcggagaagcaggaagtgccacactttcaaaccatcagctctcctgagaactcccgcactatcaggggagcagcaggggggaacctgtccccagatcccatcccctcccaccaggttcctcccttgacacaggaggattacaattccagatgagatttgggtggggacacagagcccaacctgtgagggtctcagtctatcttgcagctcccctggggctgg

SEQ ID NO: 1244831 - DNA, 4001 bp, Homo sapiens
cagggaggagttctgtccctggaaaggaggttgacccgacctggtgagacatgtcctgcgtcagaaaggcctttctaaaagcaaacccatccctgagctgagacaggtgctttaggggtgaggggagtgcagaggactcactgtacaatccccaaatgatcgacgttgttgttgtagcttcgaaaaggcttaggccccttgtcctctggcagcccagctcggtgtccctgtagcccagagggagccttggtgaggggtccaaggtaaagggtgcaagggcctgggggcattggccacccgtccctgccctgtgctcctagggagcccaggaccctttgaccagggcacactggaagaggcctccctccaagaagcagaccgacttgtaccttttcgtatttcataatgatgtcctctcgctcttgtgcccaccaactgcccgcgacctctaccacgtccatcctgtgagacagaattgtctaaaggtcacaccgtacgcggcggcttcggagaacacctgaaccgctctcgccgggctcccagatgctggctggctgcgtaacccccattccaccgccgcccccagggaaaaaggggccagacccagtggcccacagctgctccagtctctggagtctcaagtcccaagcaggggtgggcatcttcccaaggacttgagtacagtgggacctagacagagaatcctgttgtcccccaatgccatgaaatggggacacaccggccccagcaggttgaatggtttccacctgccaagggtgaagggcccatgatgggctattccagggatgtggaggcagactggggtcagcgaccagaggtctctgtgcaatcggcctcctgggatgctcagggcctcagcgatgcccagtttcctacagggaacaagatctctcccgactgctcggttctactccgctcatcactttggctaccgtggctcttcagtctgaacagtgaagccactttaggaataacgcctgttgagcaggagggtgttgggtttgggggatgagaaagatctattgtacgcatggaaaccacgtctctcgcggagggactgtggagtccaccattctgagccgtcccaacaggaggaggcttcattttcctgggtcactgaggaagaacagtgggtccttggtcctggagaacagctggatggaccgtccctcctgggaatactcgaggcaaaaggagggcgaggcctcaagaggaccacgcagagcaagaaatacctggggagaaccctagtgcccggacccctttgaacacaagggaagatagtctcccctcagccagccctccagggctccttcattttccacagctgcccaagggcagcaggctcccccggacaagggaccatgtgtgttcagtggggcccacagcgaccatcaggacccagcttagggcacagaggtgttctgaggaccgtcagtggatctgtaccagtggctctataccagtggctctgccaggaccaggctctgccccatcgggatgggaaacctgggcagatttgggatctagggcagggaggtcacagggttcaggcctgaattccagcacagcacacggcagggctgagagcaaaactcaggatcatgtccggattcccaggccggttactgcctctctgaccccagacgtctcatctgtcgaatggggacatttgggaacagcacccactctacgaagccaccatggagacgaaagagccaatcgtctacacgggcagtgtagaacgggcgcctggtgagtgctcagggatgaccctcctcggtagctgccccacagaggccaacaccgcccgcaccgtagccactgcccccaagtccgcctggagggaagagagcaggtcacgctcacctgattctgatgaatcagctggcctgggtcatgcctctcagggagaaaacctttgagtccacagagctgctcacagataccactgcctgtgtgtaactgctgtagaccactgaggcagaccagagagcagataggtgctaagcaccagtgacattctgaggtcatggcacgaatcacagtggggccttgcccgggtcagcagtgcccagagtcagggtcctccgctgcctgaggcgtcaacatgcctgcctgcaatgtgtttgtgcacgtgcgtgcacatgtgtatgtgggtaaacacatctgtgcacgttgtgtgctgcttctctggccaggcccggctgccccactcatgtgtgcacccagttcctcatcactgtcacccccgaggcccagggccagcatcagagcatccatggctgctccctaacctcagccctccctgcccagggtggtcctgggatacacataggggtggagggaagtgactgctgctgttggatctcagaatacaaaagctagtactattacctaatggtctttttagtgtctctaatggtatcgctttttcatttctgatattttaactgggtatttctctccatgacccttggatattctagctagaggatcctgtggggaaagtgccgggcacacagtaggggctcactcttctagacatgttatctaaaacctggttcatctgtccttccacacagggcctaggggatgccaaattccaggggccagaaagagcttgggataaaaagaaacttcaaggggacggctttgacctgggctgagtctgcctgtgccatccaactggagtctcaagtcctgaggcaggacgtccagatgccccagtgcagggtcctcctgatcaacacctgctcccctgtactcattagcaacctcacccaccctactctcaaagcacacttggctctcgtatccaggagctctgcatctgtagattcagcaacagcagatggaaaatattcagaaaataaattggacggttatgtttctattgaacatgtgcagagtttgttcttgtcattattccctaaagaatccagtatcacgatcatttatgtagcatctgcattgtattacacatcatgaataatccagggatggtctaatgtctacgggaggatgtgcatagctgatatgtaaatactaggccatgttatgtcagagacttgaggatccatggattttggcatccccggggaccctagaactaatccatggataccaagggatgactgtataaactcactcaggaaggcttctcattggaggaaggtcccagttcaggacacacagggacatctccctggactactgtccattcatccatccattcatccattgtctccccccacccccgcatctcggactgtcccagtgacagccctagcaagaagagacaagaaacaagttcacgttgtccagttttgaggtaatggaagaagttgcaccagtatgagaatagtgggtcagttttctacaggatgcagaaagcatatcgggcagcctcggggtgcggaaaggagcctggcctctctagcagccacacaggcctgcagtaggatggggctgtggctggccatgtggatcacttgggcctcatgaggggaaaggaaataccaggggggcagaagaggagcatgggggcagctggttgcctaaggagaaggcacctcagggaaggggactgtattcatttgttttcacactgatgtaaagaaatacctgagattgggtaatttataaaggaaacaggcttaattgacttgcagttccggaaacttacaatcatggaagaaggggaaggggaagcaggcaccttcttcacaagacggcaggagggagtgagtggagaaccagtaagtgccacactttgaaactatgatcctcctacctcagcctcccaagtagctgggactacaggcacatgccaccacacccagctaatttttgtactttttatagagacgaggtattggcatggtgcccaggctggtatcaaactcctggactcaagcagtccacctgccccagcctcccaaagtgctcggattataggcatatcagccagctgatgg

SEQ ID NO: 1244832 - DNA, 4001 bp, Homo sapiens
agggaggagttctgtccctggaaaggaggttgacccgacctggtgagacatgtcctgcgtcagaaaggcctttctaaaagcaaacccatccctgagctgagacaggtgctttaggggtgaggggagtgcagaggactcactgtacaatccccaaatgatcgacgttgttgttgtagcttcgaaaaggcttaggccccttgtcctctggcagcccagctcggtgtccctgtagcccagagggagccttggtgaggggtccaaggtaaagggtgcaagggcctgggggcattggccacccgtccctgccctgtgctcctagggagcccaggaccctttgaccagggcacactggaagaggcctccctccaagaagcagaccgacttgtaccttttcgtatttcataatgatgtcctctcgctcttgtgcccaccaactgcccgcgacctctaccacgtccatcctgtgagacagaattgtctaaaggtcacaccgtacgcggcggcttcggagaacacctgaaccgctctcgccgggctcccagatgctggctggctgcgtaacccccattccaccgccgcccccagggaaaaaggggccagacccagtggcccacagctgctccagtctctggagtctcaagtcccaagcaggggtgggcatcttcccaaggacttgagtacagtgggacctagacagagaatcctgttgtcccccaatgccatgaaatggggacacaccggccccagcaggttgaatggtttccacctgccaagggtgaagggcccatgatgggctattccagggatgtggaggcagactggggtcagcgaccagaggtctctgtgcaatcggcctcctgggatgctcagggcctcagcgatgcccagtttcctacagggaacaagatctctcccgactgctcggttctactccgctcatcactttggctaccgtggctcttcagtctgaacagtgaagccactttaggaataacgcctgttgagcaggagggtgttgggtttgggggatgagaaagatctattgtacgcatggaaaccacgtctctcgcggagggactgtggagtccaccattctgagccgtcccaacaggaggaggcttcattttcctgggtcactgaggaagaacagtgggtccttggtcctggagaacagctggatggaccgtccctcctgggaatactcgaggcaaaaggagggcgaggcctcaagaggaccacgcagagcaagaaatacctggggagaaccctagtgcccggacccctttgaacacaagggaagatagtctcccctcagccagccctccagggctccttcattttccacagctgcccaagggcagcaggctcccccggacaagggaccatgtgtgttcagtggggcccacagcgaccatcaggacccagcttagggcacagaggtgttctgaggaccgtcagtggatctgtaccagtggctctataccagtggctctgccaggaccaggctctgccccatcgggatgggaaacctgggcagatttgggatctagggcagggaggtcacagggttcaggcctgaattccagcacagcacacggcagggctgagagcaaaactcagggtcatgtccggattcccaggccggttactgcctctctgaccccagacgtctcatctgtcgaatggggacatttgggaacagcacccactctacgaagccaccatggagacgaaagagccaatcgtctacacgggcagtgtagaacgggcgcctggtgagtgctcagggatgaccctcctcggtagctgccccacagaggccaacaccgcccgcaccgtagccactgcccccaagtccgcctggagggaagagagcaggtcacgctcacctgattctgatgaatcagctggcctgggtcgtgcctctcagggagaaaacctttgagtccacagagctgctcacagataccactgcctgtgtgtaactgctgtagaccactgaggcagaccagagagcagataggtgctaagcaccagtgacattctgaggtcatggcacgaatcacagtggggccttgcccgggtcagcagcgcccagagtcagggtcctccgctgcctgaggcgtcaacatgcctgcctgcaatgtgtttgtgcacgtgcgtgcacatgtgtatgtgggtaaacacatctgtgcacgtgtgtgctgcttctctggccaggcccggctgccccactcatgtgtgcacccagttcctcatcactgtcacccccgaggcccagggccagcatcagagcatccatggctgctccctaacctcagccctccccgcccagggtggtcctgggatacacatagcggtggagggaagtgactgctgctgttggatctcagaatacaaaagctagtactattacctaatggtctttttagtgtctctaatggtatcgctttttcatttctgatattttaactgggtatttctctccatgacccttggatattctagctagaggatcctgtggggaaagtgccgggcacacagtaggggctcactcttctagacatgttatctaaaacctggttcatctgtccttccacacagggcctaggggatgccaaattccaggggccagaaagagcttgggataaaaagaaacttcaaggggacggctttgacctgggctgagtctgcctgtgccatccaactggagtctcaagtcctgaggcaggacgtccagatgccccagtgcagggtcctcctgatcaacacctgctcccctgtactcattagcaacctcacccaccctactctcaaagcacacttggctctcgtatccaggagctctgcatctgtagattcagcaacagcagatggaaaatattcagaaaataaattggacggttatgtttctattgaacatgtgcagagtttgttcttgtcattattccctaaagaatccagtatcacgaccatttatgtagcatctgcattgtattacacatcatgaataatccagagatggtctaatgtctacgggaggatgtgcatagctgatatgtaaatactaggccatgttatgtcagagacttgaggatccatggattttggcatccccggggaccctagaactaatccatggataccaagggatgactgtataaactcactcaggaaggcttctcattggaggaaggtcccagttcaggacacacagggacatctccctggactactgtccattcatccatccattcatccattgtctccccccacccccccatctcggactgtcccagtgacagccctagcaagaagagacaagaaacaagttcacgttgtccagttttgaggtaatggaagaagttgcaccagtatgagaatagtgggtcagttttctacaggatgcagaaagcatatcgggcagcctcggggtgcggaaaggagcctggcctctctagcagccacacaggcctgcagtaggatggggctgtggctggccatgtggatcacttgggcctcatgaggggaaaggaaataccaggggggcagaagaggagcatgggggcagctggttgcctaaggagaaggcacctcagggaaggggactgtattcatttgttttcacactgatgtaaagaaatacctgagattgggtaatttataaaggaaacaggcttaattgacttgcagttccggaaacttacaatcatggcagaaggggaaggggaagcaggcaccttcttcacaagatggcaggagggagattgtgcagtggcacaatctcggctcactgcaacctctgcctcccgggttcaggcagttctcctgcctcagcctccctagtagctgggattacaggcatgcaccaccacgcctggctaattttgtatttttagtagagacagggtttcaccatgttggccaggctggtcttgaactcctgacatcaggtgatctgcctgcctccgcctgccaaagtgctgggattacaagtgtga

SEQ ID NO: 1244833 - DNA, 4001 bp, Homo sapiens
cctgcaggggagtcagggaggagttctgtccctggaaaggaggttgacccgacctggtgagacatgtcctgcgtcagaaaggcctttctaaaagcaaacccatccctgagctgagacaggtgctttaggggtgaggggagtgcagaggactcactgtacaatccccaaatgatcgacgttgttgttgtagcttcgaaaaggcttaggccccttgtcctctggcagcccagctcggtgtccctgtagcccagagggagccttggtgaggggtccaaggtaaagggtgcaagggcctgggggcattggccacccgtccctgccctgtgctcctagggagcccaggaccctttgaccagggcacactggaagaggcctccctccaagaagcagaccgacttgtaccttttcgtatttcataatgatgtcctctcgctcttgtgcccaccaactgcccgcgacctctaccacgtccatcctgtgagacagaattgtctaaaggtcacaccgtacgcggcggcttcggagaacacctgaaccgctctcgccgggctcccagatgctggctggctgcgtaacccccattccaccgccgcccccagggaaaaaggggccagacccagtggcccacagctgctccagtctctggagtctcaagtcccaagcaggggtgggcatcttcccaaggacttgagtacagtgggacctagacagagaatcctgttgtcccccaatgccatgaaatggggacacactggccccagcaggttgaatggtttccacctgccaagggtgaagggcccatgatgggctattccagggatgtggaggcagactggggtcagcgaccagaggtctctgtgcaatcggcctcctgggatgctcagggcctcagcgatgcccagtttcctacagggaacaagatctctcccgactgctcggttctactccgctcatcactttggctaccgtggctcttcagtctgaacagtgaagccactttaggaataacgcctgttgagcaggagggtgttgggtttgggggatgagaaagatctattgtacgcatggaaaccacgtctctcgcggagggactgtggagtccaccattctgagccgtcccaacaggaggaggcttcattttcctgggtcactgaggaagaacagtgggtccttggtcctggagaacagctggatggaccgtccctcctgggaatactcgaggcaaaaggagggcgaggcctcaagaggaccacgcagagcaagaaatacctggggagaaccctagtgcccggacccctttgaacacaagggaagatagtctcccctcagccagccctccagggctccttcattttccacagctgcccaagggcagcaggctcccccggacaagggaccatgtgtgttcagtggggcccacagcgaccatcaggacccagcttagggcacagaggtgttctgaggaccgtcagtggctctgtaccagtggctctgccaggaccaggctctgccccatcgggatgggaaacctgggcagatttgggatctagggcagggaggtcacagggttcaggcctgaattccagcacagcacacggcagggctgagagcaaaactcagggtcatgtccggattcccaggccggttactgcctctctgaccccagacgtctcatctgtcgaatggggacatttgggaacagcacccactctacgaagccaccatggagacgaaagagccaatcgtctacacgggcagtgtagaacgggcgcctggtgagtgctcagggatgaccctcctcggtagctgccccacagaggccaacaccgcccgcaccgtagccactgcccccaagtccgcctggagggaagagagcaggtcacgctcacctgattctgatgaatcagctggcctgggtcatgcctctcagggagaaaacctttgagtccacagagctgctcacagataccactgcctgtgtgtaactgctgtagaccactgaggcagaccagagagcagataggtgctaagcaccagtgacattctgaggtcatggcacgaatcacagtggggccttgcccgggtcagcagcgcccagagtcagggtcctccgctgcctgaggcgtcaacatgcctgcctgcaatgtgtttgtgcacgtgcgtgcacatgtgtatgtgggtaaacacatctgtgcacgtgtgtgctgcttctctggccaggcccggctgccccactcatgtgtgcacccagttcctcatcactgtcacccccgaggcccagggccagcatcagagcatccatggctgctccctaacctcagccctccccgcccagggtggtcctgggatacacatagcggtggagggaagtgactgctgctgttggatctcagaatacaaaagctagtactattacctaatggtctttttagtgtctctaatggtatcgctttttcatttctgatattttaactgggtatttctctccatgacccttggatattctagctagaggatcctgtggggaaagtgccgggcacacagtaggggctcactcttctagacatgttatctaaaacctggttcatctgtccttccacacagggcctaggggatgccaaattccaggggccagaaagagcttgggataaaaagaaacttcaaggggacggctttgacctgggctgagtctgcctgtgccatccaactggagtctcaagtcctgaggcaggacgtccagatgccccagtgcagggtcctcctgatcaacacctgctcccctgtactcattagcaacctcacccaccctactctcaaagcacacttggctctcgtatccaggagctctgcatctgtagattcagcaacagcagatggaaaatattcagaaaataaattggacggttatgtttctattgaacatgtgcagagtttgttcttgtcattattccctaaagaatccagtatcacgaccatttatgtagcatctgcattgtattacacatcatgaataatccagggatggtctaatgtctacgggaggatgtgcatagctgatatgtaaatactaggccatgttatgtcagagacttgaggatccatggattttggcatccccggggaccctagaactaatccatggataccaagggatgactgtataaactcactcaggaaggcttctcattggaggaaggtcccagttcaggacacacagggacatctccctggactactgtccattcatccatccattcatccattgtctccccccacccccgcatctcggactgtcccagtgacagccctagcaagaagagacaagaaacaagttcacgttgtccagttttgaggtaatggaagaagttgcaccagtatgagaatagtgggtcagttttctacaggatgcagaaagcatatcgggcagcctcggggtgcggaaaggagcctggcctctctagcagccacacaggcctgcagtaggatggggctgtggctggccatgtggatcacttgggcctcatgaggggaaaggaaataccaggggggcagaagaggagcatgggggcagctggttgcctaaggagaaggcacctcagggaaggggactgtattcatttgttttcacactgatgtaaagaaatacctgagattgggtaatttataaaggaaacaggcttaattgacttgcagttccggaaacttacaatcatggaagaaggggaaggggaagcaggcaccttcttcacaagacggcaggagggagtgagtggagaaccagtaagtgccacactttgaaactatgatcctcctacctcagcctcccaagtagctgggactacaggcacatgccaccacacccagctaatttttgtactttttatagagacgaggtattggcatggtgcccaggctggtatcaaactcctggactcaagcagtccacctgccccagcctcccaaagtgctcggattataggcatatcagccagctgatggag

SEQ ID NO: 1244834 - DNA, 4001 bp, Homo sapiens
ccgacctggtgagacatgtcctgcgtcagaaaggcctttctaaaagcaaacccatccctgagctgagacaggtgctttaggggtgaggggagtgcagaggactcactgtacaatccccaaatgatcgacgttgttgttgtagcttcgaaaaggcttaggccccttgtcctctggcagcccagctcggtgtccctgtagcccagagggagccttggtgaggggtccaaggtaaagggtgcaagggcctgggggcattggccacccgtccctgccctgtgctcctagggagcccaagaccctttgaccagggcacactggaagaggcctccctccaagaagcagaccgacttgtaccttttcgtatttcataatgatgtcctctcgctcttgtgcccaccaactacccgcgacctctaccacgtccatcctgtgagacaaaattgtctaaaggtcacactgtacgcggcggcttcggagaacacctgaactgctctcgccgggctcccagatgctggctggctgcgtaacccccattccaccgccgcccccagggaaaaaggggccagacccagtggcccacagctgctccagtctctggagtctcaagtcccaagcaggggtgggcatcttcccaaggacttgagtacagtgggacctagacagagaatcctgttgtcccccaatgccatgaaatggggacacaccggccccagcaggttgaatggtttccacctgccaagggtgaagggcccatgatgggctattccagggatgtggaggcagactggggtcagcgaccagaggtctctgtgcaatcggcctcctgggatgctcagggcctcagagatgcccagtttcctacagggaacaagatctctcccgactgctcggttctactccgctcatcactttggctaccgtggctcttcagtctgaacagtgaagccactttaggaataacgcctgttgagcaggagggtgttgggtttgggggatgaggaagatctattgtacgcatggaaaccacgtctctcgcggagggactgtggagtccaccattctgagccgtcccaacaggaggaggcttcattttcctgggtcactgaggaagaacagtgggtccttggtcctggagaacagctggatggaccgtccctcctgggaatactcgaggcaaaaggagggcgaggcttcaagaggaccacgcagagcaagaaatacctggggagaaccctagtgcccggacccctttgaacacaagggaagatagtctcccctcagccagccctccagggctccttcattttccacagctgcccaagggcagcaggctcccccggacaaggcaccatgtgtgttcagtggggcccacagcgaccatcaggacccagcttagggcacagaggtgttctgaggaccgtcagtggatctgtaccagtggctctataccagtggctctgccaggaccaggctctgccccatcgggatgggaaacctgggcagatttgggatctagggcagggaggtcacagggttcaggcctgaattccagcacagcacacggcagggctgagagcaaaactcagggtcatgtccggattcccaggccggttactgcctctctgaccccagacgtctcatctgtcgaatggggacatttgggaacagcacccactctacgaagccaccatggagacgaaagagccaatcgtctacacgggcagtgtagaacgggcgcctggtgagtgctcagggatgaccctcctcggtagctgccccacagaggccaacaccgcccgcaccgtagccactgtccccaagtccgcctggagggaagagagcaggtcacgctcacctgattctgatgaatcagctggcctgggtcatgcctctcagggagaaaacctttgagtccacagagctgctcacagataccactgcctgtgtgtaactgctgtagaccactgaggcaggccagagagcagataggtgctaagcaccagtgacattctgaggtcatggcacgaatcacagtggggccttgcccgggtcagcagcacccagagtcagggtcctccgctgcctgaggcgtcaacatgcctgcctgcaacgtgtttgtgcacgtgcgtgcacacgtgtatgtgggtaaacatgtctgtgcacatgtgtgttgcttctctggccaggcccggctgccccactcatgtgtgcacccagttcctcatcactgtcacccccgaggcccagggccagcatcagagcatccatggctgctccctaacctcagccctccccgcccagggtggtcctgggatacacataggggtggagggaagtgactgctgctgttggatctcagaatacaaaagctaatactattacctaatggtctttttagtgtatctaatggtatcgctttttcatttctgatattttaactgggtatttctctccatgacccttggatattctagctagaggatcctgtggggaaagtgccgagcacacagtaggggctcactcttctagacatgttatctaaaacctggttcatctgtccttccacgcagggcctaggggatgccaaattccagggtccagaaagagcttgggataaaatgaaacttcaaggggacggctttgacctgggctgagtctgtctgtgccatccaactggagtctcaagtcctgaggcaggacgtccagatgccccagtgcagggccctcctgatcaacacctgctcccctgtactcattagcaacctcacccaccctactctcaaagcacacttggctctcgtatccaggagctctgcatctatagattcagcaacagcagatggaaaatattcagaaaataaattggatggttatgtttctattgaacatgtgcagactttgttcttgtcatcattccctaaagaatacagtatcacgaccatttatgtagcatctgcattgtattacacatcataatctagtaacggtctaacgtatacgggaggatgcgcatagcttatacgtaaatactaggccatgttctatcagagacttgagcatccatggattttggcattcccggggaccctagaactaatcctccatggataccaagggatgactgtatatactcactcaggaaggcttctcattggaggaagggcccggttcaggacagacagggacatcatccctggactactgtccatccatccattcatccattggcaccaccctctaggactgtcccaatgacagccctagcaagtggagataagaaaaaagactggctcaaatggtacagctttgaggtcttggaagatgttgcaccagtatgagaatagggggtcagtttcctccaggatccagaaagcatatcaggcaggctcggggagaggaaaggaacacggcctctccagcagccacacaggcctgcagtaggatggggctggggctggggctggggctgggactggggctggccccgtttatcacttgggcctcatgaggggaaaagaaaggacagggggcagaggaggagcatgggggcagcgggttgcctaaggagaaggcgcctcagggaaggggtattagtttgttttcacactgctataaagaaatacttgagcctaggtaatttataaaggaaagaggtttaatcgactcccagttcagggaacttacagtcatggcagaaggcgaaggggaagcaggcaccttctccacaaggcggcaggagggagtgagcggagaagcaggaagtgccacactttcaaaccatcagctctcctgagaactccctcactatcaggggagcagcaggggggaaactgtccccagatcccatcccctcccaccaggttcctcccttgacaaaggaggattacaattccagatgagatttcggtggggacacagagcccaacctgtgagggtctcaatctatcttgtagctcccctggggctggggctgagtacagttctgctggccctgctctaca

SEQ ID NO: 1244835 - DNA, 4001 bp, Homo sapiens
ggttgacccgacctggtgagacatgtcctgcgtcagaaaggcctttctaaaagcaaacccatccctgagctgagacaggtgctttaggggtgaggggagtgcagaggactcactgtacaatccccaaatgatcgacgttgttgttgtagcttcgaaaaggcttaggccccttgtcctctggcagcccagctcggtgtccctgtagcccagagggagccttggtgaggggtccaaggtaaagggtgcaagggcctgggggcattggccacccgtccctgccctgtgctcctagggagcccaggaccctttgaccagggcacactggaagaggcctccctccaagaagcagaccgacttgtaccttttcgtatttcataatgatgtcctctcgctcttgtgcccaccaactgcccgcgacctctaccacgtccatcctgtgagacagaattgtctaaaggtcacaccgtacgcggcggcttcggagaacacctgaaccgctctcgccgggctcccagatgctggctggctgcgtaacccccattccaccgccgcccccagggaaaaaggggccagacccagtggcccacagctgctccagtctctggagtctcaagtcccaagcaggggtgggcatcttcccaaggacttgagtacagtgggacctagacagagaatcctgttgtcccccaatgccatgaaatggggacacaccggccccagcaggttgaatggtttccacctgccaagggtgaagggcccatgatgggctattccagggatgtggaggcagactggggtcagcgaccagaggtctctgtgcaatcggcctcctgggatgctcagggcctcagcgatgcccagtttcctacagggaacaagatctctcccgactgctcggttctactccgctcatcactttggctaccgtggctcttcagtctgaacagtgaagccactttaggaataacgcctgttgagcaggagggtgttgggtttgggggatgagaaagatctattgtacgcatggaaaccacgtctctcgcggagggactgtggagtccaccattctgagccgtcccaacaggaggaggcttcattttcctgggtcactgaggaagaacagtgggtccttggtcctggagaacagctggatggaccgtccctcctgggaatactcgaggcaaaaggagggcgaggcctcaagaggaccacgcagagcaagaaatacctggggagaaccctagtgcccggacccctttgaacacaagggaagatagtctcccctcagccagccctccagggctccttcattttccacagctgcccaagggcagcaggctcccccggacaagggaccatgtgtgttcagtggggcccacagcgaccatcaggacccagcttagggcacagaggtgttctgaggaccgtcagtggatctgtaccagtggctctataccagtggctctgccaggaccaggctctgccccatcgggatgggaaacctgggcagatttgggatctagggcagggaggtcacagggttcaggcctgaattccagcacagcacacggcagggctgagagcaaaactcagggtcatgtccggattcccaggccggttactgcctctctgaccccagacgtctcatctgtcgaatggggacatttgggaacagcacccactctacgaagccaccatggagacgaaagagccaatcgtctacacgggcagtgtagaacgggcgcctggtgagtgctcagggatgaccctcctcggtagctgccccacagaggccaacaccgcccgcaccgtagccactgcccccaagtccgcctggagggaagagagcaggtcacgctcacctgattctgatgaatcagctggcctgggtcgtgcctctcagggagaaaacctttgagtccacagagctgctcacagataccactgcctgtgtgtaactgctgtagaccactgaggcagaccagagagcagataggtgctaagcaccagtgacattctgaggtcatggcacgaatcacagtggggccttgcccgggtcagcagcgcccagagtcagggtcctccgctgcctgaggcgtcaacatgcctgcctgcaatgtgtttgtgcacgtgcgtgcacatgtgtatgtgggtaaacacatctgtgcacgtgtgtgctgcttctctggccaggcccggctgccccactcatgtgtgcacccagttcctcatcactgtcacccccgaggcccagggccagcatcagagcatccatggctgctccctaacctcagccctccccgcccagggtggtcctgggatacacatagcggtggagggaagtgactgctgctgttggatctcagaatacaaaagctagtactattacctaatggtctttttagtgtctctaatggtatcgctttttcatttctgatattttaactgggtatttctctccatgacccttggatattctagctagaggatcctgtggggaaagtgccgggcacacagttaggggctcactcttctagacatgttatctaaaacctggttcatctgtccttccacacagggcctaggggatgccaaattccaggggccagaaagagcttgggataaaaagaaacttcaaggggacggctttgacctgggctgagtctgcctgtgccatccaactggagtctcaagtcctgaggcaggacgtccagatgccccagtgcagggtcctcctgatcaacacctgctcccctgtactcattagcaacctcacccaccctactctcaaagcacacttggctctcgtatccaggagctctgcatctgtagattcagcaacagcagatggaaaatattcagaaaataaattggacggttatgtttctattgaacatgtgcagagtttgttcttgtcattattccctaaagaatccagtatcacgaccatttatgtagcatctgcattgtattacacatcatgaataatccagagatggtctaatgtctacgggaggatgtgcatagctgatatgtaaatactaggccatgttatgtcagagacttgaggatccatggattttggcatccccggggaccctagaactaatccatggataccaagggatgactgtataaactcactcaggaaggcttctcattggaggaaggtcccagttcaggacacacagggacatctccctggactactgtccattcatccatccattcatccattgtctccccccacccccccatctcggactgtcccagtgacagccctagcaagaagagacaagaaacaagttcacgttgtccagttttgaggtaatggaagaagttgcaccagtatgagaatagtgggtcagttttctacaggatgcagaaagcatatcgggcagcctcggggtgcggaaaggagcctggcctctctagcagccacacaggcctgcagtaggatggggctgtggctggccatgtggatcacttgggcctcatgaggggaaaggaaataccaggggggcagaagaggagcatgggggcagctggttgcctaaggagaaggcacctcagggaaggggactgtattcatttgttttcacactgatgtaaagaaatacctgagattgggtaatttataaaggaaacaggcttaattgacttgcagttccggaaacttacaatcatggcagaaggggaaggggaagcaggcaccttcttcacaagatggcaggagggagattgtgcagtggcacaatctcggctcactgcaacctctgcctcccgggttcaggcagttctcctgcctcagcctccctagtagctgggattacaggcatgcaccaccacgcctggctaattttgtatttttagtagagacagggtttcaccatgttggccaggctggtcttgaactcctgacatcaggtgatctgcctgcctccgcctgccaaagtgctgggattacaagtgtgagccaccgcgccaagccatatctgttc

SEQ ID NO: 1244836 - DNA, 4001 bp, Homo sapiens
gttgacccgacctggtgagacatgtcctgcgtcagaaaggcctttctaaaagcaaacccatccctgagctgagacaggtgctttaggggtgaggggagtgcagaggactcactgtacaatccccaaatgatcgacgttgttgttgtagcttcgaaaaggcttaggccccttgtcctctggcagcccagctcggtgtccctgtagcccagagggagccttggtgaggggtccaaggtaaagggtgcaagggcctgggggcattggccacccgtccctgccctgtgctcctagggagcccaggaccctttgaccagggcacactggaagaggcctccctccaagaagcagaccgacttgtaccttttcgtatttcataatgatgtcctctcgctcttgtgcccaccaactgcccgcgacctctaccacgtccatcctgtgagacagaattgtctaaaggtcacaccgtacgcggcggcttcggagaacacctgaaccgctctcgccgggctcccagatgctggctggctgcgtaacccccattccaccgccgcccccagggaaaaaggggccagacccagtggcccacagctgctccagtctctggagtctcaagtcccaagcaggggtgggcatcttcccaaggacttgagtacagtgggacctagacagagaatcctgttgtcccccaatgccatgaaatggggacacaccggccccagcaggttgaatggtttccacctgccaagggtgaagggcccatgatgggctattccagggatgtggaggcagactggggtcagcgaccagaggtctctgtgcaatcggcctcctgggatgctcagggcctcagcgatgcccagtttcctacagggaacaagatctctcccgactgctcggttctactccgctcatcactttggctaccgtggctcttcagtctgaacagtgaagccactttaggaataacgcctgttgagcaggagggtgttgggtttgggggatgagaaagatctattgtacgcatggaaaccacgtctctcgcggagggactgtggagtccaccattctgagccgtcccaacaggaggaggcttcattttcctgggtcactgaggaagaacagtgggtccttggtcctggagaacagctggatggaccgtccctcctgggaatactcgaggcaaaaggagggcgaggcctcaagaggaccacgcagagcaagaaatacctggggagaaccctagtgcccggacccctttgaacacaagggaagatagtctcccctcagccagccctccagggctccttcattttccacagctgcccaagggcagcaggctcccccggacaagggaccatgtgtgttcagtggggcccacagcgaccatcaggacccagcttagggcacagaggtgttctgaggaccgtcagtggatctgtaccagtggctctataccagtggctctgccaggaccaggctctgccccatcgggatgggaaacctgggcagatttgggatctagggcagggaggtcacagggttcaggcctgaattccagcacagcacacggcagggctgagagcaaaactcagggtcatgtccggattcccaggccggttactgcctctctgaccccagacgtctcatctgtcgaatggggacatttgggaacagcacccactctacgaagccaccatggagacgaaagagccaatcgtctacacgggcagtgtagaacgggcgcctggtgagtgctcagggatgaccctcctcggtagctgccccacagaggccaacaccgcccgcaccgtagccactgcccccaagtccgcctggagggaagagagcaggtcacgctcacctgattctgatgaatcagctggcctgggtcgtgcctctcagggagaaaacctttgagtccacagagctgctcacagataccactgcctgtgtgtaactgctgtagaccactgaggcagaccagagagcagataggtgctaagcaccagtgacattctgaggtcatggcacgaatcacagtggggccttgcccgggtcagcagcgcccagagtcagggtcctccgctgcctgaggcgtcaacatgcctgcctgcaatgtgtttgtgcacgtgcgtgcacatgtgtatgtgggtaaacacatctgtgcacgtgtgtgctgcttctctggccaggcccggctgccccactcatgtgtgcacccagttcctcatcactgtcacccccgaggcccagggccagcatcagagcatccatggctgctccctaacctcagccctccccgcccagggtggtcctgggatacacatagcggtggagggaagtgactgctgctgttggatctcagaatacaaaagctagtactattacctaatggtctttttagtgtctctaatggtatcgctttttcatttctgatattttaactgggtatttctctccatgacccttggatattctagctagaggatcctgtggggaaagtgccgggcacacagtaggggctcactcttctagacatgttatctaaaacctggttcatctgtccttccacacagggcctaggggatgccaaattccaggggccagaaagagcttgggataaaaagaaacttcaaggggacggctttgacctgggctgagtctgcctgtgccatccaactggagtctcaagtcctgaggcaggacgtccagatgccccagtgcagggtcctcctgatcaacacctgctcccctgtactcattagcaacctcacccaccctactctcaaagcacacttggctctcgtatccaggagctctgcatctgtagattcagcaacagcagatggaaaatattcagaaaataaattggacggttatgtttctattgaacatgtgcagagtttgttcttgtcattattccctaaagaatccagtatcacgaccatttatgtagcatctgcattgtattacacatcatgaataatccagagatggtctaatgtctacgggaggatgtgcatagctgatatgtaaatactaggccatgttatgtcagagacttgaggatccatggattttggcatccccggggaccctagaactaatccatggataccaagggatgactgtataaactcactcaggaaggcttctcattggaggaaggtcccagttcaggacacacagggacatctccctggactactgtccattcatccatccattcatccattgtctccccccacccccccatctcggactgtcccagtgacagccctagcaagaagagacaagaaacaagttcacgttgtccagttttgaggtaatggaagaagttgcaccagtatgagaatagtgggtcagttttctacaggatgcagaaagcatatcgggcagcctcggggtgcggaaaggagcctggcctctctagcagccacacaggcctgcagtaggatggggctgtggctggccatgtggatcacttgggcctcatgaggggaaaggaaataccaggggggcagaagaggagcatgggggcagctggttgcctaaggagaaggcacctcagggaaggggactgtattcatttgttttcacactgatgtaaagaaatacctgagattgggtaatttataaaggaaacaggcttaattgacttgcagttccggaaacttacaatcatggcagaaggggaaggggaagcaggcaccttcttcacaagatggcaggagggagattgtgcagtggcacaatctcggctcactgcaacctctgcctcccgggttcaggcagttctcctgcctcagcctccctagtagctgggattacaggcatgcaccaccacgcctggctaattttgtatttttagtagagacagggtttcaccatgttggccaggctggtcttgaactcctgacatcaggtgatctgcctgcctccgcctgccaaagtgctgggattacaagtgtgagccaccgcgccaagccatatctgttctt

SEQ ID NO: 1244837 - DNA, 4001 bp, Homo sapiens
tccctggaaaggaggttgacccgacctggtgagacatgtcctgcgtcagaaaggcctttctaaaagcaaacccatccctgagctgagacaggtgctttaggggtgaggggagtgcagaggactcactgtacaatccccaaatgatcgacgttgttgttgtagcttcgaaaaggcttaggccccttgtcctctggcagcccagctcggtgtccctgtagcccagagggagccttggtgaggggtccaaggtaaagggtgcaagggcctgggggcattggccacccgtccctgccctgtgctcctagggagcccaggaccctttgaccagggcacactggaagaggcctccctccaagaagcagaccgacttgtaccttttcgtatttcataatgatgtcctctcgctcttgtgcccaccaactgcccgcgacctctaccacgtccatcctgtgagacagaattgtctaaaggtcacaccgtacgcggcggcttcggagaacacctgaaccgctctcgccgggctcccagatgctggctggctgcgtaacccccattccaccgccgcccccagggaaaaaggggccagacccagtggcccacagctgctccagtctctggagtctcaagtcccaagcaggggtgggcatcttcccaaggacttgagtacagtgggacctagacagagaatcctgttgtcccccaatgccatgaaatggggacacactggccccagcaggttgaatggtttccacctgccaagggtgaagggcccatgatgggctattccagggatgtggaggcagactggggtcagcgaccagaggtctctgtgcaatcggcctcctgggatgctcagggcctcagcgatgcccagtttcctacagggaacaagatctctcccgactgctcggttctactccgctcatcactttggctaccgtggctcttcagtctgaacagtgaagccactttaggaataacgcctgttgagcaggagggtgttgggtttgggggatgagaaagatctattgtacgcatggaaaccacgtctctcgcggagggactgtggagtccaccattctgagccgtcccaacaggaggaggcttcattttcctgggtcactgaggaagaacagtgggtccttggtcctggagaacagctggatggaccgtccctcctgggaatactcgaggcaaaaggagggcgaggcctcaagaggaccacgcagagcaagaaatacctggggagaaccctagtgcccggacccctttgaacacaagggaagatagtctcccctcagccagccctccagggctccttcattttccacagctgcccaagggcagcaggctcccccggacaagggaccatgtgtgttcagtggggcccacagcgaccatcaggacccagcttagggcacagaggtgttctgaggaccgtcagtggctctgtaccagtggctctgccaggaccaggctctgccccatcgggatgggaaacctgggcagatttgggatctagggcagggaggtcacagggttcaggcctgaattccagcacagcacacggcagggctgagagcaaaactcagggtcatgtccggattcccaggccggttactgcctctctgaccccagacgtctcatctgtcgaatggggacatttgggaacagcacccactctacgaagccaccatggagacgaaagagccaatcgtctacacgggcagtgtagaacgggcgcctggtgagtgctcagggatgaccctcctcggtagctgccccacagaggccaacaccgcccgcaccgtagccactgcccccaagtccgcctggagggaagagagcaggtcacgctcacctgattctgatgaatcagctggcctgggtcatgcctctcagggagaaaacctttgagtccacagagctgctcacagataccactgcctgtgtgtaactgctgtagaccactgaggcagaccagagagcagataggtgctaagcaccagtgacattctgaggtcatggcacgaatcacagtggggccttgcccgggtcagcagcgcccagagtcagggtcctccgctgcctgaggcgtcaacatgcctgcctgcaatgtgtttgtgcacgtgcgtgcacatgtgtatgtgggtaaacacatctgtgcacgtgtgtgctgcttctctggccaggcccggctgccccactcatgtgtgcacccagttcctcatcactgtcacccccgaggcccagggccagcatcagagcatccatggctgctccctaacctcagccctccccgcccagggtggtcctgggatacacatagcggtggagggaagtgactgctgctgttggatctcagaatacaaaagctagtactattacctaatggtctttttagtgtctctaatggtatcgctttttcatttctgatattttaactgggtatttctctccatgacccttggatattctagctagaggatcctgtggggaaagtgccgggcacacagtaggggctcactcttctagacatgttatctaaaacctggttcatctgtccttccacacagggcctaggggatgccaaattccaggggccagaaagagcttgggataaaaagaaacttcaaggggacggctttgacctgggctgagtctgcctgtgccatccaactggagtctcaagtcctgaggcaggacgtccagatgccccagtgcagggtcctcctgatcaacacctgctcccctgtactcattagcaacctcacccaccctactctcaaagcacacttggctctcgtatccaggagctctgcatctgtagattcagcaacagcagatggaaaatattcagaaaataaattggacggttatgtttctattgaacatgtgcagagtttgttcttgtcattattccctaaagaatccagtatcacgaccatttatgtagcatctgcattgtattacacatcatgaataatccagggatggtctaatgtctacgggaggatgtgcatagctgatatgtaaatactaggccatgttatgtcagagacttgaggatccatggattttggcatccccggggaccctagaactaatccatggataccaagggatgactgtataaactcactcaggaaggcttctcattggaggaaggtcccagttcaggacacacagggacatctccctggactactgtccattcatccatccattcatccattgtctccccccacccccgcatctcggactgtcccagtgacagccctagcaagaagagacaagaaacaagttcacgttgtccagttttgaggtaatggaagaagttgcaccagtatgagaatagtgggtcagttttctacaggatgcagaaagcatatcgggcagcctcggggtgcggaaaggagcctggcctctctagcagccacacaggcctgcagtaggatggggctgtggctggccatgtggatcacttgggcctcatgaggggaaaggaaataccaggggggcagaagaggagcatgggggcagctggttgcctaaggagaaggcacctcagggaaggggactgtattcatttgttttcacactgatgtaaagaaatacctgagattgggtaatttataaaggaaacaggcttaattgacttgcagttccggaaacttacaatcatggaagaaggggaaggggaagcaggcaccttcttcacaagacggcaggagggagtgagtggagaaccagtaagtgccacactttgaaactatgatcctcctacctcagcctcccaagtagctgggactacaggcacatgccaccacacccagctaatttttgtactttttatagagacgaggtattggcatggtgcccaggctggtatcaaactcctggactcaagcagtccacctgccccagcctcccaaagtgctcggattataggcatatcagccagctgatggagcatctttaatatcatatttttactgtaa

SEQ ID NO: 1244838 - DNA, 4001 bp, Homo sapiens
ggaggagttctgtccctggaaaggaggttgacccgacctggtgagacatgtcctgcatcagaaaggcctttctaaaagcaaacccatccctgagctgagacaggtgctttaggggtgaggggagtgcagaggactcactgtacaatccccaaatgatcgacgttgttgttgtagcttcgaaaaggcttaggccccttgtcctctggcagcccagctcggtgtccctgtagcccagagggagccttgctgaggggtccaaggtaaagggtgcaagggcctgggggcattggccacccgtccctgccctgtgctcctagggagcccaggaccctttgaccagggcacactggaagaggcctccctccaagaagcagaccgacttgtaccttttcgtatttcataatgatgtcctctcgctcttgtgcccaccaactacccgcgacctctaccacgtccatcctgtgagacagaattgtctaaaggtcacactgtacgcggcggcttcggagaacacctgaaccgctctcgccgggctcccagatgctggctggctgcgtaacccccattccaccgccgcccccagggaaaaaggggccagacccagtggcccacagctgctccagtctctggagtctcaagtcccaagcaggggtgggcatcttcccaaggacttgagtacagtgggacctagacagagaatcctgttgtcccccaatgccatgaaatggggacacaccggccccagcaggttgaatggtttccacctgccaagggtgaagggcccatgatgggctattccagggatgtggaggcagactggggtcagcgaccagaggtctctgtgcaatcggcctcctgggatgctcagggcctcagagatgcccagtttcctacagggagcaagatctctcccgactgctcggttctactccgctcatcactttggctaccgtggctcttcagtctgaacagtgaagccactttaggaataacgcctgttgagcaggagggtgttgggtttgggggatgaggaagatctattgtacgcatggaaaccacgtctctcgcggagggactgtggagtccaccattctgagccgtcccaacaggaggaggcttcattttcctgggtcactgaggaagaacagtgggtccttggtcctggagaacagctggatggaccgtccctcctgggaatactcgaggcaaaaggagggcaaggcctcaagaggaccacgcagagcaagaaatacctggggagaaccctagtgcccggacccctttgaacacaagggaagatagtctcccctcagccagccctccagggctccttcattttccacagctgcccaagggcagcaggctcccccggacaagggaccatgtgtgttcagtggggcccacagcgaccatcaggacccagcttagggcacagaggtgttctgaggaccgtcagtggatctgtaccagtggctctataccagtggctctgccaggaccaggctctgccccatcgggatgggaaacctgggcagatttgggatctagggcagggaggtcacagggttcaggcctgaattccagcacagcacacggcagggctgagagcaaaactcagggtcatgtccggattcccaggccggttactgcctctctgaccccagacgtctcatctgtcgaatggggacatttgggaacagcacccactctacgaagccaccatggagacgaaagagccaatcgtctacacgggcagtgtagaacgggcgcctggtgagtgctcagggatgaccctcctcggtagctgccccacagaggccaacaccgcccgcaccgtagccactgtccccaagtccgcctggagggaagagagcaggtcacgctcacctgattctgatgaatcagctggcctgggtcatgcctctcagggagaaaacctttgagtccacagagctgctcacagataccactgcctgtgtgtaactgctgtagaccactgacgcaggccagagagcagataggtgctaagcaccagtgacattctgaggtcatggcacgaatcacagtggggccttgcccgggtcagcagcacccagagtcagggtcctccgctgcctgaggcgtcaacatgcctgcctgcaacgtgtttgtgcacgtgcgtgcacacgtgtatgtgggtaaacatgtctgtgcacatgtgtgttgcttctctggccaggcccggctgccccactcatgtgtgcacccagttcctcatcactgtcacccccgaggcccagggccagcatcagagcatccatggctgctccctaacctcagccctccccgcccagggtggtcgtgggatacacataggggtggagggaagtgactgctgctgttggatctcagaatacaaaagctaatactattacctaatggtctttttagtgtatctaatggtatcgctttttcatttctgatattttaactgggtatttctctccatgacccttggatattctagctagaggatcctgtggggaaagtgccgagcacacagtaggggctcactcttctagacatgttatctaaaacctggttcatctgtccttccacgcagggcctaggggatgccaaattccagggtccagaaagagcttgggataaaatgaaacttcaaggggacggctttgacctgggctgagtctgtctgtgccatccaactggagtctcaagtcctgaggcaggacgtccagatgccccagtgcagggccctcctgatcaacacctgctcccctgtactcattagcaacctcacccaccctactctcaaagcacacttggctctcgtatccaggagctctgcatctataggttcagcaacagcagatggaaaatattcagaaaataaattggatggttatgtttctattgaacatgtgcagactttgttcttgtcatcattccctaaagaatacagtatcacgaccatttatgtagcatctgcattgtattacacatcataatctagtaacggtctaacgtatacgggaggatgcgcatagcttatacgtaaatactaggccatgttctatcagagacttgagcatccatggattttggcattcccggggaccctagaactaatcctccatggataccaagggatgactgtatatactcactcaggaaggcttctcattggaggaagggcccggttcaggacagacagggacatcatccctggactactgtccatccatccattcatccattggcaccaccctctaggactgtcccaatgacagccctagcaagtggagataagaaaaaagactggctcaaatggtacagctttgaggtcttggaagatgttgcaccagtatgagaatagggggtcagtttcctccaggatccagaaagcatatcaggcaggctcggggagaggaaaggaacacggcctctccagcagccacacaggcctgcagtaggatggggctggggctggggctggggctgggactggggctggccccgtttatcacttgggcctcatgaggggaaaagaaaggacagggggcagaggaggagcatgggggcagcgggttgcctaaggagaaggcgcctcagggaaggggtattagtttgttttcacactgctataaagaaatacttgagcctaggtaatttataaaggaaagaggtttaatcgactcccagttcagggaacttacagtcatggcagaaggcgaaggggaagcaggcaccttctccacaaggcggcaggagggagtgagcggagaagcaggaagtgccacactttcaaaccatcagctctcctgagaactccctcactatcaggggagcagcaggggggaaactgtccccagatcccatcccctcccaccaggttgctcccttgacacaggaggattacaattccagatgagatttcggtggggacacagagcccaacctgtgagggtctcagtctatcttgcagctcccctggggctggg

SEQ ID NO: 1244839 - DNA, 4001 bp, Homo sapiens
gggaggagttctgtccctggaaaggaggttgacccgacctggtgagacatgtcctgcgtcagaaaggcctttctaaaagcaaacccatccctgagctgagacaggtgctttaggggtgaggggagtgcagaggactcactgtacaatccccaaatgatcgacgttgttgttgtagcttcgaaaaggcttaggccccttgtcctctggcagcccagctcggtgtccctgtagcccagagggagccttggtgaggggtccaaggtaaagggtgcaagggcctgggggcattggccacccgtccctgccctgtgctcctagggagcccaggaccctttgaccagggcacactggaagaggcctccctccaagaagcagaccgacttgtaccttttcgtatttcataatgatgtcctctcgctcttgtgcccaccaactgcccgcgacctctaccacgtccatcctgtgagacagaattgtctaaaggtcacaccgtacgcggcggcttcggagaacacctgaaccgctctcgccgggctcccagatgctggctggctgcgtaacccccattccaccgccgcccccagggaaaaaggggccagacccagtggcccacagctgctccagtctctggagtctcaagtcccaagcaggggtgggcatcttcccaaggacttgagtacagtgggacctagacagagaatcctgttgtcccccaatgccatgaaatggggacacaccggccccagcaggttgaatggtttccacctgccaagggtgaagggcccatgatgggctattccagggatgtggaggcagactggggtcagcgaccagaggtctctgtgcaatcggcctcctgggatgctcagggcctcagcgatgcccagtttcctacagggaacaagatctctcccgactgctcggttctactccgctcatcactttggctaccgtggctcttcagtctgaacagtgaagccactttaggaataacgcctgttgagcaggagggtgttgggtttgggggatgagaaagatctattgtacgcatggaaaccacgtctctcgcggagggactgtggagtccaccattctgagccgtcccaacaggaggaggcttcattttcctgggtcactgaggaagaacagtgggtccttggtcctggagaacagctggatggaccgtccctcctgggaatactcgaggcaaaaggagggcgaggcctcaagaggaccacgcagagcaagaaatacctggggagaaccctagtgcccggacccctttgaacacaagggaagatagtctcccctcagccagccctccagggctccttcattttccacagctgcccaagggcagcaggctcccccggacaagggaccatgtgtgttcagtggggcccacagcgaccatcaggacccagcttagggcacagaggtgttctgaggaccgtcagtggatctgtaccagtggctctataccagtggctctgccaggaccaggctctgccccatcgggatgggaaacctgggcagatttgggatctagggcagggaggtcacagggttcaggcctgaattccagcacagcacacggcagggctgagagcaaaactcaggatcatgtccggattcccaggccggttactgcctctctgaccccagacgtctcatctgtcgaatggggacatttgggaacagcacccactctacgaagccaccatggagacgaaagagccaatcgtctacacgggcagtgtagaacgggcgcctggtgagtgctcagggatgaccctcctcggtagctgccccacagaggccaacaccgcccgcaccgtagccactgcccccaagtccgcctggagggaagagagcaggtcacgctcacctgattctgatgaatcagctggcctgggtcatgcctctcagggagaaaacctttgagtccacagagctgctcacagataccactgcctgtgtgtaactgctgtagaccactgaggcagaccagagagcagataggtgctaagcaccagtgacattctgaggtcatggcacgaatcacagtggggccttgcccgggtcagcagtgcccagagtcagggtcctccgctgcctgaggcgtcaacatgcctgcctgcaatgtgtttgtgcacgtgcgtgcacatgtgtatgtgggtaaacacatctgtgcacgttgtgtgctgcttctctggccaggcccggctgccccactcatgtgtgcacccagttcctcatcactgtcacccccgaggcccagggccagcatcagagcatccatggctgctccctaacctcagccctccctgcccagggtggtcctgggatacacataggggtggagggaagtgactgctgctgttggatctcagaatacaaaagctagtactattacctaatggtctttttagtgtctctaatggtatcgctttttcatttctgatattttaactgggtatttctctccatgacccttggatattctagctagaggatcctgtggggaaagtgccgggcacacagtaggggctcactcttctagacatgttatctaaaacctggttcatctgtccttccacacagggcctaggggatgccaaattccaggggccagaaagagcttgggataaaaagaaacttcaaggggacggctttgacctgggctgagtctgcctgtgccatccaactggagtctcaagtcctgaggcaggacgtccagatgccccagtgcagggtcctcctgatcaacacctgctcccctgtactcattagcaacctcacccaccctactctcaaagcacacttggctctcgtatccaggagctctgcatctgtagattcagcaacagcagatggaaaatattcagaaaataaattggacggttatgtttctattgaacatgtgcagagtttgttcttgtcattattccctaaagaatccagtatcacgatcatttatgtagcatctgcattgtattacacatcatgaataatccagggatggtctaatgtctacgggaggatgtgcatagctgatatgtaaatactaggccatgttatgtcagagacttgaggatccatggattttggcatccccggggaccctagaactaatccatggataccaagggatgactgtataaactcactcaggaaggcttctcattggaggaaggtcccagttcaggacacacagggacatctccctggactactgtccattcatccatccattcatccattgtctccccccacccccgcatctcggactgtcccagtgacagccctagcaagaagagacaagaaacaagttcacgttgtccagttttgaggtaatggaagaagttgcaccagtatgagaatagtgggtcagttttctacaggatgcagaaagcatatcgggcagcctcggggtgcggaaaggagcctggcctctctagcagccacacaggcctgcagtaggatggggctgtggctggccatgtggatcacttgggcctcatgaggggaaaggaaataccaggggggcagaagaggagcatgggggcagctggttgcctaaggagaaggcacctcagggaaggggactgtattcatttgttttcacactgatgtaaagaaatacctgagattgggtaatttataaaggaaacaggcttaattgacttgcagttccggaaacttacaatcatggaagaaggggaaggggaagcaggcaccttcttcacaagacggcaggagggagtgagtggagaaccagtaagtgccacactttgaaactatgatcctcctacctcagcctcccaagtagctgggactacaggcacatgccaccacacccagctaatttttgtactttttatagagacgaggtattggcatggtgcccaggctggtatcaaactcctggactcaagcagtccacctgccccagcctcccaaagtgctcggattataggcatatcagccagctgatggag

SEQ ID NO: 1244840 - DNA, 4001 bp, Homo sapiens
ggaggagttctgtccctggaaaggaggttgacccgacctggtgagacatgtcctgcgtcagaaaggcctttctaaaagcaaacccatccctgagctgagacaggtgctttaggggtgaggggagtgcagaggactcactgtacaatccccaaatgatcgacgttgttgttgtagcttcgaaaaggcttaggccccttgtcctctggcagcccagctcggtgtccctgtagcccagagggagccttggtgaggggtccaaggtaaagggtgcaagggcctgggggcattggccacccgtccctgccctgtgctcctagggagcccaagaccctttgaccagggcacactggaagaggcctccctccaagaagcagaccgacttgtaccttttcgtatttcataatgatgtcctctcgctcttgtgcccaccaactacccgcgacctctaccacgtccatcctgtgagacaaaattgtctaaaggtcacactgtacgcggcggcttcggagaacacctgaactgctctcgccgggctcccagatgctggctggctgcgtaacccccattccaccgccgcccccagggaaaaaggggccagacccagtggcccacagctgctccagtctctggagtctcaagtcccaagcaggggtgggcatcttcccaaggacttgagtacagtgggacctagacagagaatcctgttgtcccccaatgccatgaaatggggacacaccggccccagcaggttgaatggtttccacctgccaagggtgaagggcccatgatgggctattccagggatgtggaggcagactggggtcagcgaccagaggtctctgtgcaatcggcctcctgggatgctcagggcctcagagatgcccagtttcctacagggaacaagatctctcccgactgctcggttctactccgctcatcactttggctaccgtggctcttcagtctgaacagtgaagccactttaggaataacgcctgttgagcaggagggtgttgggtttgggggatgaggaagatctattgtacgcatggaaaccacgtctctcgcggagggactgtggagtccaccattctgagccgtcccaacaggaggaggcttcattttcctgggtcactgaggaagaacagtgggtccttggtcctggagaacagctggatggaccgtccctcctgggaatactcgaggcaaaaggagggcgaggcttcaagaggaccacgcagagcaagaaatacctggggagaaccctagtgcccggacccctttgaacacaagggaagatagtctcccctcagccagccctccagggctccttcattttccacagctgcccaagggcagcaggctcccccggacaaggcaccatgtgtgttcagtggggcccacagcgaccatcaggacccagcttagggcacagaggtgttctgaggaccgtcagtggatctgtaccagtggctctataccagtggctctgccaggaccaggctctgccccatcgggatgggaaacctgggcagatttgggatctagggcagggaggtcacagggttcaggcctgaattccagcacagcacacggcagggctgagagcaaaactcagggtcatgtccggattcccaggccggttactgcctctctgaccccagacgtctcatctgtcgaatggggacatttgggaacagcacccactctacgaagccaccatggagacgaaagagccaatcgtctacacgggcagtgtagaacgggcgcctggtgagtgctcagggatgaccctcctcggtagctgccccacagaggccaacaccgcccgcaccgtagccactgtccccaagtccgcctggagggaagagagcaggtcacgctcacctgattctgatgaatcagctggcctgggtcatgcctctcagggagaaaacctttgagtccacagagctgctcacagataccactgcctgtgtgtaactgctgtagaccactgaggcaggccagagagcagataggtgctaagcaccagtgacattctgaggtcatggcacgaatcacagtggggccttgcccgggtcagcagcacccagagtcagggtcctccgctgcctgaggcgtcaacatgcctgcctgcaacgtgtttgtgcacgtgcgtgcacacgtgtatgtgggtaaacatgtctgtgcacatgtgtgttgcttctctggccaggcccggctgccccactcatgtgtgcacccagttcctcatcactgtcacccccgaggcccagggccagcatcagagcatccatggctgctccctaacctcagccctccccgcccagggtggtcctgggatacacataggggtggagggaagtgactgctgctgttggatctcagaatacaaaagctaatactattacctaatggtctttttagtgtatctaatggtatcgctttttcatttctgatattttaactgggtatttctctccatgacccttggatattctagctagaggatcctgtggggaaagtgccgagcacacagtaggggctcactcttctagacatgttatctaaaacctggttcatctgtccttccacgcagggcctaggggatgccaaattccagggtccagaaagagcttgggataaaatgaaacttcaaggggacggctttgacctgggctgagtctgtctgtgccatccaactggagtctcaagtcctgaggcaggacgtccagatgccccagtgcagggccctcctgatcaacacctgctcccctgtactcattagcaacctcacccaccctactctcaaagcacacttggctctcgtatccaggagctctgcatctatagattcagcaacagcagatggaaaatattcagaaaataaattggatggttatgtttctattgaacatgtgcagactttgttcttgtcatcattccctaaagaatacagtatcacgaccatttatgtagcatctgcattgtattacacatcataatctagtaacggtctaacgtatacgggaggatgcgcatagcttatacgtaaatactaggccatgttctatcagagacttgagcatccatggattttggcattcccggggaccctagaactaatcctccatggataccaagggatgactgtatatactcactcaggaaggcttctcattggaggaagggcccggttcaggacagacagggacatcatccctggactactgtccatccatccattcatccattggcaccaccctctaggactgtcccaatgacagccctagcaagtggagataagaaaaaagactggctcaaatggtacagctttgaggtcttggaagatgttgcaccagtatgagaatagggggtcagtttcctccaggatccagaaagcatatcaggcaggctcggggagaggaaaggaacacggcctctccagcagccacacaggcctgcagtaggatggggctggggctggggctggggctgggactggggctggccccgtttatcacttgggcctcatgaggggaaaagaaaggacagggggcagaggaggagcatgggggcagcgggttgcctaaggagaaggcgcctcagggaaggggtattagtttgttttcacactgctataaagaaatacttgagcctaggtaatttataaaggaaagaggtttaatcgactcccagttcagggaacttacagtcatggcagaaggcgaaggggaagcaggcaccttctccacaaggcggcaggagggagtgagcggagaagcaggaagtgccacactttcaaaccatcagctctcctgagaactccctcactatcaggggagcagcaggggggaaactgtccccagatcccatcccctcccaccaggttcctcccttgacaaaggaggattacaattccagatgagatttcggtggggacacagagcccaacctgtgagggtctcaatctatcttgtagctcccctggggctggg

SEQ ID NO: 1244841 - DNA, 4001 bp, Homo sapiens
gggaggagttctgtccctggaaaggaggttgacccgacctggtgagacatgtcctgcgtcagaaaggcctttctaaaagcaaacccatccctgagctgagacaggtgctttaggggtgaggggagtgcagaggactcactgtacaatccccaaatgatcgacgttgttgttgtagcttcgaaaaggcttaggccccttgtcctctggcagcccagctcggtgtccctgtagcccagagggagccttggtgaggggtccaaggtaaagggtgcaagggcctgggggcattggccacccgtccctgccctgtgctcctagggagcccaggaccctttgaccagggcacactggaagaggcctccctccaagaagcagaccgacttgtaccttttcgtatttcataatgatgtcctctcgctcttgtgcccaccaactgcccgcgacctctaccacgtccatcctgtgagacagaattgtctaaaggtcacaccgtacgcggcggcttcggagaacacctgaaccgctctcgccgggctcccagatgctggctggctgcgtaacccccattccaccgccgcccccagggaaaaaggggccagacccagtggcccacagctgctccagtctctggagtctcaagtcccaagcaggggtgggcatcttcccaaggacttgagtacagtgggacctagacagagaatcctgttgtcccccaatgccatgaaatggggacacaccggccccagcaggttgaatggtttccacctgccaagggtgaagggcccatgatgggctattccagggatgtggaggcagactggggtcagcgaccagaggtctctgtgcaatcggcctcctgggatgctcagggcctcagcgatgcccagtttcctacagggaacaagatctctcccgactgctcggttctactccgctcatcactttggctaccgtggctcttcagtctgaacagtgaagccactttaggaataacgcctgttgagcaggagggtgttgggtttgggggatgagaaagatctattgtacgcatggaaaccacgtctctcgcggagggactgtggagtccaccattctgagccgtcccaacaggaggaggcttcattttcctgggtcactgaggaagaacagtgggtccttggtcctggagaacagctggatggaccgtccctcctgggaatactcgaggcaaaaggagggcgaggcctcaagaggaccacgcagagcaagaaatacctggggagaaccctagtgcccggacccctttgaacacaagggaagatagtctcccctcagccagccctccagggctccttcattttccacagctgcccaagggcagcaggctcccccggacaagggaccatgtgtgttcagtggggcccacagcgaccatcaggacccagcttagggcacagaggtgttctgaggaccgtcagtggatctgtaccagtggctctataccagtggctctgccaggaccaggctctgccccatcgggatgggaaacctgggcagatttgggatctagggcagggaggtcacagggttcaggcctgaattccagcacagcacacggcagggctgagagcaaaactcagggtcatgtccggattcccaggccggttactgcctctctgaccccagacgtctcatctgtcgaatggggacatttgggaacagcacccactctacgaagccaccatggagacgaaagagccaatcgtctacacgggcagtgtagaacgggcgcctggtgagtgctcagggatgaccctcctcggtagctgccccacagaggccaacaccgcccgcaccgtagccactgcccccaagtccgcctggagggaagagagcaggtcacgctcacctgattctgatgaatcagctggcctgggtcgtgcctctcagggagaaaacctttgagtccacagagctgctcacagataccactgcctgtgtgtaactgctgtagaccactgaggcagaccagagagcagataggtgctaagcaccagtgacattctgaggtcatggcacgaatcacagtggggccttgcccgggtcagcagcgcccagagtcagggtcctccgctgcctgaggcgtcaacatgcctgcctgcaatgtgtttgtgcacgtgcgtgcacatgtgtatgtgggtaaacacatctgtgcacgtgtgtgctgcttctctggccaggcccggctgccccactcatgtgtgcacccagttcctcatcactgtcacccccgaggcccagggccagcatcagagcatccatggctgctccctaacctcagccctccccgcccagggtggtcctgggatacacatagcggtggagggaagtgactgctgctgttggatctcagaatacaaaagctagtactattacctaatggtctttttagtgtctctaatggtatcgctttttcatttctgatattttaactgggtatttctctccatgacccttggatattctagctagaggatcctgtggggaaagtgccgggcacacagttaggggctcactcttctagacatgttatctaaaacctggttcatctgtccttccacacagggcctaggggatgccaaattccaggggccagaaagagcttgggataaaaagaaacttcaaggggacggctttgacctgggctgagtctgcctgtgccatccaactggagtctcaagtcctgaggcaggacgtccagatgccccagtgcagggtcctcctgatcaacacctgctcccctgtactcattagcaacctcacccaccctactctcaaagcacacttggctctcgtatccaggagctctgcatctgtagattcagcaacagcagatggaaaatattcagaaaataaattggacggttatgtttctattgaacatgtgcagagtttgttcttgtcattattccctaaagaatccagtatcacgaccatttatgtagcatctgcattgtattacacatcatgaataatccagagatggtctaatgtctacgggaggatgtgcatagctgatatgtaaatactaggccatgttatgtcagagacttgaggatccatggattttggcatccccggggaccctagaactaatccatggataccaagggatgactgtataaactcactcaggaaggcttctcattggaggaaggtcccagttcaggacacacagggacatctccctggactactgtccattcatccatccattcatccattgtctccccccacccccccatctcggactgtcccagtgacagccctagcaagaagagacaagaaacaagttcacgttgtccagttttgaggtaatggaagaagttgcaccagtatgagaatagtgggtcagttttctacaggatgcagaaagcatatcgggcagcctcggggtgcggaaaggagcctggcctctctagcagccacacaggcctgcagtaggatggggctgtggctggccatgtggatcacttgggcctcatgaggggaaaggaaataccaggggggcagaagaggagcatgggggcagctggttgcctaaggagaaggcacctcagggaaggggactgtattcatttgttttcacactgatgtaaagaaatacctgagattgggtaatttataaaggaaacaggcttaattgacttgcagttccggaaacttacaatcatggcagaaggggaaggggaagcaggcaccttcttcacaagatggcaggagggagattgtgcagtggcacaatctcggctcactgcaacctctgcctcccgggttcaggcagttctcctgcctcagcctccctagtagctgggattacaggcatgcaccaccacgcctggctaattttgtatttttagtagagacagggtttcaccatgttggccaggctggtcttgaactcctgacatcaggtgatctgcctgcctccgcctgccaaagtgctgggattacaagtgtga

SEQ ID NO: 1244842 - DNA, 4001 bp, Homo sapiens
ggaggagttctgtccctggaaaggaggttgacccgacctggtgagacatgtcctgcgtcagaaaggcctttctaaaagcaaacccatccctgagctgagacaggtgctttaggggtgaggggagtgcagaggactcactgtacaatccccaaatgatcgacgttgttgttgtagcttcgaaaaggcttaggccccttgtcctctggcagcccagctcggtgtccctgtagcccagagggagccttggtgaggggtccaaggtaaagggtgcaagggcctgggggcattggccacccgtccctgccctgtgctcctagggagcccaggaccctttgaccagggcacactggaagaggcctccctccaagaagcagaccgacttgtaccttttcgtatttcataatgatgtcctctcgctcttgtgcccaccaactgcccgcgacctctaccacgtccatcctgtgagacagaattgtctaaaggtcacactgtacgcggcggcttcggagaacacctgaaccgctctcgccgggctcccagatgctggctggctgcgtaacccccattccaccgccgcccccagggaaaaaggggccagacccagtggcccacagctgctccagtctctggagtctcaagtcccaagcaggggtgggcatcttcccaaggacttgagtacagtgggacctagacagagaatcctgttgtcccccaatgccatgaaatggggacacaccggccccagcaggttgaatggtttccacctgccaagggtgaagggcccatgatgggctattccagggatgtggaggcagactggggtcagcgaccagaggtctctgtgcaatcggcctcctgggatgctcagggcctcagcgatgcccagtttcctacagggaacaagatctctcccgactgctcggttctactccgctcatcactttggctaccgtggctcttcagtctgaacagtgaagccactttaggaataacgcctgttgagcaggagggtgttgggtttggaggatgaggaagatctattgtacgcatggaaaccacgtctctcgcggagggactgtggagtccaccattctgagccgtcccaacaggaggaggcttcattttcctgggtcactgaggaagaacagtgggtccttggtcctggagaacagctggatggaccgtccctcctgggaatactcgaggcaaaaggagggcgaggcctcaagaggaccacgcagagcaagaaatacctggggagaaccctagtgcccggacccctttgaacacaagggaagatagtctcccctcagccagccctccagggctccttcattttccacagctgcccaagggcagcaggctcccccggacaagggaccatgtgtgttcagtggggcccacagcgaccatcaggacccagcttagggcacagaggtgttctgaggaccgtcagtggatctgtaccagtggctctataccagtggctctgccaggaccaggctctgccccatcgggatgggaaacctgggcagatttgggatctagggcagggaggtcacagggttcaggcctgaattccagcacagcacacggcagggctgagagcaaaactcagggtcatgtccggattcccaggccggttactgcctctctgaccccagacgtctcatctgtcgaatggggacatttgggaacagcacccactctacgaagccaccatggagacgaaagagccaatcgtctacacgggcagtgtagaacgggcgcctggtgagtgctcagggatgaccctcctcggtagctgccccacagaggccaacaccgcccgcaccgtagccactgcccccaagtccgcctggagggaagagagcaggtcacgctcacctgattctgatgaatcagctggcctgggtcatgcctctcagggagaaaacctttgagtccacagagctgctcacagataccactgcctgtgtgtaactgctgtagaccactgaggcagaccagagagcagataggtgctaagcaccagtgacattctgaggtcatggcacgaatcacagtggggccttgcccgggtcagcagcgcccagagtcagggtcctccgctgcctgaggcgtcaacatgcctgcctgcaatgtgtttgtgcacgtgcgtggacatgtgtatgtgggtatacacatctgtgcacgtgtgtgctgcttctctggccaggcccggctgccccactcatgtgtgcacccagttcctcatcactgtcacccccgaggcccagggccagcatcagagcatccatggctgctccctaacctcagccctccccgcccagggtggtcctgggatacacataggggtggagggaagtgactgctgctgttggatctcagaatacaaaagctagtactattacctaatggtctttttagtgtctctaatggtatcgctttttcatttctgatattttaactgggtatttctctccatgacccttggatattctagctagaggatcctgtggggaaagtgccgggcacacagtaggggctcactcttctagacatgttatctaaaacctggctcatctgtccttccacacagggcctaggggatgccaaattccaggggccagaaagagcttgggataaaaagaaacttcaaggggacggctttgacctgggctgagtctgcctgtgccatccaactggagtctcaagtcctgaggcaggacgtccagatgccccagtgcagggtcctcctgatcaacacctgctcccctgtactcattagcaacctcacccaccctactctcaaagcacacttggctctcgtatccaggagctctgcatctgtagattcagcaacagcagatggaaaatattcagaaaataaattggacggttatgtttctattgaacatgtgcagagtttgttcttgtcattattccctaaagaatccagtatcacgaccatttatgtagcatctgcattgtattacacatcatgaataatccagagatggtctaatgtctacgggaggatgtgcatagctgatatgtaaatactaggccatgttatgtcagagacttgaggatccatggattttggcatccccggggaccctagaactaatccatggataccaagggatgactgtataaactcactcaggaaggcttctcattggaggaaggtcccagttcaggacacacagggacatctccctggactactgtccattcatccatccattcatccattgtctccccccacccccccatctcggactgtcccagtgacagccctagcaagaagagacaagaaacaagttcacgttgtccagttttgaggtaatggaagaagttgcaccagtatgagaatagtgggtcagttttctacaggatgcagaaagcatatcaggcagcctcggggtgcggaaaggagcctggcctctctagcagccacacaggcctgcagtaggatggggctgtggctggccatgtggatcacttgggcctcatgaggggaaaggaaataccaggggggcagaagaggagcatgggggcagctggttgcctaaggagaaggcacctcagggaaggggactgtattcatttgttttcacactgatgtaaagaaatacctgagattgggtaatttataaaggaaacaggcttaattgacttgcagttccggaaacttacaatcatggcagaaggggaaggggaagcaggcaccttcttcacaagatggcaggagggagattgtgcagtggcacaatctcggctcactgcaacctctgcctcccgggttcaggcagttctcctgcctcagcctccctagtagctgggattacaggcatgcaccaccacgcctggctaattttgtatttttagtagagacagggtttcaccatgttggccaggctggtcttgaactcctgacatcaggtgatctgcctgcctccgcctgccaaagtgctgggattacaagtgtgagc

SEQ ID NO: 1244843 - DNA, 4001 bp, Homo sapiens
ggaggagttctgtccctggaaaggaggttgacccgacctggtgagacatgtcctgcgtcagaaaggcctttctaaaagcaaacccatccctgagctgagacaggtgctttaggggtgaggggagtgcagaggactcactgtacaatccccaaatgatcgacgttgttgttgtagcttcgaaaaggcttaggccccttgtcctctggcagcccagctcggtgtccctgtagcccagagggagccttggtgaggggtccaaggtaaagggtgcaagggcctgggggcattggccacccgtccctgccctgtgctcctagggagcccaggaccctttgaccagggcacactggaagaggcctccctccaagaagcagaccgacttgtaccttttcgtatttcataatgatgtcctctcgctcttgtgcccaccaactgcccgcgacctctaccacgtccatcctgtgagacagaattgtctaaaggtcacactgtacgcggcggcttcggagaacacctgaaccgctctcgccgggctcccagatgctggctggctgcgtaacccccattccaccgccgcccccagggaaaaaggggccagacccagtggcccacagctgctccagtctctggagtctcaagtcccaagcaggggtgggcatcttcccaaggacttgagtacagtgggacctagacagagaatcctgttgtcccccaatgccatgaaatggggacacaccggccccagcaggttgaatggtttccacctgccaagggtgaagggcccatgatgggctattccagggatgtggaggcagactggggtcagcgaccagaggtctctgtgcaatcggcctcctgggatgctcagggcctcagcgatgcccagtttcctacagggaacaagatctctcccgactgctcggttctactccgctcatcactttggctaccgtggctcttcagtctgaacagtgaagccactttaggaataacgcctgttgagcaggagggtgttgggtttgggggatgaggaagatctattgtacgcatggaaaccacgtctctcgcggagggactgtggagtccaccattctgagccgtcccaacaggaggaggcttcattttcctgggtcactgaggaagaacagtgggtccttggtcctggagaacagctggatggaccgtccctcctgggaatactcgaggcaaaaggagggcgaggcctcaagaggaccacgcagagcaagaaatacctggggagaaccctagtgcccggacccctttgaacacaagggaagatagtctcccctcagccagccctccagggctccttcattttccacagctgcccaagggcagcaggctcccccggacaagggaccatgtgtgttcagtggggcccacagcgaccatcaggacccagcttagggcacagaggtgttctgaggaccgtcagtggatctgtaccagtggctctataccagtggctctgccaggaccaggctctgccccatcgggatgggaaacctgggcagatttgggatctagggcagggaggtcacagggttcaggcctgaattccagcacagcacacggcagggctgagagcaaaactcagggtcatgtccggattcccaggccggttactgcctctctgaccccagacgtctcatctgtcgaatggggacatttgggaacagcacccactctacgaagccaccatggagacgaaagagccaatcgtctacacgggcagtgtagaacgggcgcctggtgagtgctcagggatgaccctcctcggtagctgccccacagaggccaacaccgcccgcaccgtagccactgcccccaagtccgcctggagggaagagagcaggtcacgctcacctgattctgatgaatcagctggcctgggtcatgcctctcagggagaaaacctttgagtccacagagctgctcacagataccactgcctgtgtgtaactgctgtagaccactgaggcaggccagagagcagacaggtgctaagcaccagtgacattctgaggtcatggcacgaatcacagtggggccttgcccgggtcagcagcgcccagagtcagggtcctccgctgcctgaggcgtcaacatgcctgcctgcaatgtgtttgtgcacgtgcgtgcacatgtgtatgtgggtaaacacgtctgtgcacgtgtgtgctgcttctctggccaggcccggctgccccactcatgtgtgcacccagttcctcatcactgtcacccccgaggcccagggccagcatcagagcatccatggctgctccctaaccccagccctccccgcccagggtggtcctgggatacacatagcggtggagggaagtgactgctgctattggatctcagaatacaaaagctaatactattacctaatggtctttttagtgtctctaatggtatcactttttcatttctgatattttaactgggtatttctctccatgacccttggatattctagctagaggatcctgtggggaaagtgccgggcacacagtaggggctcactcttctagacacgttatctaaaacctggttcatctgtccttccacgcagggcctaggggatgccgaattccagggtccagaaagagcttgggataaaaagaaacttcaaggggacggctttgacctgggctgagtctacctgtgccatccaactggagtctcaagtcctgaggcaggacgtccagatgccccagtgcagggtcctcctgatcaacacctgctcccctgtactcattagcaacctcacccaccctactctcaaagcacacttggctctcgtatccaggagctctgcatctgtagattcagcaacagcagatggaaaatattcagaaaataaattggacggttatgtttctattgaacatgtgcagactttgttcttgtcatcattccctaaagaatacagtatcacgaccatttatgtagcatctgcattgtattacacatcataaataatctagtaacggtctaacgtatacgggaggatgcgcatagcttatacgtaaatactaggccacgttatatcagagacttgagcatccatggattttggcattcccggggaccctagaactaatcctccatggataccaagggatgactgtatatactcactcaggaaggcttctcattggaggaagggcccggttcaggacagacagggacatcatccctggactactgtccatccatccattcatccattggcaccaccctctaggactgtcccaatgacagccctagcaagtggagataagaaaaaagactggctcaaatggtacagctttgaggtcttggaagatgttgcaccagtatgagaatagggggtcagtttcctccaggatccagaaagcatatcaggcaggctcggggagaggaaaggaacacggcctctccagcagccacacaggcctgcagtaggatggggctggggctggggctggcactggggctggccccgtttatcacttgggcctcatgaggggaaaagaaagaacagggggcagaggaggagcatgggagcagcgggttgcctaaggagaaggcgcctcagggaaggggtattagtttgttttcacactgctataaagaaatacttgagcctaggtaatttataaaggaaagaggtttaatcgactcccagttcagggaacttacagtcatggcagaaggcgaaggggaagcaggcaccttctccacaaggcggcaggagggagtgagcggagaagcaggaagtgccacactttcaaaccatcagctctcctgagaactcccgcactatcaggggagcagcaggggggaacctgtccccagatcccatcccctcccaccaggttcctcccttgacacaggaggattacaattccagatgagatttgggtggggacacagagcccaacctgtgagggtctcagtctatcttgcagctcccctggggctggggc

SEQ ID NO: 1244844 - DNA, 4001 bp, Homo sapiens
gggaggagttctgtccctggaaaggaggttgacccgacctggtgagacatgtcctgcgtcagaaaggcctttctaaaagcaaacccatccctgagctgagacaggtgctttaggggtgaggggagtgcagaggactcactgtacaatccccaaatgatcgacgttgttgttgtagcttcgaaaaggcttaggccccttgtcctctggcagcccagctcggtgtccctgtagcccagagggagccttggtgaggggtccaaggtaaagggtgcaagggcctgggggcattggccacccgtccctgccctgtgctcctagggagcccaggaccctttgaccagggcacactggaagaggcctccctccaagaagcagaccgacttgtaccttttcgtatttcataatgatgtcctctcgctcttgtgcccaccaactgcccgcgacctctaccacgtccatcctgtgagacagaattgtctaaaggtcacactgtacgcggcggcttcggagaacacctgaaccgctctcgccgggctcccagatgctggctggctgcgtaacccccattccaccgccgcccccagggaaaaaggggccagacccagtggcccacagctgctccagtctctggagtctcaagtcccaagcaggggtgggcatcttcccaaggacttgagtacagtgggacctagacagagaatcctgttgtcccccaatgccatgaaatggggacacaccggccccagcaggttgaatggtttccacctgccaagggtgaagggcccatgatgggctattccagggatgtggaggcagactggggtcagcgaccagaggtctctgtgcaatcggcctcctgggatgctcagggcctcagcgatgcccagtttcctacagggaacaagatctctcccgactgctcggttctactccgctcatcactttggctaccgtggctcttcagtctgaacagtgaagccactttaggaataacgcctgttgagcaggagggtgttgggtttgggggatgaggaagatctattgtacgcatggaaaccacgtctctcgcggagggactgtggagtccaccattctgagccgtcccaacaggaggaggcttcattttcctgggtcactgaggaagaacagtgggtccttggtcctggagaacagctggatggaccgtccctcctgggaatactcgaggcaaaaggagggcgaggcctcaagaggaccacgcagagcaagaaatacctggggagaaccctagtgcccggacccctttgaacacaagggaagatagtctcccctcagccagccctccagggctccttcattttccacagctgcccaagggcagcaggctcccccggacaagggaccatgtgtgttcagtggggcccacagcgaccatcaggacccagcttagggcacagaggtgttctgaggaccgtcagtggatctgtaccagtggctctataccagtggctctgccaggaccaggctctgccccatcgggatgggaaacctgggcagatttgggatctagggcagggaggtcacagggttcaggcctgaattccagcacagcacacggcagggctgagagcaaaactcagggtcatgtccggattcccaggccggttactgcctctctgaccccagacgtctcatctgtcgaatggggacatttgggaacagcacccactctacgaagccaccatggagacgaaagagccaatcgtctacacgggcagtgtagaacgggcgcctggtgagtgctcagggatgaccctcctcggtagctgccccacagaggccaacaccgcccgcaccgtagccactgcccccaagtccgcctggagggaagagagcaggtcacgctcacctgattctgatgaatcagctggcctgggtcatgcctctcagggagaaaacctttgagtccacagagctgctcacagataccactgcctgtgtgtaactgctgtagaccactgaggcagaccagagagcagataggtgctaagcaccagtgacattctgaggtcatggcacgaatcacagtggggccttgcccgggtcagcagcacccagagtcagggtcctccgctgcctgaggcgtcaacatgcctgcctgcaatgtgtttgtgcacgtgcgtgcacatgtgtatgtgggtaaacacatctgtgcacgtgtgtgctgcttctctggccaggcccggctgccccactcatgtgtgcacccagttcctcatcactgtcacccccgaggcccagggccagcatcagagcatccatggctgctccctaacctcagccctccctgcccagggtggtcctgggatacacatagcggtggagggaagtgactgctgctgttggatctcagaatacaaaagctagtactattacctaatggtctttttagtgtctctaatggtatcgctttttcatttctgatattttaactgggtatttctctccatgacccttggatattctagctagaggatcctgtggggaaagtgccgggcacacagtaggggctcactcttctagacatgttatctaaaacctggttcatctgtccttccacacagggcctaggggatgccaaattccaggggccagaaagagcttgggataaaaagaaacttcaaggggacggctttgacctgggctgagtctgcctgtgccatccaactggagtctcaagtcctgaggcaggacgtccagatgccccagtgcagggtcctcctgatcaacacctgctcccctgtactcattagcaacctcacccaccctactctcaaagcacacttggctctcgtatccaggagctctgcatctgtagattcagcaacagcagatggaaaatattcagaaaataaattggacggttatgtttctattgaacatgtgcagagtttgttcttgtcattattccctaaagaatccagtatcacgaccatttatgtagcatctgcattgtattacacatcatgaataatccagagatggtctaatgtctacgggaggatgtgcatagctgatatgtaaatactaggccatgttatgtcagagacttgaggatccatggattttggcatccccggggaccctagaactaatccatggataccaagggatgactgtataaactcactcaggaaggcttctcattggaggaaggtcccagttcaggacacacagggacatctccctggactactgtccattcatccatccattcatccattgtctccccccacccccccatctcggactgtcccagtgacagccctagcaagaagagacaagaaacaagttcacgttgtccagttttgaggtaatggaagaagttgcaccagtatgagaatagtgggtcagttttctacaggatgcagaaagcatatcgggcagcctcggggtgcggaaaggagcctggcctctctagcagccacacaggcctgcagtaggatggggctgtggctggccatgtggatcacttgggcctcatgaggggaaaggaaataccaggggggcagaagaggagcatgggggcagctggttgcctaaggagaaggcacctcagggaaggggactgtattcatttgttttcacactgatgtaaagaaatacctgagattgggtaatttataaaggaaacaggcttaattgacttgcagttccggaaacttacaatcatggcagaaggggaaggggaagcaggcaccttcttcacaagacggcaggagggagtgagtggagaaccagtaagtgccacactttgaaactatgatcctcctacctcagcctcccaagtagctgggactacaggcacatgccaccacacccagctaatttttgtactttttatagagacgaggtattggcatggtgcccaggctggtatcaaactcctggactcaagcagtccacctgccccagcctcccaaagtgctcggattataggcatatcagccagctgatggagc

SEQ ID NO: 1244845 - DNA, 4001 bp, Homo sapiens; identical to SEQ ID NO: 1244265

SEQ ID NO: 1244846 - DNA, 4001 bp, Homo sapiens
ggaggagttctgtccctggaaaggaggttgacccgacctggtgagacatgtcctgcgtcagaaaggcctttctaaaagcaaacccatccctgagctgagacaggtgctttaggggtgaggggagtgcagaggactcactgtacaatccccaaatgatcgacgttgttgttgtagcttcgaaaaggcttaggccccttgtcctctggcagcccagctcggtgtccctgtagcccagagggagccttggtgaggggtccaaggtaaagggtgcaagggcctgggggcattggccacccgtccctgccctgtgctcctagggagcccaggaccctttgaccagggcacactggaagaggcctccctccaagaagcagaccgacttgtaccttttcgtatttcataatgatgtcctctcgctcttgtgcccaccaactgcccgcgacctctaccacgtccatcctgtgagacagaattgtctaaaggtcacaccgtacgcggcggcttcggagaacacctgaaccgctctcgccgggctcccagatgctggctggctgcgtaacccccattccaccgccgcccccagggaaaaaggggccagacccagtggcccacagctgctccagtctctggagtctcaagtcccaagcaggggtgggcatcttcccaaggacttgagtacagtgggacctagacagagaatcctgttgtcccccaatgccatgaaatggggacacaccggccccagcaggttgaatggtttccacctgccaagggtgaagggcccatgatgggctattccagggatgtggaggcagactggggtcagcgaccagaggtctctgtgcaatcggcctcctgggatgctcagggcctcagcgatgcccagtttcctacagggaacaagatctctcccgactgctcggttctactccgctcatcactttggctaccgtggctcttcagtctgaacagtgaagccactttaggaataacgcctgttgagcaggagggtgttgggtttgggggatgagaaagatctattgtacgcatggaaaccacgtctctcgcggagggactgtggagtccaccattctgagccgtcccaacaggaggaggcttcattttcctgggtcactgaggaagaacagtgggtccttggtcctggagaacagctggatggaccgtccctcctgggaatactcgaggcaaaaggagggcgaggcctcaagaggaccacgcagagcaagaaatacctggggagaaccctagtgcccggacccctttgaacacaagggaagatagtctcccctcagccagccctccagggctccttcattttccacagctgcccaagggcagcaggctcccccggacaagggaccatgtgtgttcagtggggcccacagcgaccatcaggacccagcttagggcacagaggtgttctgaggaccgtcagtggatctgtaccagtggctctataccagtggctctgccaggaccaggctctgccccatcgggatgggaaacctgggcagatttgggatctagggcagggaggtcacagggttcaggcctgaattccagcacagcacacggcagggctgagagcaaaactcagggtcatgtccggattcccaggccggttactgcctctctgaccccagacgtctcatctgtcgaatggggacatttgggaacagcacccactctacgaagccaccatggagacgaaagagccaatcgtctacacgggcagtgtagaacgggcgcctggtgagtgctcagggatgaccctcctcggtagctgccccacagaggccaacaccgcccgcaccgtagccactgcccccaagtccgcctggagggaagagagcaggtcacgctcacctgattctgatgaatcagctggcctgggtcgtgcctctcagggagaaaacctttgagtccacagagctgctcacagataccactgcctgtgtgtaactgctgtagaccactgaggcagaccagagagcagataggtgctaagcaccagtgacattctgaggtcatggcacgaatcacagtggggccttgcccgggtcagcagcgcccagagtcagggtcctccgctgcctgaggcgtcaacatgcctgcctgcaatgtgtttgtgcacgtgcgtgcacatgtgtatgtgggtaaacacatctgtgcacgtgtgtgctgcttctctggccaggcccggctgccccactcatgtgtgcacccagttcctcatcactgtcacccccgaggcccagggccagcatcagagcatccatggctgctccctaacctcagccctccccgcccagggtggtcctgggatacacatagcggtggagggaagtgactgctgctgttggatctcagaatacaaaagctagtactattacctaatggtctttttagtgtctctaatggtatcgctttttcatttctgatattttaactgggtatttctctccatgacccttggatattctagctagaggatcctgtggggaaagtgccgggcacacagttaggggctcactcttctagacatgttatctaaaacctggttcatctgtccttccacacagggcctaggggatgccaaattccaggggccagaaagagcttgggataaaaagaaacttcaaggggacggctttgacctgggctgagtctgcctgtgccatccaactggagtctcaagtcctgaggcaggacgtccagatgccccagtgcagggtcctcctgatcaacacctgctcccctgtactcattagcaacctcacccaccctactctcaaagcacacttggctctcgtatccaggagctctgcatctgtagattcagcaacagcagatggaaaatattcagaaaataaattggacggttatgtttctattgaacatgtgcagagtttgttcttgtcattattccctaaagaatccagtatcacgaccatttatgtagcatctgcattgtattacacatcatgaataatccagagatggtctaatgtctacgggaggatgtgcatagctgatatgtaaatactaggccatgttatgtcagagacttgaggatccatggattttggcatccccggggaccctagaactaatccatggataccaagggatgactgtataaactcactcaggaaggcttctcattggaggaaggtcccagttcaggacacacagggacatctccctggactactgtccattcatccatccattcatccattgtctccccccacccccccatctcggactgtcccagtgacagccctagcaagaagagacaagaaacaagttcacgttgtccagttttgaggtaatggaagaagttgcaccagtatgagaatagtgggtcagttttctacaggatgcagaaagcatatcgggcagcctcggggtgcggaaaggagcctggcctctctagcagccacacaggcctgcagtaggatggggctgtggctggccatgtggatcacttgggcctcatgaggggaaaggaaataccaggggggcagaagaggagcatgggggcagctggttgcctaaggagaaggcacctcagggaaggggactgtattcatttgttttcacactgatgtaaagaaatacctgagattgggtaatttataaaggaaacaggcttaattgacttgcagttccggaaacttacaatcatggcagaaggggaaggggaagcaggcaccttcttcacaagatggcaggagggagattgtgcagtggcacaatctcggctcactgcaacctctgcctcccgggttcaggcagttctcctgcctcagcctccctagtagctgggattacaggcatgcaccaccacgcctggctaattttgtatttttagtagagacagggtttcaccatgttggccaggctggtcttgaactcctgacatcaggtgatctgcctgcctccgcctgccaaagtgctgggattacaagtgtgag

SEQ ID NO: 1244847 - DNA, 4001 bp, Homo sapiens; identical to SEQ ID NO: 1244839

SEQ ID NO: 1244848 - DNA, 4001 bp, Homo sapiens
tgcaggggagtcagggaggagttctgtccctggaaaggaggttgacccgacctggtgagacatgtcctgcatcagaaaggcctttctaaaagcaaacccatccctgagctgagacaggtgctttaggggtgaggggagtgcagaggactcactgtacaatccccaaatgatcgacgttgttgttgtagcttcgaaaaggcttaggccccttgtcctctggcagcccagctcggtgtccctgtagcccagagggagccttgctgaggggtccaaggtaaagggtgcaagggcctgggggcattggccacccgtccctgccctgtgctcctagggagcccaggaccctttgaccagggcacactggaagaggcctccctccaagaagcagaccgacttgtaccttttcgtatttcataatgatgtcctctcgctcttgtgcccaccaactacccgcgacctctaccacgtccatcctgtgagacagaattgtctaaaggtcacactgtacgcggcggcttcggagaacacctgaaccgctctcgccgggctcccagatgctggctggctgcgtaacccccattccaccgccgcccccagggaaaaaggggccagacccagtggcccacagctgctccagtctctggagtctcaagtcccaagcaggggtgggcatcttcccaaggacttgagtacagtgggacctagacagagaatcctgttgtcccccaatgccatgaaatggggacacaccggccccagcaggttgaatggtttccacctgccaagggtgaagggcccatgatgggctattccagggatgtggaggcagactggggtcagcgaccagaggtctctgtgcaatcggcctcctgggatgctcagggcctcagagatgcccagtttcctacagggagcaagatctctcccgactgctcggttctactccgctcatcactttggctaccgtggctcttcagtctgaacagtgaagccactttaggaataacgcctgttgagcaggagggtgttgggtttgggggatgaggaagatctattgtacgcatggaaaccacgtctctcgcggagggactgtggagtccaccattctgagccgtcccaacaggaggaggcttcattttcctgggtcactgaggaagaacagtgggtccttggtcctggagaacagctggatggaccgtccctcctgggaatactcgaggcaaaaggagggcaaggcctcaagaggaccacgcagagcaagaaatacctggggagaaccctagtgcccggacccctttgaacacaagggaagatagtctcccctcagccagccctccagggctccttcattttccacagctgcccaagggcagcaggctcccccggacaagggaccatgtgtgttcagtggggcccacagcgaccatcaggacccagcttagggcacagaggtgttctgaggaccgtcagtggatctgtaccagtggctctataccagtggctctgccaggaccaggctctgccccatcgggatgggaaacctgggcagatttgggatctagggcagggaggtcacagggttcaggcctgaattccagcacagcacacggcagggctgagagcaaaactcagggtcatgtccggattcccaggccggttactgcctctctgaccccagacgtctcatctgtcgaatggggacatttgggaacagcacccactctacgaagccaccatggagacgaaagagccaatcgtctacacgggcagtgtagaacgggcgcctggtgagtgctcagggatgaccctcctcggtagctgccccacagaggccaacaccgcccgcaccgtagccactgtccccaagtccgcctggagggaagagagcaggtcacgctcacctgattctgatgaatcagctggcctgggtcatgcctctcagggagaaaacctttgagtccacagagctgctcacagataccactgcctgtgtgtaactgctgtagaccactgacgcaggccagagagcagataggtgctaagcaccagtgacattctgaggtcatggcacgaatcacagtggggccttgcccgggtcagcagcacccagagtcagggtcctccgctgcctgaggcgtcaacatgcctgcctgcaacgtgtttgtgcacgtgcgtgcacacgtgtatgtgggtaaacatgtctgtgcacatgtgtgttgcttctctggccaggcccggctgccccactcatgtgtgcacccagttcctcatcactgtcacccccgaggcccagggccagcatcagagcatccatggctgctccctaacctcagccctccccgcccagggtggtcgtgggatacacataggggtggagggaagtgactgctgctgttggatctcagaatacaaaagctaatactattacctaatggtctttttagtgtatctaatggtatcgctttttcatttctgatattttaactgggtatttctctccatgacccttggatattctagctagaggatcctgtggggaaagtgccgagcacacagtaggggctcactcttctagacatgttatctaaaacctggttcatctgtccttccacgcagggcctaggggatgccaaattccagggtccagaaagagcttgggataaaatgaaacttcaaggggacggctttgacctgggctgagtctgtctgtgccatccaactggagtctcaagtcctgaggcaggacgtccagatgccccagtgcagggccctcctgatcaacacctgctcccctgtactcattagcaacctcacccaccctactctcaaagcacacttggctctcgtatccaggagctctgcatctataggttcagcaacagcagatggaaaatattcagaaaataaattggatggttatgtttctattgaacatgtgcagactttgttcttgtcatcattccctaaagaatacagtatcacgaccatttatgtagcatctgcattgtattacacatcataatctagtaacggtctaacgtatacgggaggatgcgcatagcttatacgtaaatactaggccatgttctatcagagacttgagcatccatggattttggcattcccggggaccctagaactaatcctccatggataccaagggatgactgtatatactcactcaggaaggcttctcattggaggaagggcccggttcaggacagacagggacatcatccctggactactgtccatccatccattcatccattggcaccaccctctaggactgtcccaatgacagccctagcaagtggagataagaaaaaagactggctcaaatggtacagctttgaggtcttggaagatgttgcaccagtatgagaatagggggtcagtttcctccaggatccagaaagcatatcaggcaggctcggggagaggaaaggaacacggcctctccagcagccacacaggcctgcagtaggatggggctggggctggggctggggctgggactggggctggccccgtttatcacttgggcctcatgaggggaaaagaaaggacagggggcagaggaggagcatgggggcagcgggttgcctaaggagaaggcgcctcagggaaggggtattagtttgttttcacactgctataaagaaatacttgagcctaggtaatttataaaggaaagaggtttaatcgactcccagttcagggaacttacagtcatggcagaaggcgaaggggaagcaggcaccttctccacaaggcggcaggagggagtgagcggagaagcaggaagtgccacactttcaaaccatcagctctcctgagaactccctcactatcaggggagcagcaggggggaaactgtccccagatcccatcccctcccaccaggttgctcccttgacacaggaggattacaattccagatgagatttcggtggggacacagagcccaacctgtgagggtctcagtctatcttgcagct

SEQ ID NO: 1244849 - DNA, 4001 bp, Homo sapiens
ctgcaggggagtcagggaggagttctgtccctggaaaggaggttgacccgacctggtgagacatgtcctgcgtcagaaaggcctttctaaaagcaaacccatccctgagctgagacaggtgctttaggggtgaggggagtgcagaggactcactgtacaatccccaaatgatcgacgttgttgttgtagcttcgaaaaggcttaggccccttgtcctctggcagcccagctcggtgtccctgtagcccagagggagccttggtgaggggtccaaggtaaagggtgcaagggcctgggggcattggccacccgtccctgccctgtgctcctagggagcccaggaccctttgaccagggcacactggaagaggcctccctccaagaagcagaccgacttgtaccttttcgtatttcataatgatgtcctctcgctcttgtgcccaccaactgcccgcgacctctaccacgtccatcctgtgagacagaattgtctaaaggtcacaccgtacgcggcggcttcggagaacacctgaaccgctctcgccgggctcccagatgctggctggctgcgtaacccccattccaccgccgcccccagggaaaaaggggccagacccagtggcccacagctgctccagtctctggagtctcaagtcccaagcaggggtgggcatcttcccaaggacttgagtacagtgggacctagacagagaatcctgttgtcccccaatgccatgaaatggggacacaccggccccagcaggttgaatggtttccacctgccaagggtgaagggcccatgatgggctattccagggatgtggaggcagactggggtcagcgaccagaggtctctgtgcaatcggcctcctgggatgctcagggcctcagcgatgcccagtttcctacagggaacaagatctctcccgactgctcggttctactccgctcatcactttggctaccgtggctcttcagtctgaacagtgaagccactttaggaataacgcctgttgagcaggagggtgttgggtttgggggatgaggaagatctattgtacgcatggaaaccacgtctctcgcggagggactgtggagtccaccattctgagccgtcccaacaggaggaggcttcattttcctgggtcactgaggaagaacagtgggtccttggtcctggagaacagctggatggaccgtccctcctgggaatactcgaggcaaaaggagggcgaggcctcaagaggaccacgcagagcaagaaatacctggggagaaccctagtgcccggacccctttgaacacaagggaagatagtctcccctcagccagccctccagggctccttcattttccacagctgcccaagggcagcaggctcccccggacaagggaccatgtgtgttcagtggggcccacagcgaccatcaggacccagcttagggcacagaggtgttctgaggaccgtcagtggatctgtaccagtggctctataccagtggctctgccaggaccaggctctgccccatcgggatgggaaacctgggcagatttgggatctagggcagggaggtcacagggttcaggcctgaattccagcacagcacacggcagggctgagagcaaaactcagggtcatgtccggattcccaggccggttactgcctctctgaccccagacgtctcatctgtcgaatggggacatttgggaacagcacccactctacgaagccaccatggagacgaaagagccaatcgtctacacgggcagtgtagaacgggcgcctggtgagtgctcagggatgaccctcctcggtagctgccccacagaggccaacaccgcccgcaccgtagccactgcccccaagtccgcctggagggaagagagcaggtcacgctcacctgattctgatgaatcagctggcctgggtcatgcctctcagggagaaaacctttgagtccacagagctgctcacagataccactgcctgtgtgtaactgctgtagaccactgacgcaggccagagagcagataggtgctaagcaccagtgacattctgaggtcatggcacgaatcacagtggggccttgcccgggtcagcagtgcccagagtcagggtcctccgctgcctgaggcgtcaacatgcctgcctgcaatgtgtttgtgcacgtgcgtgcacatgtgtatgtgggtaaacacatctgtgcacgtgtgtgctgcttctctggccaggcccggctgccccactcatgtgtgcacccagttcctcatcactgtcacccccgaggcccagggccagcatcagagcatccatggctgctccctaacctcagccctccctgcccagggtggtcctgggatacacatagcggtggagggaagtgactgctgctgttggatctcagaatacaaaagctagtactattacctaatggtctttttagtgtctctaatggtatcgctttttcatttctgatattttaactgggtatttctctccatgacccttggatattctagctagaggatcctgtggggaaagtgccgggcacacagtaggggctcactcttctagacatgttatctaaaacctggttcatctgtccttccacacagggcctaggggatgccaaattccaggggccagaaagagcttgggataaaaagaaacttcaaggggacggctttgacctgggctgagtctgcctgtgccatccaactggagtctcaagtcctgaggcaggacgtccagatgccccagtgcagggtcctcctgatcaacacctgctcccctgtactcattagcaacctcacccaccctactctcaaagcacacttggctctcgtatccaggagctctgcatctgtagattcagcaacagcagatggaaaatattcagaaaataaattggacggttatgtttctattgaacatgtgcagactttgttcttgtcatcattccctaaagaatacagtatcacgaccatttatgtagcatctgcattgtattacacatcataaataatctagtaacggtctaacgtatacgggaggatgcgcatagcttatacgtaaatactaggccacgttatatcagagacttgagcatccatggattttggcattcccggggaccctagaactaatcctccatggataccaagggatgactgtataaactcactcaggaaggcttctcattggaggaagggcccggttcaggacagacagggacatcatccctggactactgtccatccatctattcatccattggcaccaccctctaggactgtcccaatgacagccctagcaagtggagataagaaaaaagactggctcaaatggtacagctttgaggtcttggaagatgttgcaccagtatgagaatagggggtcagtttcctccaggatccagaaagcatatcaggcaggctcagggagaggaaaggaacacggcctctccagcagccacacaggcctgcagtaggatggggctggggctggggctggggctggggctggccccgtttatcacttgggcctcatgaggggaaaagaaagaacagggggcagaggaggagcatgggggcagcgggttgcctaaggagaaggcgcctcagggaaggggtattagtttgttttcacactgctataaagaaatacttgagcctaggtaatttataaaggaaagaggtttaatcgactcccagttcagggaacttacagtcatggcagaaggcgaaggggaagcaggcaccttctccacaaggcggcaggagggagtgagcggagaagcaggaagtgccacactttcaaaccatcagctctcctgagaactcccgcactatcaggggagcagcaggggggaacctgtccccagatcccatcccctcccaccaggttcctcccttgacacaggaggattacaattccagatgagatttgggtggggacacagagcccaacctgtgagggtctcagtctatcttgcagctc

SEQ ID NO: 1244850 - DNA, 4001 bp, Homo sapiens; identical to SEQ ID NO: 1244266

SEQ ID NO: 1244851 - DNA, 4001 bp, Homo sapiens
cctcgggctggacctgcaggggagtcagggaggagttctgtccctggaaaggaggttgacccgacctggtgagacatgtcctgcgtcagaaaggcctttctaaaagcaaacccatccctgagctgagacaggtgctttaggggtgaggggagtgcagaggactcactgtacaatccccaaatgatcgacgttgttgttgtagcttcgaaaaggcttaggccccttgtcctctggcagcccagctcggtgtccctgtagcccagagggagccttggtgaggggtccaaggtaaagggtgcaagggcctgggggcattggccacccgtccctgccctgtgctcctagggagcccaggaccctttgaccagggcacactggaagaggcctccctccaagaagcagaccgacttgtaccttttcgtatttcataatgatgtcctctcgctcttgtgcccaccaactgcccgcgacctctaccacgtccatcctgtgagacagaattgtctaaaggtcacaccgtacgcggcggcttcggagaacacctgaaccgctctcgccgggctcccagatgctggctggctgcgtaacccccattccaccgccgcccccagggaaaaaggggccagacccagtggcccacagctgctccagtctctggagtctcaagtcccaagcaggggtgggcatcttcccaaggacttgagtacagtgggacctagacagagaatcctgttgtcccccaatgccatgaaatggggacacactggccccagcaggttgaatggtttccacctgccaagggtgaagggcccatgatgggctattccagggatgtggaggcagactggggtcagcgaccagaggtctctgtgcaatcggcctcctgggatgctcagggcctcagcgatgcccagtttcctacagggaacaagatctctcccgactgctcggttctactccgctcatcactttggctaccgtggctcttcagtctgaacagtgaagccactttaggaataacgcctgttgagcaggagggtgttgggtttgggggatgagaaagatctattgtacgcatggaaaccacgtctctcgcggagggactgtggagtccaccattctgagccgtcccaacaggaggaggcttcattttcctgggtcactgaggaagaacagtgggtccttggtcctggagaacagctggatggaccgtccctcctgggaatactcgaggcaaaaggagggcgaggcctcaagaggaccacgcagagcaagaaatacctggggagaaccctagtgcccggacccctttgaacacaagggaagatagtctcccctcagccagccctccagggctccttcattttccacagctgcccaagggcagcaggctcccccggacaagggaccatgtgtgttcagtggggcccacagcgaccatcaggacccagcttagggcacagaggtgttctgaggaccgtcagtggctctgtaccagtggctctgccaggaccaggctctgccccatcgggatgggaaacctgggcagatttgggatctagggcagggaggtcacagggttcaggcctgaattccagcacagcacacggcagggctgagagcaaaactcagggtcatgtccggattcccaggccggttactgcctctctgaccccagacgtctcatctgtcgaatggggacatttgggaacagcacccactctacgaagccaccatggagacgaaagagccaatcgtctacacgggcagtgtagaacgggcgcctggtgagtgctcagggatgaccctcctcggtagctgccccacagaggccaacaccgcccgcaccgtagccactgcccccaagtccgcctggagggaagagagcaggtcacgctcacctgattctgatgaatcagctggcctgggtcatgcctctcagggagaaaacctttgagtccacagagctgctcacagataccactgcctgtgtgtaactgctgtagaccactgaggcagaccagagagcagataggtgctaagcaccagtgacattctgaggtcatggcacgaatcacagtggggccttgcccgggtcagcagcgcccagagtcagggtcctccgctgcctgaggcgtcaacatgcctgcctgcaatgtgtttgtgcacgtgcgtgcacatgtgtatgtgggtaaacacatctgtgcacgtgtgtgctgcttctctggccaggcccggctgccccactcatgtgtgcacccagttcctcatcactgtcacccccgaggcccagggccagcatcagagcatccatggctgctccctaacctcagccctccccgcccagggtggtcctgggatacacatagcggtggagggaagtgactgctgctgttggatctcagaatacaaaagctagtactattacctaatggtctttttagtgtctctaatggtatcgctttttcatttctgatattttaactgggtatttctctccatgacccttggatattctagctagaggatcctgtggggaaagtgccgggcacacagtaggggctcactcttctagacatgttatctaaaacctggttcatctgtccttccacacagggcctaggggatgccaaattccaggggccagaaagagcttgggataaaaagaaacttcaaggggacggctttgacctgggctgagtctgcctgtgccatccaactggagtctcaagtcctgaggcaggacgtccagatgccccagtgcagggtcctcctgatcaacacctgctcccctgtactcattagcaacctcacccaccctactctcaaagcacacttggctctcgtatccaggagctctgcatctgtagattcagcaacagcagatggaaaatattcagaaaataaattggacggttatgtttctattgaacatgtgcagagtttgttcttgtcattattccctaaagaatccagtatcacgaccatttatgtagcatctgcattgtattacacatcatgaataatccagggatggtctaatgtctacgggaggatgtgcatagctgatatgtaaatactaggccatgttatgtcagagacttgaggatccatggattttggcatccccggggaccctagaactaatccatggataccaagggatgactgtataaactcactcaggaaggcttctcattggaggaaggtcccagttcaggacacacagggacatctccctggactactgtccattcatccatccattcatccattgtctccccccacccccgcatctcggactgtcccagtgacagccctagcaagaagagacaagaaacaagttcacgttgtccagttttgaggtaatggaagaagttgcaccagtatgagaatagtgggtcagttttctacaggatgcagaaagcatatcgggcagcctcggggtgcggaaaggagcctggcctctctagcagccacacaggcctgcagtaggatggggctgtggctggccatgtggatcacttgggcctcatgaggggaaaggaaataccaggggggcagaagaggagcatgggggcagctggttgcctaaggagaaggcacctcagggaaggggactgtattcatttgttttcacactgatgtaaagaaatacctgagattgggtaatttataaaggaaacaggcttaattgacttgcagttccggaaacttacaatcatggaagaaggggaaggggaagcaggcaccttcttcacaagacggcaggagggagtgagtggagaaccagtaagtgccacactttgaaactatgatcctcctacctcagcctcccaagtagctgggactacaggcacatgccaccacacccagctaatttttgtactttttatagagacgaggtattggcatggtgcccaggctggtatcaaactcctggactcaagcagtccacctgccccagcctcccaaagtgctcggattataggcatatcagc

SEQ ID NO: 1244852 - DNA, 4001 bp, Homo sapiens; identical to SEQ ID NO: 1244840

SEQ ID NO: 1244853 - DNA, 4001 bp, Homo sapiens; identical to SEQ ID NO: 1244841

SEQ ID NO: 1244854 - DNA, 4001 bp, Homo sapiens; identical to SEQ ID NO: 1244846

SEQ ID NO: 1244855 - DNA, 4001 bp, Homo sapiens; identical to SEQ ID NO: 1244839

SEQ ID NO: 1244856 - DNA, 4001 bp, Homo sapiens
cactactaataatacgaaaaattaggtgggcgtggtggcgcgcacctgtagtcccagctactcgggaggctgaggcaggagaatcacttgaacctgggaggtggaggttgtggaggttgcagtgagctgagatctcatcactgcactccaccctgggggacaaagtgagactccgcctcaaaaaaaaaaaaaaaaacctctagtctagtctccctttcaaccggctctgcgtgaactaaatcttctccatggcaactcccctgccctgacaaatcaactctatctgggcagcccgcagaaagaacccactggggccgagcgcagtggctcacacctgtaatctcaacactttgggaggctgagtcgggcgaccacttgaggtcaggagtttgagaccagcctgaccaacatggtgaaaccccctctactaaaaatacaaaattagccgggcgtggtggcgcgcgcctgtagccccagctactcgggaggctaagacaggagaatagcttgaacctgagaggttgaggttgcagtgagccaagatcgcaccactgcactgcactccagcctgggcaacagagcaagacttcgtatcaaaaaaaaaaaaaaaaaaaaaaggaagaagccattgggctgttacaccaggaacaaaaaatctggcttcactggtccctggatgagggtccctcaccctcagaacagttctgcacgagaggcatcgttatccgccccagcttacacccgaagaaacaggcaatcaagtatcaggtccaagcgacagggccagaattcacaggcaggaggatctgacgccgaacccgcactcctcccacaaggccccccaccctgcctgactcctaaaatcaaagcgctgtcattctaaaatgaggaaggccaaataatgcaaaagttcttcttactcaaagggtctacaaagatgattttactgaattacaaaaccccatgtaactacttagctatgagctcctaaggacttgtttggaaataacccattatagacagcggtaaaggtgggtctgaactcggagaatttagactcatcgaatggcctccacaggggtacctacaccccaccccgcctgcagaggcacggacccggccagcccgctctgtccacggcgtccacggaacggacaggctgctgccctccccacccgaggcgcgctttgtttgcagcaggtttgttccctgcgtccccctctctcattccctatctccctgtccacacaacattcacagaaaccgcgctcggtggaggcaagcctgggagtccacactgcagggctgaccagctgtccggaggggtctggcccgagtctccccagcccagggacctcctccagtgacggagacgggggacggagggcttctgcaccccgcctcccggggaggccgcagaggcttcaccccgtgcgagagcaggcgctccgcgggccacggtccccccaagggaggcgcgcgtctgccccgtgcacctaacgccgcgccggggtggccctctcccgcctaggaaggccgcgccccaccacggcccgcgggaccgcgcaccggcagccctcgcagagcggccggcgccgccgggctgcggtccccgcccggtaaagtgcactcagcgcgccgaacccgggccgggggaggaagcgggcacgcggcgccgcccacgcaccgcggaaccgctccagggccacctcgcgctccgcgccgccgccgtgcacctcccgcaggcggcccagcagcgcccgggtctccgcgctctcgccgaacgcttccagcgccgcgccaaaggccagtgtctcgtcctccgcctcctcctcggggccgcccgcggccggttcgtcgctcagggccatctcggcagcctggggaccgcgcccccgcctcacgtgttcgcagatcccactccgctagagcgcgaaagccagggatgaaggatgagggatgaaaaggaggcgcccgctaaggcggcaaccgacgctggccccgccccgcgacctccgaccccactcgccggcctcgctacggaacgcgtcggccgccaaaataccgcgcgcgggacggcgcgtgcacttgaggacgcgagcgggcacgggtcccaaaggctctggaagagcgcgccgtggaccccacagggcgcgagcggagccgggaccgctcagcggggcctgagcacgcggtgggcggggcaggacaggaggtggggcctgagacgcggtgggccgggctgcggggtgaggccgccgccggaggacagcggggcggagcctgagcaggcggtgtgcgggggggcggggcttcgggatggggccgggggccgccagggcggggcttgagcacgcgatagggggcggggctgcgcgcaacgggggcggggcccgggcacgcgtgggtgggaggggcagggcttgcggtggggccggagacagcggggcggagccacaacacgccggggggcggggcgggggcggggcgggggcgggtgggaccgggggaccgcggagcggggcggagcctcagcatgcgtggacggggaggggcggggcctgagcacgcagtcgggggcgcgaggcgagccccgggacccacccctcagagccaaccgccctgacacttattcgcgccacgctgggacccgcgcggatcacacgggccccgcgccgagtggtggcgcgccccagagcgggagcgggagcggggcccggaggccgcggtgggcgctgcgccgactttggccttggctaccgggtccgcgtgcgtttcccctgaatcgccgcaaaaacgtccgtgcacagctcgccgtgcgtctggccctgaaagcagccccacgagcggaggaacgaggcgcaggacgccagccgagacccgctgcgggctttattggtccccaggatctgggaggggtcgggggaagggggacagggacaggggggacggggacgggggacggggacggggggacggcgatgggagacggggatggaggatggggacgggggaacggagacggggacggggcaggggggacggggacggagatgggggacggggatggggggtcggggacagggggattggtatgtggacagggggacagggggacgggggacagggatggagggacggggacggggggacggggacaggaggatggggggacggggggatggagacggagggacggggagacgggaacagggggacagggacgggggcacagggacgggggacggggggacagggacggggagacggagacggggacggggacaggggaagggagggcaggggccgctacttgagcagccttcgcatggtgcccaaggaagggctcctgtactcccgcccgaagtggttccagtggttcaggtagttaaacagctggtagagcagcagccgctggtcgaagcccggagccttggggatcttccggtggtaggcggtgaagaaggatctggggaaccccccaaacatcaaggcgattgccagttcaaactcggaatggccatagaaggaagccgggtcgtaaataatgggccccacgtcgtcctcagccacgtttcccgaccagagatccccgtggagcaacgcggggacaatctctaggccacaaaacagatccgggatcttcacctacgagagcaacggctgcagttatcgctggcctctgggagccccggtctcatcacctcgttcttggaaataaggcaaagcccactcgcgatctgcttcggtgtccagccccagcactgcctgccaagcccagaaataggggccacctgacttcaggggagtctagctttgtctaacttaggatttcctcctaatttaggtctagaatccccacacagtggagaacctctgaggttatagttttaatcgacccacagaataggaaccagtgttgcgctaccttagcaaactctggccacttttatttcgctacacatatatgtctgcaggttttgtttggttttgttgttttt

SEQ ID NO: 1244857 - DNA, 4001 bp, Homo sapiens
aactaaatgcacacatgcacacacacaaccagctacacatcctcaagcacctccggctccccaggcctcaccatctccctcagctctgtctccaagtcactcttctccacgcagagtttctcgtaggcctggatcatctctccaagctgttcttcctgctccttgttcttctgtaactggatgaggcccagagggccccaccacagggtcagtcccacactggacttggagttggagagctccctgcacctccccacccccactcccagcaccctatggaggggcaggaggagctgcagctgggcttagggaggacctggccatctctaatcaaagggcagaggccagatgctggggggtgtggagggaagggtatcagaaacagactggagcaagatgctcagggggtgcgcccagcctggtaggctcacctcatgctggaactggttgagccgttgctgcaggctgaccttctccacctccagcagggagccatccttgatttcatacagagaaaagccatgctcctctccaaagtcactgatcagtgggtactgcaggtggggtggagcttcaggagagtggattcccgggtgcccagcccaggcctcagcctggctgtgcccccaacccacaacctgcctcagacctttgaccctccttctccttggctagtgggatcccaattcccatgggtctgtagccatctcccacccaccggatctgttttagatcccagatccagcccttctgaagccaacaggagacagttcgcatccggaacagccacgtctctcatgggagaccctcaagttcccaagagtctgcacagtgacccctcttttggatccctggtatctaccagattcccagtccccctccccatcccatacactctatcaggcgccctcctctccaagttctgaccttgatctcgtagactttgaggcggcgtcggagggtggcgttctccctctccaggccccccagccgttccttgatgtctccgtaagcagtgatgagggcaaagtgggaggcggagcacatgtcgcccccaagcgaggggtctccgggactgtccagccacacctcactaggccccagggcctcctgcgtcaggatgctgatgtcgtcctcgaacatggactccatggtgagggccgggccgcggcccacacggggcctcctaggagagcaggagcaaccgtggacagggccgtctgtctagggtttgtccctggtacccctctccctggctctgcactccctggggccggctaagatgcaacccagaaacttcctgccccgagctcagcagggactcccatggccccttcccagactcctcagccccatcctctctgccgccttggggaaaaggggctggaaccaggtgaagaccccgctgccagggtgttgacaagtagggacaagtaagccaggccggcagcaggggcaggctcctgccagaacccagggagacctgtggatgggagagggctgccttcccagccgggcccggcccattcctccgcgcttctccaccccaggccttacttccccaaatacctcgccgccaagctcctcagcctgggcctctggcaccccagctcctccccaaggaaggcccagagctgcgcgagggtcggcccctccacagtcggcacgccctcggctgcacccccgcccaacttccccacttcctcccgcaggatcccagagttcaggaaaaggaagcgcctcccccgggcgcaccggggctgtggcagcggtccaggaccccttggcccctgacctgggacccacaggaagtccttggctgagtgttacggggcgcaaactggggaaggggacccaggtggaaggggacgcgaacgaattcccaaggctgtctcagggtgcccgcgcaccgggaaatggggaaccctacgagggggcaggaatgactcaggctcccgaaagcaggagtaggcagtgagggggtgcgtgtgtacttctctcgggcctggttatgaatgtgtgtctggggttggcgtatggggggagtgtgcgtctgtgaatgagtgtaggtgtgtcagtcaatgagtgccttcggggtcgcaggggcgtcgggacggagtggggcagcgaccaggaggctggtgtgtgcacgcgtgcgtgagcgcgtgggcagggtggcacgtccgggccgcgtgtcacgtgagacgcgaggggactgtccgaggtgtgtgcgcgcgctggagcgttatgtgcaccccggagagggggctcggcagggagctgtgagttcagacagcggggcccccaggtcgggctgcaggagcttggggtgcaaagggctccggcgcaggctccaattcaatccacccccccccctccgccacccacaggcccatctaagtgccagggaaacgcgagtgactgggtctgagtaaggagtgtgtgcgcgcgtttgtagggccggccccacctttaaccctctccttcccacgccatcccctccccccagctccgcgcgccagcgcttaccacacccccccagacccccgcccgcccctctgcgcccaccccgctggcggggctctgtccccgaggccgcaccacaaatgcctccttcctccgcattcctctctgggcccagcgcccgggtgagcgcaatggaaggcggctggggaaggggtgagtgcctctgtcggcccgggcccctcctgcggcccctttaagagccgccctttaaacccctttcgctcggccgacagaaattgtcgcccctcccctctcgggggccgagaccacgcagccccctcccccacaaccggccgagccctgggcccccggacaccctctcggggccggggaaggggctccgggagtggcgcggcctgaggaacggcggcggagggggacgcgaggggatgagggcggccgacaccggaccccttccctcccagccatcccgtgcggctgccagccgccctcctgccgcctcctcctgcccaccccgcgacccctggggcccagcccgggcgccgctcccctcccccagccctagccccagccggggactcacagctgctgccggttcctgcttgtaatcgcagcttaccccctccgcctgctccctccccaaacgggcaccagtgcccccacccccctggtaccgcgctctgctcctcgccctgtcgccgccgccgggtctctccccaccccccacccctccccccaaccccctccctcccgtccgccccgctcctcctccgccgccgccgcctcctccgcctcctcctccccggctgctccgggtttctccagctgggaaggcgccccggaccccgccgctgccaccaccacgtggcgagaggcggcggcccctacggtgcggcccttcctggcagcgcgcccggagcccaccggctccctgcggcgccagcggcccgcgctggcgccccctccccgacgcctcccggcgcagtgtggcgtggtggcgtgtgttgggggcgtctgcggtcagtgcaggggcccggctgatgctttggttgttttggttgtttagttatgggctgtatatttggggaggaagtggggctatttatctggctttttttttttttttttggtctttgcgcttttgagaaggaaatcattagacctgctcttcgttgctcttggtaaaaggggcattgctgcgataaatacattgaacatagggtacagagagattaaagctgtaacttctttggaagtgagagtaaactaaggaggtcaaagattcattcatgaagaaggacagccatctccctccccacacaccactccccggccaccctcaagtacccacaggtcagggaaatgaagaaacaacagatgtcaccctgtgcacaaagattatttgagcacctgccaaactgctgggcaagagaaacaagttttttgctactttcctgctgtgtgaccttgggcaagttaccttaacctttctaagctggagatcatgccccacc

SEQ ID NO: 1244858 - DNA, 4001 bp, Homo sapiens
ggcttagccatccactgctcccccgtggctgggctgtctgggtggatgtacatgcgtttgggcatctcagggtcggccttgcccgccaccatccagcgcgagttgtggaacttatagcggcaatcgtcagcggctacaatgtccatcagcaggatatacttggccttcttgtccaggccgctgactcgcaccttgaagggggggaacatccgcctgggagggagggaagggaggagatcccattggaaccggctgttctaggttccaggaccccactcctcctttatttatccctcctcgttgcgcacaccgctgccgcctggctgtttcccctgtggtcggctgctctgccctctcatcactgcccggacgaccccacctgtggttgttgctcccaggagatcccatttctgcctgtcagaccctctcctaaacagcctcctttaggccttgtgctcagatctggggaccctctttctccctgatctgagatgaaagctgatgcccaggagagaagtctaggccctctagaaatattctcgcttctccttaatctccccgaaattcgttcaggggaaatacccacttgggacggaagctcccagaaataaatctggagggtgtttgtattgggaactgggctacagagcctgataagacatcctggccgtgcagttcgggggaagagggtgaacccgaggcctggattctcggtggctgagtcgaagggtggaggggccggggctgtggctttcttcaggctttaaggcctggggcggcggatgcgtccagggctcggatgcccgcggtggagaaagggctcccagcccggtgaggcggagggctcggctgacccggggctcgctgccaggaaccgagcaaccagcgtggggttagctgggcccaggtcccactaggggcttcggggtcggagcagagtctgagagaggctgaatttcccccgagctcggagacggacccggacgcagaagagcgagagcgcggggcggaggagaccgccagggccaagccgcggggcctcctctgcgctgggactcagaacggttggggctattctttagcagtatgttttcgttttatttcattcggaggattttagcgtttttgttttaaaaaaaaatcgctccggtgccaaacgagaaaagtcaacttggttgtccgtgggagcgaagcgtggcgtcagggccagaacctggagccgggagccgggagccgggagtccccagctctgctctgatccgtgcagtcccgtgccccagcccgcccgcccgcccgcgcgccttccagccggccggcagccctacctcccggacttggtgatgaccatctccgtgcctagcttgtggaactggtcccacagctccttggcctccagcgtcaccttggggtcgtcctccacctcgtcctcgggctccaggctcttgagggagcgcagatgcgcggcgggcgggtgcgggcccagtgccgagacgtgcagccccgcctcggccgctgctgccgccgccgccgccgcggccgccgcccccgccaggcccgggtcgggcagcggcttggccagcgcgccgggcggcagcgcgagtgccgggaagaaggagggctgcgccgccgccagaaaggcggacatggggaagtcggcgggccgtggcgcgtggaacgggtggtaagccatggcgctggccgccagcgccggctctctcatcgggacatccggcccaggcgcccgggggccggggccggggccgggggcgcgcggctcggacccccggcccgggcggcggcgcgcgcggtggacggacgacccgggtggcgggcgcagcagctgctcctcggggcttcccgtccggcgcaccgcaaggggcacccggctctgtgcgcgggggcggcgggggctctgcgcggggccgggctgggccgggctgagctggcccgctccggcgccggggaccacgcgcgactggttagatcttgtcgtgatctctggaaaactgtgactatctcacatgtcctgcccagctcggatcccctgcgctaacgagccaggccccccttgattgctgattttacgctttttggaccaattgtgggtctccgggggcggggttttgacagctcaggccaagctccggccgggagggggggcctgggagaaggtgtcggaagcctcagcagtaagaaaacatgtcaacagaataaaatattaaccaatgacgggccgccgggccccgagacccctcctcctgccccggcccccaccgcccgcccgcgcctgcggctgcctgcgccggactggagagcgcggagggccgacctgacccgccgaaagggcctgaggcgaggggagcccgggtcccggggccttggggaaggacccgcagccgcacgccggccccaagtgcaaagcattgacacgaccccgagcggagagggggcgccctccttctcccgcgcccagaggcccggccgctctggcccgagccccagcctggcctccgacccagctccgggtcgtggcgccgcctgggggtccctgcgccccggaaagagacagcaggcactggaaagcgaggccggtgggcgggcgagtcgggaggctcgggcggccgaggtccgggagcggatcccaggtggcgggagctggtgagtggagccatggccgagccctgctggggccggcgcgggcgggagcgggacgcggccttgcgctggggaaacgcggggaccccctacccgcgcccgccttcaccggaagactcggaaggaacctggagttctccgcaggcccgggccccgccctgagctttccagcggccgggaggagcggatcctcggggccaggaaggtgagcgcacctttcgctgagcacagggcggcaccgcgcgggcggaccccggattctccacccgcgacccaacgaattttcgccctatccggtaccggagacgaaagtctccttcttccgaaataccggcttcctctcttcgccctgccaaccacttttttagtttcttctcatctctcggaagcgcacgtctcctaagttaaggagtgctgagtaacgcgtgagggagttggggtgtctgcgagcacctgtgattgaagccccctcttctgtgatcagtcttcgttttctgtcttccggcagcctcagtttcccccccatgaagtgatggtgtgtgtgtgtgtgtgtgtgtgtgtgtgtgtgtgtgtgtgtgtgtcgggccccgtgtggtgccctctgtgcgcagcgagagctataactcaaggtgtgcacggggagagtgaagcgaccacgcacctgcttccaatcgggctcgggcgcgaacactcaggctgattcctgaaggtcgttttctgaaggaaaagacagagcatgcactagccacgggtgacattcccacccgtacaaccgcgtggtgggcgcgtacatccaacattgacccatgcaggcgcccgcccactgcgcacaccggtcgcagggcacttcgttgttgaacgttgggagcagcgtttgaaggccggatctctcctggcagtgcggattcgggaccggcggaagcagtatggcctctgcgaccgttatccctacttttcggggccgaccccagggccctcacaactcctcatcaccgcatatgtgagcgccgcccccacagggttttctccacgacctcgttcttggctaggtcgcacctctcttagtacctcctctctggccagaacgaatctttgactccgagctgcgcagtctacgcagacggggcaggatccactgcagttttccacaggcaaatacctgctggctccaccttaggcgagatgtggcctctcggggagggacccgttgtggacacgtttgcgcagccggtgaggtgaccagataataaccagggcagctttccttagccgggaacccaggtaccggcctaggaatccgtgaatacattcgcaaagtcgcgcgcgcgcgcgcgcgcgtgtgtgtg

SEQ ID NO: 1244859 - DNA, 4001 bp, Homo sapiens
aaatcatctggagggaagaatgttccagcaatgcccagatcgaataccaacctctggggtccaacatggccttctccctctcccctccaccccaagccccacgtttggtatccacacctctcggacctgggacccagcatcccaggtccaccaatgacaacagcccttccacactggtcctcgctggtcccctgctcacatgggccgcactgggaagggtgggtgcgcacagcccacatcagacacagtccactccgggggttgcttactaaacaaataccacacaagtcacaggtttctgtttctttccttgcgcaggaggctctatccggaagcagcaccctcagccccaaactctccccatcacgcacggggctcaggaaccctgagccatgaagccatgggacaccccttccccacttctccaggctgaaccggtgaatttctggacaggagtgtggggaaggttttcactggaccagcctcaaagggtgcagtgtggggctggctaccaggctggacccctgggtgagcttcatctgcccagcccgtgggcatttgtgcctggaagggatctgtgccccctacaagctttactgcactagcccccatacacacacacccacacacacatacacacacacacacacacacacacacacacacacacacacacacacacacacacaccagacatatgatctcaaagtaagaccggaaaggaaacttggcgactgcttctccatgtcaccaaatcccaatctccccccgtacacacacaccaccaccaccgctaccaccaccactaccaccactaaagctgacctgagcacaccagcagcaaaggagccgggggaggtgggcgcagggggcccggagataaggggctcccttcccctccagtttcccacacaggaggcccaggcgtcctgtccgcccagagcacaggctttcactgcccgctgcgactcctctacagtagagagtggggcaggggcgcacaccaattctaggtgaagccacagtcacccttcccctaaatcaaggtgacttctcactgtcccgcactcacccgtctcccttgtgagtcctctggctgttggtgcaacagcctgggcacagacgcccctccggagctttccctgtcctcctaacaaccccattcccctgtctccctacgctgaagccaaagcagtgagggacacggagtcagaagcattgtcgagccagaaaaacagacgagacgttcttgttccggcgcgggcacagaggccccaagggccggcgcgccgcactcaccgtccctgcttggtgatgatcatctctgtctggtgctgattaaacttggaccacaacaggtggttgttgagcgcgaccctcagtttccccgacacctccagtcccgcgggtagcgcgtagtcctcacgcggccccgggtagagcccggcgcgcgggtccggggcggcgtagccctcgcccggctggtagccctcggcgtccgcgggcggcgggaaggactcgcccgcgccggggaagccggccgcctggggtcgcggcgggtaggcgtaggctccaaggaagcggctcggcggggcgggcaccaaggcgccccccgggtagggagaccccaggctgccgcccccgcgacgctcgtccgcgtcctgcgcgcccggctccgggtagaagtagcggtgctgcgggtcggcgccaggcgcccggccctcgtcgctccccggcatcggctcggtgcccgtcagcatgtctccgcaacccggctccacgatgcccatccggggcgggctggcaccttcccgtagccgtcgaggacccgcccctccgcgcgcgagagggtcgcgtgggctgggatgggcagggagcagggggcgggggacccgagggccgggtgggggaccccaccggagcccgggctctgacgcctggcttctacgccctcgtccggcaggcgcgcggcagctctcgggcttcctctccagcgggccgctgtcactagagtcgcagcgctttgctgtggctttatgaagctctccggctcccccccactccgccacctcggccctgctccgcctcgccccaccccgccctctcgtggctaatactaggcaaattctacgctcttggcgagtactgcagggccccccatggtggagagaagcgagagcctgcgcgcaccctgtagttcgaagatcttgctttctgggagtgtcagctccgctgcctgacacaccagcccgtggctctcttctggaccctcggggaaattcagcccagctttgaagtctcagctcaaaggccctctcctacaggaagccttccgagatggcccaagtgggactcgctgggcattctcctggcactcagaggctcggagcacgggcacactagaagcaactttgaccatgaacattcaatcgatctttattgatacctactgtgtgcccagactctgtgctaagtgacctttcgggttgccctctttctccccaccagaggtccacatgtgctgagttggctgcatcttgtagctctagccctgggggcagacctggaacctgatggacaacaggaaatgttccttaaagcgcactgcatcagcagcagccaggggtttgcagggccctgagctgggcctggcagggcccacaaaagctcccctaccctgcatggcagtcatgggcactggaagtagcattgggctgccagtgctgagagtcccaggtctggctctgcctgccaggtatatgtgacccaggcaagtcattttccttgcctgaaagtcaacctcacgtgcctcatccatagactgggggaaataaacagatctacttttcaggggggctgcaagccttacatgagagggtgtacgtgtgcagcactttccaatctattattatacctggatggaaaagctgctttgaacagattcagagccggctgacaggaaggaaacccaccacatgctctgaagggctgcctcggagataggacgatggaggcttttctttctccattttccttttatgttaactaatgtattagactccttttatgatgaaaactatccgtttccccccccccaattgaaaatagcatcattgggagttttcctgtgtataaagatgaaacatacttatataggaaatttaagcagcacagaaaagtaaaaacaagactgtataaatcaccccaaattccaccccctaaagccaaacaggattaacatttcagtgaacaccctctgagacctcactccttatatactctctgtctctgtcttttgcacacatgcacaaatatataatttatataaacactacacatgctgctttataatgtgtacttttttttcactccacaaggtgtcatggaatattttgcatatcagtatatagataaagatttacatttttaagagtactttgaaaaatactttaatatttttgtcatgttaaagtttaacttctcctctctctaccttcaccccagtcctccccagttctcccctgggaactggccccagctctacatttctgtcccagcctgacagggcttcacccttaggggcctatggggactctctgctcccaaatagagctgaaccaagaggcaagttggcaggcaaaggcaaagctggggactccaggaggtgggcatgacccagggaggcttgggggagagagaatcagcacatcttttgaggttggagaccggatacatgacagtaccagaaacacaggactggcctcctccccaacaccttacccaccatttctccgtaccttaaggaacagggaagtttctgcctgatgttcaaagtggggcagcattgcttggaagagagggtgaccttgggatccttcactacttttggggaaacatgagagctttcagtaagaccctcctgaatgactgattccctaggagatgtgagactgttgaatgctgacacccctttgggggacatttttgctcagtgcttggct

SEQ ID NO: 1244860 - DNA, 4001 bp, Homo sapiens
gggatagagtgggtggggagggagttcctgaacctgaacttgccagcgtctctgtctacagcaatccaccttcacctgataaccgttctcctccacactcctgcccccaccccaccagccccagcgaatctctcactcacccccacccccgccgtgagtcttcctcctctcatcctctcctccctgttctctcccacagacaccagcgcattttaaagatgtttccactttataaatcatccttttctggcagccaccgagagccgctcccccaacaacacacacggagcccaacgtagtgctttcccgttggccagagatggggatggaaacagaagagcggcgcccctgggatgaaaaacttggggttcgagtcactcacgaaaatgtatgaaaactgaacagcatagtctatttccctctccccatctgctgagaggcatctctgggtctccaatcaatgcattcctgagaaacctcctcaggtcctcaaagagaggagggcaaagcagccccccagggggccaaaagtgctggagctgggacttttgagcgtcgcgatccctgtttggattcatttgcatagcgctgcccctcccctcggtctttcccgcaaggcccgcgcggctgcggtggccccctgcgggctttggcggcccagtcccaagctgcgaagggaggtggcactgacgcccgaggaggcagagaggcctcccacaggccaccaggccggggccgagaggacttctaagggacctccctggccccccttgctccccaccgccatccccggaagtaaatctcccagcgctgacctgccagccttagtgatgatcatctcggtgcccgcctcgtggaacttcttccagagctccttctcatgcagccccaccttgatgttctcgatggtctggggatgggagggagagaaacttgtgtctgccaggcccagggctccacgcggagcctgaggaaagaagaaccagacccgaagagctgtgcggaaccctgcccgcccggagcccatggctccagatttcgtttcacagaacgattttgaactattcgtgaatataaaagaattaatcggtggctaaaacttcctcctttaaagctgcacctacggaggaaccctcagaggacacacatagtggccagcgcaggttagacgacactcctgctcactcatgaacatttctgtggcgggccatcgccacaggctcccggggcagacacagacagggagaggcgcacgcaccctcggccaggcgcgcgcctgcagatagtgcacacagatccccaggcggcatcccgtgcgctgtgatcgtccgattatcactgtgaagccctcggcgacgtcccagaggcctcggatccccgcagcggctcccgtgcgcaccggcggggtggcctcctcctgccccctcgccgttgggtcccaggccctctacgggttgttggagctggacacttggtccaggctcgctcagatgctacgggggtctccctctctcttaccgccctctcctctatctctagctctagctcttgcttgtcccagagtagccccgagggctcaaagtggagaaggacccaaaaggcagagaaagcgagccatgtccagtggagaacgaacgggcagaccgtcctgaatgcagccaggtcctcctgaaagcgagtcctgccgacaatcggacggaaagacggacacaggcggccccgcagacagaccgacgcccgacttctacccgacggctggcgcagccctacctgctccgcggcggcggcggcgacgacgtcggccccgggtcccggggggctgcctagcgcggctccgctgaggcccggcgctgccagcgcgggctcgggggcgttggctgcgctggcctctccgagcgctgggcccggggcccggaaggcctcctcgctctcggacaggcccttatcctgcagcatctcctgcgggcacagcacacaacgagtcactcgcccaggtccacactcgccagaggacccctggccctctccagccgattccgggacttcgtgcggggcgcggaggcagccctggagcacgtggaccccgccccctcctgagctggaggagggaacccgcaaggaaggcaggtccctcgcctcctcccttcaggctgtggacctgggagggtctgcggcagttcaatgtctgcctgcccctgggtgtggggttctgtgatgagtaggtctaggggagggaccgccctctcggcattgccacagctgcaccccgagtccctcactcctactgagctccggtggagcctgaggcctgggccttctcggctgttccccaataactggggtccaggcctctctgtgggcccaggacagccaggacacctcctggccatgcaggaaaggagagccaggctggagggcagggcccaggctcctgcagctccacacctgtgtgcagagagggcctcaggacctcaggcccagctcacccatctgccctcacccaacccctcagacagcactgaggtagagacttcctgaaccaaaggctttcactccaacacactccccgtccacacacatcctcttcccgttctggcacagacatcctcacacccaaacacagcccctcacacagcatcccaccagcctgagcagccacactctcctgggtgactgatccaggctctgccctcagcccaggcctcccctacctggtgctcgagttcgaacctacaggctcactcaggcacactttagcgccacagggctctgctttgggcctaaagacccacacccttcccagtgaaggaccaggccagcaggctgggcccattcacaggaaccgcttagccctgcctggcacagctacatttcttcggctgtcttggctgattccctcgcctactcaggtgcctgctccctgcccgaagcaggtcctggggcctcgggatgagagcacagcctgagaggccagcctgcccgcatcccttaagggtgtgccccgcttgctccgcttcccctttccacctccctgctcttccccatcctgctggacctgggcgctccagcggagctttctgtaggtctgacggcccttcttgaggcggaatgccccgcctttctcttcctaccttcttcccgctctccccgggccctcccggagcatccccgggctcaggcctctcgcccatcttgttcagaggcctcctcatcccgggcttagacttcgactcccaggacctcgcaaagtaaacaagccaagtgcaacccaggagataaaaaggggccggggccagtctgggttgggaaaaacccataaagataaggttgacaggcggaccagtcttcggccacagcctgcagggagtgagactcgctggacatggccagcgccagcacccgcctcgggccacgtgcgaacgcgggccgagcctcggaaacctaggagtccccacacagggccgctgcgccagtagggtagctgcccgctccggccagcgcgctgggtccaactatatctagggccccggcgggatcggctccagcgaccaagcgatccgctggtcccagatgtggcggcctgcggggtcgcaaggaggggccgtctcgcgcttggcccgcatggccatggggtcctctgctgggctcttgtcacacccggagccgtgcagcggagccctgcggctcgcgccctgcgctctcagtcctacgcgctcagccctgccctgtgaggagctggttcaccgcccgcgtccactgacgccggtcccgcagctcggactggggacgaggcctgctcagtgctctccctcccgggctcagggtttgcctcttccttttctctccgccacgaagccacatccagacctcgggacagcttgcccccttcccagcaatttccttttttccacgcccggctggcccggggcggccgtcctcgcggtcctctcggacctcgagcttgggcgcgctcggccgccgccagcaccgcggggtcccgc

SEQ ID NO: 1244861 - DNA, 4001 bp, Homo sapiens
ccccaggttctggctgtcaaaatgccagggtctccccacctatctcccagatgggaagccaattctgcctgtggcatctccgtggtcttcctgaagaccccttccttcccctctggatgagtcccgggcccttctgccctgggtaggtcaccagcccagctcctgccaccgtgggttcctggccccgcttgatgtgggcctcctccatgccattccctcccccttgtccccaggggaaagtctccttgggagaggcagctaggttgggacatgagtcaccacaacagctgcaggggtcacagaggggagcctgaccccctagcacctccaaccttccctggcttccagggcagggggtgtggagcgagacacagctgaggattgattctgtctggattcagaactgagaggcaggttagttttagaggtcactgaccccgttcacaccccgaggcaaagccaaggacagtcctggcaccagcccctccatattctccacgagacatcattgaaacaaaccctggatgcggatgccagctggcttgctggttaccacccagtgccagggggctggacacagaagccaggactgggcagcggtcagggtacgggaaggagactggagacagcaccctgtttacagctctgtcctgcccccacccccaccccaagtatggggtgtacccattagctctgccatatttagctcagatgcggagcctggtcccagaagtgggcattgaggggacacccatgggccagcccccccaaccacaaggaaagagatgcaactctggcacatgattgagcatttattgcggcactaacagagggtgctgggggccccaccatccttgcctctgcccttttcacctccccctccctcccagcttcttctgcctagagcgttccagattcccctcacattttcctggatcagggccactcctcccaggcacctcttgccctcaccagtaccttttgtcccttctcctggggctgagggtcctcagctgtgctggcccccaactctccacccttagtgcccactgtctctgccaccctccctttgggaactcagggggctcaggcatcctggcctctggctcccccctcccctagcccccaactctgggcaaactacaaagcagccatggccagcagctcccctccacagtcctagccaggaagggcccagcccagggcgggcacagcggagcccaagtcacagtccctctcagcctctctgtgcttcctgggacatggagcgggacagggagcgacgaagtgcaccgggcttgctgacaggcaccacagggggcagctgctttgtgatctcagccacctcctggcggtccacacactggccacccagggctgtctccagcgccagcagctcctgaagctggatgggggtgtcctcacgctcctccttggtggcgcccatcttggcaggggtgaagatgggcagcggcagtacccgctggtagggcagctggtactcctgcagcccacggccgaggatgcccatccgcatcatcagccagggcgagcgctgcaccagcacctggcactgcccctgctggtggtaggtctcatgtctctgggtgtcctcctcatgcagggagcagctggggagaggggaggggcagtgagctcctgggagctgttgctctctgggcacaggctgggtggggggctcccctgggctgctgggacctgggggcaggaagggtggttcccctttgctctccccatggggcattcttcctgcccccacccccagaaatttctccagggcttcatgctctggcctcatggctcagtgagggtgctctgggggagcagaggcagggctctagcagacccacactcacccctcctcgggccgtgtggacagtgtcagatccttccattctgcccagaaggcctcccggcgctcacagttctcctccgacacctcgcagctcagctctgaggtagccatgatcactcctcattctctctcccctcccaggccctttaaatagccccctcctcccccttctccaggggctattttcggcccctctggtgtcagatgctataagtagagccaagactcactaatggggggacgccggacccagggcaggggttggggtacctggacgctggctgccccccggtcagaggtctggggtccaaggtcctggggtcaatgcctccaggtgcctgacattactcagacaccgtctcatgccagccacatgcccagccttgtgcccccctggcacttgccctctgccccacccactcccctttgcagggaggacagcagcttgtctgtaaacagagcaggaccagcaggaactgatgccccctctgggctctgtaccagggctgccaggtcctgccctggctgtgctctcctctgcctgggctcaagggcatatccccagaagggagagtgcaaccacgtcctcaggcgcctgcaccaaaggcctagtgcctagtccccagtcaccctcaccacaccagcaggggcggagacagtcaacttcatgcctgggaacctggggcatgagccttggccaggtgttttccttccccatggccagtggtcaggtaagtggtcttaggagacaggtctcaggagacagtcaggctagtaggggtggagggcccccagttctaccccaacacctgtgttgggtgaaatgggaatccaggggctctgatgggtgatagtcagaaggcctggctccagatcagccataaataggctgtgtgaccatgggtcagtccctgcccctctctgggcccctttccccactttctggccactgcaagaggaccagaagagctctggagcctgcccgctctgatgtgctacctgggaggggactggctcttcttcatggggagcaggggagacagatggctgtggggacagtccagcaccccaggagtagcaactcatggtgcaagaggctggcagacaggtggtgggtgtggggggatgaggagtgagaacactgccgagtggacaaagggtggcaggagaggcagtgacaggggctgagctgaggaccctgtggggacggcagagtacccaggagcacgtgggtgcagaactgcagactattgattactgagcactgtccccggttcttcatatcttttaatctcataacaaccctgtgacatcagtcccattttcataaagtgggaagcagaagctgagagaggtagattcgcccagggtcacacacctaggcaggaccgaaacaggatccacctggctctgaagaagctggctctgctggaagcctgcatgcaggcaggcaagggggcaggccagccgggagggaggaggaaggcaggcagtggcctggccccgccctgcgatccgggctccaggccgcccctggtgtgagtgccgtgcggggagagggaatgggtgagtggagtctgggaggtccggggctccaggtggcctggatcccagaggtgcctcagtgaccctgaagctcaggccccatctccaggccacacagtcaaggcttgctgtgggcactgccaggtgcccatacccccacctccattcctggactagagactttaaacttgccccgctgaagcctggcagggggcggggcatttttttctgaccagtcatctgctcagttgaactggtcaggaaagcggggagtggggggtgggcggggggggaatggggggcatgtttcaggaactggctccccgggctccgccctcctgtgagcccaggagaggctgtgtgaggggtcttccctcttcatccaagctgctgcctgcctttctcttccctcaagaggcaaggcagtgggaggggctggaatttttttttttttttaaattcatgtttttaattggcttaatacaaaggtcccccaggaggccctgggaggagggggacagcctgggagaggcagagattcatggccagcagcccacccccacctgccacccactcccca

SEQ ID NO: 1244862 - DNA, 4001 bp, Homo sapiens
tgatggaccttcttccacgaagcaatcggaaagcttcaagttctttagtagatgctgtattcaacacatgcaagatggaagcctgctgttctgaagagaagagcttgtcaagtgcattttcgggctcctttgcattttcatcacaaaaagtaacattgggagtaattttcttaggtgtagtggattttttccgacagcagaaattatgtaaggcccagtacagggatgacctcgacggggtcagaaagcatctccacctctctaaaaggaaaatttagcaaaatataagttggatgtcctacttcctttggggttagttgcaagcttgactagatcctttgcaaagtcacaaatactttcctggaatttaagaactaatagaggacaatattaaattgtcttggagaatcatcttttttttttttttttgagacggagtcttgctctgttgcccaggctggagtgcagtggccgatctcggctcactgcaagctccgcctcccaggttcacgccattctcctgcctcagcctcccaggtggctgggactacaggcgcctgccaccacgcccggctaattttttgtatatttagtagagacggggtttcacagtgttagccaggatggtctccatctcctgacctcgtgatccgcccacctcagcctcccaaagtgctgggattacaggcgtgagccactgtgcccggcccgagaatcatctttaaaagaggattagtttttaaactatattatatagagttttaaatagagcttttgttgttttcaagtcacgagagatgtctcccgatatttatggatcagtccgaagttttactacctagaaaattgtattttatacccatcaggaagcaagtagttgaaataattattccaactgcttaaagtttctgatatttttaatttagaggaatctttttgtaactaatatttcctgttaaggtttgtcttaggccgggcgcggtgactcacgcttataatcccagcactttgggaggccgaggtgggcggatcacctgaggtcgggagttcgagaccagcctgaccaacatggagaaaccctgtctctactaataatacaaaattagccgggcgtggtggcacatgcctgtaatcccagctactcgggaggctgaggcaggagaatcgcttgagcccggaaggcggaggttgcggtgagccgagatcgcaccattgcactccagtctcggcaacaagagcgaaactccgtctcaaaaaaaaaaaaaaaagggttttgtcttcacttccattttcacattttagtatctcatctggtggaactaaataaaattaaattttgtacgtttataagaaatgtttcagctaagtgatagatttaagggcagttttactttcttccgtacacttttcaagacttctacatgacgtttttgcaagtatgagaaacaccatacaatgcataactttgtaaaaccagtgggaagtcactctaacatcgcagccacaggaaagtaatgtggccagaggtaagcaagcggctgtgagaatgtgaaccatccgcccactctgaggagccacccgtggaccctgaggccggggaagcacaaatgttccgaaaactgccccgtcagctaggctggggccccaagagaggggcctgaacaagggacatgaggaaggaaacactctaggacatgagggacatgaggaaggaaacactccaggttcctccagaatacctccagccgtattccattagcctctagggtcagaggctaatgacagacgggaaatcaccccagtgttccaagcaccctacctcccgccgtattccattagcctctagggtcagaggctaatgacagacgggaaatcaccccagtgttccaagcaccctacctcccgccgtgaagaggacagacccgctcatctccaagttgaatcagtaggtccagtcttcctccattgacttccggttcctgcgtgctgcgcccaaaagcgctcggcctgcactcggcggaaaggttgttgtccaagcggcgttccggggcaaggcccgaggtgtgtcccgctgagcagtgggtcgtccgcgtctgggctgcgggcttccaggcgggcgcctgccgaggccctgtccccggatcccgagtccctggctggcccgcagtcttcttccactgcaccggggaaacgttcttgcccctaccgactcctgagagccgctgggccgaatctccaggaaggcgattccgaggccagttttagtctgtagtgggtaaagtgcctccttcgtggagactccctgggtttctcctagacacttagattgaggagctcctgttggggcccagcctgtggcgccgggagcgggatcaggtaggggcagcgtagacaaggtcctcaaataaccttttcaccaggtagactggaataacggggagagatgcgaagtgtttgaggagctcagcggggaaacagggcaggcaagggattaggtaaaggcgagggaggaggagattgcgttggcgctggagcggtattcctcttagaagggataaagggagatgaatgtagcgccgaatttagttggtccttgaataatgggtggagcagttgaatactccaccagataggaagcctgaagtccccgaggtttatgatttgcagtcagactggagagtgttcctagaaaattggccatatactgtatagcgaatgtgaggctggattgcaggtgaagagcctgggagcaatgagaagtcgcgaagagagtgtatcttcccaggtgagaggcaagcgtaaggaattttttttttaacagtcttgctctgtcgcccaggttggagtgcagtggtgcgatctggactcactgcaaactccgcctcccgatttcaagtgattctcgtgcctcagcctcccgagtagctgagattacaggcgagcgccactacgcccggctaatttttgtatttttagtagagacaggtgtcaccatgttggccaggctggtctcgaactcctgacctcaggtgatccgcccgactcggcctcccaaagtgctgggattacaggcgtgggccactgcgcctggccaaccgtaaggaattgaacctaggagatgtaaggagagtggaaagaaaagaattatttctggaagatggggagccagttttgtgaaaaacggggaattcaggagggagggaaaggtgatgagtttgcgtttttatgaggcagcaatgggttgattgtttgtgtctggaaggcagtggggatgtaggggaatcataagtattaataaaatgtgctggtcgggagcagtggctcccaaagtgtaattccagcactttgggaggccgagacgggcggatcgcttgagctcttgagttccagaccaccctgggcaacatggcgaaaccccgtctctacgaaaaaattagccgggtgtggtggagcacgcctgttatcccagctactcaggaggctgaggtgggagaatcacctgagcccgggaggtagaggttgcagtgagtggagatcgtgtcaccacactccagcgtgggggacagagccagaccttgtctcaaaaaaagaaaaaaaattgctcataggaagtctagaaaccttggcagtttctggggaacttaggaatctaacaagaaataacatcaacttttttctgcaaaatcctccaaatcaggaggaaataatttcctcaactgtagggcttattcagtttactgagatgttatgattgaattgcatccctcaaaacagatttgttgaagtcctaacccccagtaccttattatttccaaataaggtcattgtagatgtaactaattaaaatgaggacaggaaggccggcacggtggctcacgcctgtaatcccagcgctttgggaggccgaggaggggggattacgaggtcaggagatcgagaccatcctggataacacggtgaaaccccgtctctactaaaaaatacaaaaaattagccgggcg

SEQ ID NO: 1244863 - DNA, 4001 bp, Homo sapiens
ttctttaattgttgtaatcttttattgtttttttttcctaagtattttggacctacaactggctgaacccatggatacaaagggctgactgtattctgatgattaatttttgtatctttatcctcttcaagttagaagcccctaaaaagcagagattctgatcattccctgtgatatgcctagtgtgtagtacatagatgcccatagatgctcaataactgtgcatcaaatcaacaaataaatgaatgatgggtggctgaaaatcaggctgggttaccttgtgtctatcttagggcagtgaacttaaacatagaacctggagaatacacatgattttctctaatattcaaaaataatatgttgccacatctgaacatgacactatagctaaactcaacagcctcatcctagcatgttcacgaatatgccaagcatgttgtcttacctagtttcttgttcacatcgctttgagattttcttgtggtcttttcaatttcatccacaagcctctggctttctgcgaccaggcgttctgatcgggacctttgagcgtctgctctgtggtactggttcttgttagcaatgtgccactctgagggcaggaacttgggtggaggttgtaatagtttagccatttgaggtttccaaattcctgatcaaaagcagactcttttagattaaatgaaagcaatttgtccttttttatgataatttttattcaaggatgacatatatacggaaaattgcataaatcataatctgtacacaaaataaatctatctgtgtagccggcacccaaaccaagaaacaagcattaccagcatctctaacctcctcccagttactccacctcaagcccctcagggtaaccagtatcctgacttttaacactacaaattcgttttgctgtttttgaatttaacataaatggaataatacagtatgtattattctgtctctgacttctttagctcaacattatgtttgtaaaattcatccatattgtctatatgattgcagtttgttcgttctcgttgctgtgtaggtgccgttatatgaataaaatctagctgtcttttctactgtttatggatatttgggttgtttacactccagggccataatgagaatgctattaatagtctcatacatgtcttttggtgaacacgtgtatgcatttttataactcattagaattgttgggtcatggagtaatgttctgccaaacagatgagcccagagatgttttcttaaaaaaagaagaagaaaaagaagaggaagaagaaggaggaggaggaggaggaggaggaggaaatgtaacatgtgtaaactgacaactgggtattgaacttgttcaacacataaaagaatctgaaaacttccaggacaaagaaaaggagagaacaggaaggggaacaacacaggggaagccagctggcagaggctgtcggcagtggaaacgctaaaattacccatttcatcttcatacaactctgatggaccatgagaactgccttcctcagacagggctgaaatctgcccccactcccatctctaccctaaggtctgagtccctgctcttaggggcctctggatctctgaagccttcacatatataaggatgaaactagagtcagatcttgactaggctgagaacctcagcccacccagccccctcagacaacatggagtttctccgtttcttcctagcccagtcccttttatggcttctaccgaatttatctgagtgtggagcccagcatttaacccaaggctcctggataagtctgaatagcccccagagaggtggggacctaaattagggctcatcccaacgtcataaggatttggttaggcggggagggttgcgggtaggggtcggtggggtggggtcatggtttacttacctcagcgccacacagaaccactacgcaagctcgggatgggagcctccttaccccaactggagcttccagctcttgcagaacagagaggtaaacaacgcggtctccatgacaacaagtgacgcgttgccagggcaaagagggctggttccgccactgagcagcctggccaaaggcttagcgcaggcgcaaattctgcggaccccagagccagagacccaggagtgtggcgtgtgggaagggtagggccagatgctccggccacctcaacctaccgcgaagacgcggggcaccaagcagaagacagcggccaaagccccgagctgggagtcaggagacctgcgtctagtccgagccctcccgcgggcgggatcatctcgggtcgcgctgtaccccggctctcagacttcccggctgtacagtggggttgggctgggcgatgcctccaggacctcgcagtcgcaggcgaaattgagggttaaaaatcaggaagccaagttgattgtttctgtaagctacaatgagtttcctccagagtttgtataggtctgttaccacaactggcttatttctgcgtggggcgcccgatggggcactctgtgagggcaggtgtgtgagtagaacgccttcaggcaaacactccagaagtcactctgcatccactaggagatggaaaatatgggagaaaaattaaatctgaggggatagctccagaagatttaatatttgtcaagtaggacttccagaaggaaagaaaaaaagagagagaatggcaaaacaattgtgaaagtgagagagagataacttgagccaaagactcaagtctttagattaacgacccacctgaaattaacacacacccccattccttacatatagtcctccctgtggattatgcatataatccatagagtgattagctccaggatccccctcagatactgaaatctgcagattctcaagtctcatataaagtggtgtagcatttgtatataacctacgcacatccctagataggcatactttacgtcatctctagattgctacaatacctaatacaatgcctaatacaatacctaatatagtgcctaatacagtgcctaatgcaatacataatacaatacataatacaacacctaatacctaatataatacctaatacaatgcctaatacaatacctaatacaatgtctaaccatgcctactcatcgcttcattcgcatggattcaacatagcactcagggtgcaacaaattcaagttttgctttttggagctttgtggaatttttttcctgaatattttttatttgtgtgtcatcgcatccaaggatgtagaatccacggataggaagggccaactttatacctattctggtggaatttcttaattcaaagaataagaagaaaaagaaagaataggtatcaagtgtttcgtctctaacacaggtggctagaaatgatggttgctagaaatgatgctaggataatgccttcaaattctatagaaaattatttcaaatctgggattctacaaccagtcaaagcatttcatgtatgagagcaaaataaaagatttctttggacatgccagtactcaaaacggtgagcgtacattctttatggaaaaaaataatagagcaaaagtgaaaaatccagaaagaagaagatactggacataagacatagtggaaccaacccagctgtgtgatgaaaagaaagctcggtgtaatagctaccgaactaaaaagcaatgagtccaaattacaactaaaagtcaaaagaagttttgaacaatatctttaagaagagttatacaaactatgattcataacccagaagtataaccacatggtgagttgaaattatgtctcttctgagcaataaaaagtagataaatgatgacagtctccgtgatgcatgcctgaggtgccatcacttggaatgcctgggaggtatggcttgagctcaggagtttgagactgcagtgagctatgatcacaccattgcactccaacctgggtgacacagacccctattaaaatattttttaatttttataagttaaaaatagacaaatacaaattctgagaaaagtt

SEQ ID NO: 1244864 - DNA, 4001 bp, Homo sapiens
aaaaatctacagaccattttctgcagaagacacaagtttacatgacttgccccacaccctgccttagatcaggggcaagcataggcttgaagggctcacatacaaacccctttagttcctttgtagccacttaattacagttctaaataggagcggaaataaaacagcgctgccaatacactaacaaataccagaagtagaagaaatcatatcagacatcaatgtttaatttctctttatgcatatattacataagaatacaggaaaacttcatctcttcaaaaaaaaaagtttggttaaggaactctattcatcgatggtatataaattattacactttggagagctagatggtggtatccagtaaagttgaaatggcaaattacctgtgactcagcaattcaatttcttggtatgtacctagagaaatgcaaatatgtttacaattagaatgtacaagaattcctttctagtatttttaaagggagcaaactaaaagtccatcaacaggaggatgcatacataatatgtggtaaattcatgcaagaatcaccacacaacagttcaaatgaatgacctgcaacacgtacagcataaccattctatcaacttaaaaagtaacagtaggccgggcgcggtcctcatgcctgtaatcccagcactttgggaggatcacgaggtcaggagttcgagaccagcctggccaacttggtgaaaccccctctctactaaaaatacaaaaaaaaaaaaaaaaaattggccagttgtggtggcaggcacctgtaatcccagctactcagggggctgaggcaggagaatcgcttgaatctgggaggcggaggttccggtgagctgagatcatgccattgcactccagcctgggcgacaagagcgagactccgtctcaaaaaaaaagtatacattggtttaggataaacatatgagtagtaaaagtataaaaatatgcagaatataagtaaatgctaaattctgttggttaatagggataggtaaggagagaggggaatgggatttccaagggttacataacagaccttaattgtgcctgtaatcgattttttgttggtttaagtttggactgggtacatggattcacccctgggttcactctacttattgtgtgaagtattttattttaaagaagaaaaaagtagaatattttgtcagttacctcaaaacattttcgcctgttagtaaaactgtatatttttttcacaataatcaaacaaataattttacccatttccaggatgtttatttctctacaatactatatacatccaggagaaaacataaaggggtttggtctaaactgcccaaacacaagcgaaagctttgcagccaagctaaacagaaacgactttgggcggtgagagaacagctttgatctgaatttaaggagctcggtctacaagaccaggtgattgaactctcctccccgtggctgcagatctgaaggctcggctattgaagcagagggggacgaggaacagcgtgcggggcggccagcaccgcagtggaaaggcacagcgctgctaacgggtaattattagaattaagaaattaaacgaattagcacagtgtcgggggttcggatgccccttccctgggcatcccttgaaaacccttgaaaagcatcagaaaggtaaattacgaggaaaccaacgtctgggtgggaggtgcctgtggatttgtacggtttttatttggaaggaaaagtgaagatcgcggggaggaattgcagggtgtccgcgacctcccgcgatcctgaggcgagaagttggagtcctggttggcgaagggggatcctttggggtagtcctagaggcaggctagagtcagcgagaccactcacctgtcggcggatgcccggcgaggggcgggaaggggctgtgggaggaaggggtcgcagcctaccacctgcagccctcgactggggcccagaccagtctggccctggccccgcctttcctatctgtgacgatagcagcgcctgagggccactcagcggccgccccggccggctcgccggagctgactggccagttataggagaggcgggagctgtcaggccaggagggaaacccgtcgggcggcggttactatggacgcgctcacgcttagtaaccgaggctccccgccctccgggagacctccttggtttgggaggtgaaaggggtgaagagtagcccaagggagaggcctcggtgatttcccgacctctcctgtgaagcctgattcggaactcttccagctgcgaagaacttggccgattctaaggcacatcagggctgcctggaaccctaacacctgcctaggtgttgacaagcccccacctttcctgaccagcctctcttctctccagcagagcttctcctgtgacagaattatctagtgttccttccctgcttcctcactctaagaaaatggtttgggctttccctctctctcttcagcaaatatttccgtaaacagcagcccgtactgtttcttccaggtgctggcccacatttttacatacatacatcattgctcatccatgcaacctctttccaaacctgtaagaggggtttatattgtacagatgaagaaactgaagttcgagaagttaattgacttagacaatgtgactcagtggcagagctaacactaaaactcaaatcagtcaaacttcaaggcatctttccatgaggcagcagtctaaccgtgtgagcagcaagagaattcaccgagttactttggtaactagtaatgctaaagaaaataaagccctcagttaattatttttggcttttctgggaatcactgtgtggcactccacccaaggacgaggcggagggacttgccaggataaggcaggctgcccagcccctaggagacctcaatgaagtgacttcaagtcgggggctggtcctcagctttgccaattcagactcttggttatgccagtgtcccgagtttattagaggctgactcaggccaaccgaactcatgggaacctaatctagaaaagttagaatgctgcctcaagtgtttacattaagcaacacgacccctctaactgtggagatgagcccagagtattttccccaaagaggaaaaccacagaaaacacccagtgctcagaggctactcatttgcctagacacaagactagacaaggctcccatacccgacaccagggcactgcaaatcctgactagttttcccactatgttccttatcagcaactttttctacattcggcctaagaaacatttcactctgagctgtctttttttattacttttttctcatgcatagtgttctgcattttgtattttcagtattcagcacgggctttgcagatgcctagaatccgtagacaatgcagcaaatgatgccatgtttgttctttgggccaaaagactggcaactgttctaaagtagatctgattgcccacaaactctttaaagatgatgagcagtctttgtgctttgcacacatctagatgcccaatagcattgctaattgaagacaaaattcattcaatgtctgatttaaaaataaacaggtgaaattatagcagaatttgatcttttcaatgatacattgagtcagtgaatttcaaaaacctcctgattaaaatttcaggttaaattgatcaactctgttctccatagaaaggattgaatgatgttttggaaataatttagataccctctcaaaaaaaattgtctcatgattatcaagtctttgccagaattgaggttaatgcttgcccttcagttttacagtacgatagagacctcctacaatgcttattaaaaaaaataaagcaagaccactaggattcagctattcaaccttactttctcagcagctccacaagttcaggaatgtgtctgtttctgttcatctctgtatccccagcatggggcttcctacctgccatgaaagagggactcagtcaatgtttgttaaatgaaagcatgaagtg

SEQ ID NO: 1244865 - DNA, 4001 bp, Homo sapiens
aagacatcatctcaaaagaaaaaaaaaaagcgttaaagtcacagaagaaaagttctttgttctattcttgtaattctcgtgtaaatttgaaattatttcaaaataaaaactcagcaaatttagctcttcatctaagtcttttctattcaatgctaagtacaccccttatcattgttacattaagagcaattggtttcctagaatattagaactagaaggtcagctgtcaagcagccatttgttcactccacaaagatttcctgagcacctttagcggggcaggcactgtgccaggtacagagaataaactagacaccctctctgctgttgaaggggcctgagatcagcagcttaataagacaaatgaggatcctgaggtcctaggggttaagagtgtgtattatagttctattattcaaattatgaatgttatgcatctctcgtagttttacttctgagaaaaccaaagtcatagtattacacagactacagacaggctaggcgcagcggctcacgcctgtaatcccggcgctttgggaggccgaggcaggtggatcaacaggtcaggaattcgagaccagcctggccaacatggcaaaatcctgtctctactaaaaatacaattagctgggtgtggtggcgagcccctataatcccagctactcgggaggctgagataggagaatcgcttgaacccagggggtggaggttgcaatgagctgagatcataccaccacactgcagcctgggcgacagagcgagactccgtctcaagaaaaaaaaaaaaaatgactagagatgattcaacaaatccctgaatctcccttgtctacaatcccactgggcagaactgtttttgttttttgttttttttctgtagagacagggtctcactatgttgcccaggatggagtgcaatgtcacaatcttggctcaccgcaacctccacctccggggctcaagccaccatcccatctcagccttcagagtagctgggactacaggcgcatgccactacacccagctaattttttggtattttttgtagggatggggttttgccatgttgcccaggctggtcttgaactcctgggctcaagtgatacgcccgcctcgtcctcccaaagtgctgggattccaggcgtgagccaccgcgcccggccctacactaggttttaacagtaagtgtgcatttcccactttgatgacggtgatggcgaaagcaaagaagtctggattccaagacctctagtaactgccaggttgcgggggaaaatgtctggtttcccagacagaaggcttagagcagcaccgcccgcttggtctcattctaagtccccgtccaccccttgaacagcgctcacaatcccacacccagggccccggaacccacgcctctgccagtaaagacgccattatcttaacaaaaggtaactggagcctctccccaaagagactggttcccgtcccattcttctccaatccgggtggatttggcaaaagcccaagtgaccctccctagcaattccgcaaagccccatctcccgccccagactccagagtctcccgaccactctcatttcggagaggcctaggggcacggacccggaagcgtgacagaggccgcggggtaagaggggggcaagtgcaggcgcaatccctcctcagcctcgttgtcccgcccccttcccaaggccccagccaacctgttctaggcgtcgccggtcctcggatttcttctttccgcctcgcgtggtcacgtgacgggggaggggcgggatacaaaaagtgctttattttcccactccccggacgcccagcagggcagtttcttgaccttcggagcccctttcccgaggatccgctcgggagcctcccctggccaggagcaggggattagtctgccccgcgaccggccccagccacgacgcggacatcgccccctctgtctgggccgctgtcactcacgcgccaaagggccacggagaaagaaggggcgggccggggcgggccgggcgagcggaggcggggacttgcgccgtcctgaggctgcctcctagggtccggccggcgctggagctgcggatttagattgtcactgccacctcggtcggtgcttacttcgctgccagctggtcgtcgccatgaacccggacctgcgcagggagcgggattccgccagcttcaacccggagctgcttacacacatcctggacggcagccccgagaaaacccggcgccgccgagagatcggtgagggcggcgggcgagacctccctcctttcccgagaaaagctggagactccctcgatgcggagtcaggggcgctgtggggcctaggccctctggcccagcgttaggggagccgggacccccacttcgaggaacagcctgtgtccctggtggggggatatcgccattccccaggtgtgtccgcgactctgaagcctattgtgattcagggagggtggaacggaggcccgagtgtctgtctgccttttaatgccctttaaccccctttcagagaacatgatcctgaacgacccagacttccagcatgaggacttgaacttcctcactcgcagccagcgttatgaggtggctgtcaggaaaagtgccatcatggtgaagaagatgagggagtttggcatcgctgaccctgatgaaattatgtggtttaaaaagtaggtatgccttagaacagagcaagtgttgttaagcctaaactttacagctgcggtctatggtggcctttcatcaccgtgcttggtgtttgaagatgcaaactggcatattttcatgcaactttataaagttatatgtgtggccgggcgcggtggctcacgcctgtaatcccagcactttgggaggccgaggcgggcggatcaccaagtcaggagatcgagaccattctggctaacacggtgaaaccccatctctactgaaaatacaaaaattagccgggcgtggtggcgggcgcctgtagttccagctactcgggaggctgaggcaggagaatagcgtgaactagggaggcggagcttgcagtgagccgagatcgcgccactgcactccagcctgggcaagagtgcgagactccatctcaaaaaataaataaataaataaataaataaagttatatgtgtgaaaaataatgtgatcacttttgtatccaagccttttcgtgggatgacgtgtttgtagaatgctgataataaatggaaatgcaggagtttttgttctcaagagtacagtttcaaggatgttgtaaaagcattgttctgcccaagcaactcaaatttgactgatttaaatgcagaatcattttgctctttgtaaggaggactgctaaaattctgaatctgggagcatttttttttttagttgcacgaccatttaaatattttggagcaatagcagattatattatatggtagtgtggacctggatgaagaatgatctgtgacgcctctgaatgaatagaaagtctaagaacccagtagttctgaatccatgacagtgcttgaatggttgtcttgtgcatatgagagagacgtcataaaaacctgccttggttctagtgtggaagagagtatatccttttttcagaccatgtgttttgttgtgttttttgtttttgtttttgttttttgagacggagtctcgctctgtcgcccaggctgcagtgcagtggcacgatctcggctcactccagcctccacctcccggattcaagcgattctcctgcttcagcctcctgagtagctgggattacaggcgcccgccaccacacccggctaatttttgtatttttagtagagatggggtttcgccatgttgccaggctggtctcaaactcctcacctcgtgatccaccctgctccacaaggaacggtaaaaataaataaaaataaggacttcgggccgggcacagtggctcatgcctgtaatctcagcactttgggaagccaaggcaggtggatcacttgaggccaggagct

SEQ ID NO: 1244866 - DNA, 4001 bp, Homo sapiens
agccaggatggtctcgatctcctgaccttgtgatctgcagaagatattaatagcacttaaattatacagctatagatagagttgagtgggggtttttttgttttttttattttgctttgttttgtttttgagatggagtctcgctctgtcgcccagattggagtggagttacgcaatctcagctcactgcaacctcaacctcccgggctcaattggttctcccacctcagcctcccaagtagctgggactagaggcatgtaccaccatgctggctaatttttgtattttttgtagagatggggttttgccctgttgcccaggctggtctcaaactcctgagatcaagcgatgtgccctctttggcctcccaaagtgcttggattccaggcttaagccactgtgccaggccaaagtagttttgaactttccactgtcaacgaaagaaattctaaacacgactgattccactgagtttgaccaaactaactgaagacttattgttgaatgtggtaataccatgttttttcttcacccaagaatctgggtgctttataagcataagcatgaaatctccctgaagatagtatttatgcatccactgagcgctcaaatatagaccatattagaagttaagcaatgggttgagtggccaaccacattttggccagtcctacaagactttctttgacctaccaaatggggtataaatgcttctcgtattctccccgccagtagggactcaaaatcttaatagctcggggtagtaaaaaggatgctaggtttgaatcttggctttaagaaaactgtgctgaggtgttttgtttgtttgagacagggtttcactctatcacccaagctggagtgcagtggcgtgatcatagctcactcccaggctgaagggatcctcccaccacagacttctgagtagctgggacgaccggtgcatgccaccatgcccggctaattttttgtacttttggtacagacagtgtttcgccatgttgtcgaggctggtctcaaactcatgagctcaaagagatccacctgcctcgacctcccaaagtgctgggattacaggcacgagccactgcgcccggccagctttttttcttttatcagaattgatattaaactatatgctgagcttccatgtccttatcttccttttggcatggctatggccatttgaaatgtgtgggatttgctaaagtgctcaacatacgttgtttccttttttagatctaagtatgtagagggctctgatttgcaatatttagaaagttcttctaagctgggaagaaaagtcaagactaagaatcattgccaacagggccgggcgcggtggctcacgcctgtactcccagcattttgggaggccgaggcaggcggatcacgaggtcaggagttcgagaccagcctggccaatatggtgaaaccccttctctaataataatacaaaaattagccgggcatggtggcgtgcgcctgtaatcccaggtactcaagaggctgaggcaggagactcacttgaacccgggaggcgaaggttgcagtgagccgacatcgtgccactgcactccatcatgggcaacacagtgagactctgtctcaaaaaaaaaaaaaaaaaaatcgccaataggtagggaataagttaccccctgctaaataagttacactcacctaggcaaggaaggaactcataaaccaccttctaaactgcttgccttcctccccgaagttctgtaatttagaggcggtcactaccactgcttgaacaccccttcccaagtctgtaccacaaaaggagctcttgtgtagcccagcccctccttctcaggaccccaggagcccagacacactaatggggacattagttgcttacttttccagctactgcttaagctaggcaggccatgaagaaataacggtctcagtaacctccatgctcgggatacgactcccgggaagacgtgggtgggtgcggggaatgcggactgatccctcccagcggccgttgggggctggcccacaatccctcgcgagggcgggaaaagcaatgtggtcgttgcggggggggggggtcagaaaagggggacggtcagcgggaagagccaagagactgcaactctacaaagagcacgcagattaattctaatgattgttccctgagcttttcacaccaaaataatggtaactggctagtgtgtgcccgttacgctcactactcccactcgagatcattcctattaatgactctgaggcttcacctaacaggccacggtggaggcaaggaaatgtggcgtggagaacccactgggcctggctctccgtcctatggtctccgtccatcgttttacagtcagggtgtacatttgatgaggaatctctaaatgggattttggggaatcaaaacggaatggtgcataagtgtgaaaatttacaagactgcgcaaagctgcaaggcccggagccccgtgcggccaggccgcagagccggccccttccgctttacgtctgacgtcacgccgcacgccccagcgagggcgtgcggagtttggctgctccggggttagcaggtgagcctgcgatgcgcgggaagacgttccgctttgaaatgcagcgggatttggtgagtttcccgctgtctccagcggtgcgggtgaagctggtgtctgcggggttccagactgctgaggaactcctagaggtgaaaccctccgagcttagcaaaggtaacgactcctgatggcaagctgaggcacaccggccgccgtcagcgccgcctcagtcttcgttctctcgcctcggccttcagcccagtctccgttagattctgcttcctcccacgtccatgtttacagcgtgaaagagctcctcgactccacttacaagttgtctgaatggttaggagaactgtggtcgtgaaaacatttactaattgcttttcctctggcaatgcctgctgaatgctttgaggattgtctcatttaaccctcaacccgcttacgtagattattatattcagtatatggatgagagaactgatatcttggggagcttaggtaacttttcatgctaactgggttaggaaatactggagtcagaattggttgtctaatttttgctgttccaagatccaaggggtaagggttaaatttcagaaatgcaggattttgtgtaggactagagacactaagaatgagaaagagagtagaatccccggaatcttgaggaagcatagaaagaatattctcttacgtaattaactgaaacacccaaaacctcatattccagagcattgcagatgggaaccactgcatcctgagacatacaaatatgaggctggcggtggtcacttgttgtgcacatctctctatgacatgtctggacctgtgctattcactgaagaagatggaacagaattttaagttactgcccttactgatggaaaatacagaggtttcaattcgcctctaaagaataagtctcgtggacccagccttaactgtttaagtcataccgcgcgcagactgtgtcccccaagatttgatgggctcttttttcttcaacaagttggcttttcaaagaagaaatgtgagaccctgaataataatgatcactaacaactattgactactttagatggtcttgatattctaccaagctttttacatgtatcgtctcattcccattttatagacgaaaaaaatctgagcaaaaaagaaaaagtgaagtaacttgcccaaagtcatgcagtaagtggtgccaggatttacaaacccaggcaatctaattccagcattcaggctcttgataggattttcatttcctaaatgctgtcatcaccattgtcttttattagccccatatttatggctcatattcttatcagatcaagcactgatatatcaaactgataagtgatgtcatcctcaccattatttcttcaccagcttgttttgtaattgccattttcttttctcaggccacactgtcagat

SEQ ID NO: 1244867 - DNA, 4001 bp, Homo sapiens
tgagggaaactgggggaaactgggggaacctgagggaaactgggggaaactgagggaacctgagggaaactgggggaacctgagggaaactggcagagcctgaggggacctgatggaaattgagggaacctgaaggaaactgaggcaacttgaggaaacctgagggaaactgagggaaactgggggaacctgagggaaactgggggaaactgagggaacctgagggaaactgagggaacctgagggaaactggggaaaactgagggaacctgagggaaactgggggaacctgagggaaactgagggaacctgagggaaactgggggaacctgagggaaacttgagggaaactgggggaaactgagggaacctgagggaaactgggggaacctgagggaaactgggggaaactgagggaacctgagggaaactgggggaacctgagggaaactgggggaacctgagggaaacttgagggaaactgggggaacctgagggaaactgggggaacctgagggaaacttgagggaaactgagggaacctgagggaaactgggggaacctgagggaaacttgagggaacccgagggaacctgagggaaactgggggaacctgagggaaactgagggaacctgagggaaactgggggaacctgagggaaactgggggaacctgagggaaacttgagggaaactgggggaaactgagggaaactgggggaacctgagggaaactgagggaacctgagggaacctgagggaaactgggggaacctgagggaaacttgagggaacctgagggaaactgggggaacctgagggaaactgagggaacctgagggaaactgggggaacctgagggaaacttgagggaaactgggggaaactgagggaaactgggggaacctgagggaaactgagggaacctgagggaaactgggggaacctgagggaaactgggggaaactgggggaacctgagggaacctgagggaaactgggggaacctgagggaaacttgagggaaactgggggaaactgggggaacctgggggaaactgggggaacctgagggaaactgagggaacctgagggaaactgggggaacctgagggaaacttgagggaaactgagggaacctgagggaaactgggggaacctgagggaaacttgagggaaactgggggaaactgggggaacctgggggaaactgggggaacctgagggaacctgagggaaactgggggaacctgagggaaacttgagggaaactgagggaacctgagggaaactgggggaacctgagggaaacttgagggaaactgagggaaactgggggaacctgagggaaactgggggaacccgagggaaacttgagggaaactgggggaacctgaggggaacttgagggaaactgggggaacctgagggaaactgggggaaactgaggggaacttgagggaaactgagggaacctgagggaagctgggggaaactgagggaacctgagggaaactgagggaaatttgagggaaactgggggaaactgagggaaacttgagggaaactgagggaacctgagggaaactgggggaacctgagggaagctgagggaaacttgagggaaactgggggaacctgagggaaacttgagggaaactgagggaacctgagggaaactgagggaaacttgagggaaactgagggaacctgagggaaactgagggaacctgagggaaactgagggaaacttgagggaaactgagggaacctgagggaaactgagggaaatttgagggaacttggagaaccttagggaacctgagggaaactgagggaaatttgagggaaactgagggaacctgaggaatcctggccccgcttcagcctcccaacccctcacccagcaccaggccgtgtctccgagacccctcctcagagacccctcctcgggagatctcaccatcctggtgtctctgttcatgtgggcacccagggaaaggaggaggcagagcccatttgggtatataaagggccatttcccatggtgctctgggctcatctgcatatctcccatgagcctcagtttccaggaaatgaaagtgctgagtcaccagctccctccaaggagggccatgtgcagcccctgggcacctgcaggaaggccctggagaggcagctcctctgggggctggagattggggtgggtgctctccgtctgcaggctggcacagggtgagcatccagcctgtggttgctggcccgtcgtgggcacgacgtcctggtcctgccgcgtttgtaaaacgtgatccctgctttgctgtctctgtcttaaagttctctgaattttaagaaccagccaattgtcaattagttattgtttaaacacattttcccctttgtggttcatctcttcgctctttaaacaagacgcttataaattaacacttgttttttcagtagactctattttttacagcagttttaggttcatagcaaaattgagccaaaagcatggagctctcccaccgctcccctgctcctgcaggtgcacagccttccccagtcctcccgtcccagccatttgttacacgttgttattatcatcatcgccctctgcagtttccattatgctttcctccggtgctgtgcattctgcaggtttggacacatgtataatcatgcagacccaccactctaatattgtacagacgggtttctccgccccgattcatctgtgttctgcattttcatcactccctctcccagcccctggcaaccaggaatcttttgactgtctccttaattttgccttttccaaaatgtcacagagctggactcatacattatgtagccttttcaacttcttttttagtaatacgcactttggttcttccatgtcttttgtggtttgatagttcacttctttttttttttttttttttttttgagacagagtcttgctctgtcacccaggctggaatgcactggtgaaatcacagctactacagcctcaacctcctgggctcctgtgattttctcacctcagcctcccaaatagctgggactacaggtgctggtgcacaccccgataagttttgtattttttgtgagacagggcctcaccatgttgcccacactggtatcaaacacttgggctcaagtgatccgcctgcctctgcctcccacagtgctgggattacagacgtgagccaccttgcatggccagctcacttattttttaacactgaatggtattccattgtctggatgtaccatggtttatttatccattcacctatggaaagacatcttggttgctcccaggtttgggcaattatgaataaagctactacaaatattcatgtgcaggtgtctgtagacataagttctcaactcattttggtaaactctaaggagtgagattgctggatgctgtggtcagagtgtgtttagttttgtaagaaagtgacaaattgtctcacacagtggccctgtgggaggaacccccaaaccctttccctacatccccatgacctctgctcctccccacctggcagctgtctgtgcctggctcaggtcatccacacacctggggctgcctgccacccccaccaggttagggctcagatcagggccacccctcaccctggggcttcctcgtcccagtcctgggataggggcaggtgtggggctttggctgccaggtgtcctgctgtgggtggagagggcagtgagctcattccctaaagactcgggtgcctgagctgtctggctggtcccctcaggtgagaggaaagtagtggttgagggaccccacagagaagcctgtttatgggtctgggggtcagaggctcccgggaggagcccccaggtcctggttttctctgaaaaggccactcaaggcctcggggctgagctgtggctgccctggccagaagggggccggggagggagccctgcacctgtcgtgaacactcagggctgggccagtgggcgcct

SEQ ID NO: 1244868 - DNA, 4001 bp, Homo sapiens
tgctttttgtccaaaacatgctacgtatttattctatcgaaaagcctaatctttcctgcttcttctccagaagcattctaacataacctctaataatgaacattatgtttggtatatgctgtgtctaatcttctctcacgatgacataacttgctcttcagacctccaacaatcagcccaaaccaaactcctgaatttttcctccctcctcgtctgtcccagcccctcggttgcttgtcagtagactcaattaccaccatcttctgatctgaatcaatttgttaatctccttcctctcaggcacagtgccttttactggagataaacatgcaagcaagttcagttcacccagagccctccacatcctctccctccaagccttcacactcccaaaggggcccagaaaaaaaagaaagaaatgatatggcaaaatcccactctatccacatcacctcagggggcttgtttaccataactttagaccaactaccatttttggggagaatctgaaagaatattgtttatgggctaggtaagagctaacagaaatggcagtttcattcttccaatatgagacaagcgtctctgtgtgacccagccctaaaactcacaaacctagactcctcaaactccccatactccagagttcaaggataacctgccctccatttttccttattgttttccatataaaagtcactcgttgtttcccctccagcttacacctggctcctgaaatgactcctctgaatcctctgagaatcctcaaaacatgtaaaagcctcattccttttaatgcatgtgcagagcggtgatggtgtgaagacgctggcacttcaaacgtgaacgtggcacgagccctgccctcaaggagcccacaattttccctcaactctaaaaaaggatgtcctccctggacagtgtctgtaaaacacagtgacaaagtacttcatagctctggagaaagagcgagggtggaaacagactttgcccttacatttgacgcccagtaaccataacaaccgatggtttaagtaactatcaacccactgaggggctaagttttccaaaaatcgttttcaaaaggggaagactcccctgcaccaactcccatggcagccgtacgctctaggcagcgtgtggtgcaatgtggccagccgttccccgccttctccggttccaccgtatggtttccgtgctcagcagccagcagcgacggcgtccacggccacaccgcctccccgcaaggcacctggcgctaggcctcagcccaatgtcacttgttaaccttccgatcccccggatttcggcacgccgccgcctccctgctaaagcacacaaaccaccccaccgccacccgcgttctccaggagttggagaaaaaccaccggggcgcatacaacctctgacagattcgagtaaaagtaactgcggttctcgactttcaagcatttcgcgtcgccggtgaggggggcggcaggaacccggggccccattcataaaattgcaagccgttttcctctagtttgcgcgtgacggtgcctccctgcccggggccggggaccgcaggctgaggggacggggccggcagctcctcccgccggagtcgagcccgagccatccggcggggccccgaaggaagggattgcccgggggtgtcgcgggtgggcgtccccttcaatacctgaaccatgacagcggggtggggggccgagccccgccacgccaagggccgccggacccgaccggtactttgaagcccgcggggtcgatccgcgcccagcccgggccttatccgcggggcgctccctccaccgcccccgcctggccctgagactgctcacccaagatccgctggctgcctcattgtactatgccggcgcccgtgctcccggccgcgcgactccggcttcggctggggcaccggccgcggtcctgctgccctgccgcccgcccgcccccgggcacacgccgccccgccccgccggcggacccgccccgcgcccgcggccgccgccgccaaccagagggcgcgggggcggagcaaacggcacgccaggcccaaccaatccagttctaccgcgcgccgaggtgaggccgcggaaatgggggagcgatttgtcaggtctgttaaaggggccaccgcccttggagctagggagaggagtggtggggagggttacctggaagagccccaggtgagggggacaaaagcttcactctcccaacggggctgcacactgtccccagctctttgcacttcttaatttcctcttcctgcagtctagcagcaacaagtgcccttgagacgagggctgggggttgaggtggggtgactgaggcgcggagaaccaggggtatccccctgggcaaattcactcgatttgcattttagagggccatcagacgtatctatccccatccaactgcagacattgatttaaaaaggcaaattcccagtttcccgcattatgtacttcccccacctgactaccacactaccacatcctatcctgaactaactctgttactagtttttttgtttgagacggagtctcgctctgtcgccaggctggagtgcagtgccgtcatctgggctcactgcaacctccgcctcctgggttaaagcgattctcctgcctcagccttccgagtagctgggattacaggcgcgtgccaccatgcccagctaatttttgtatttttagtagagacggggtttcaccatgttggccaggatggtctcggtctcttgacctcgtgatccgccggacccagcctcccaaagtactgggattacaggcgtgagccaccgcgcctggccacgagttcttagagcttagaacttatatagtattaactactcatttttagagaggcaatatctgaggctcagagaggtaaagtgacttctcgaggtaaattctcacttagaatgagcttcctgggatggcaatgcccattgtgcatttatcttctgcgaacctgggttggctggcagaagcactggcacatagggagagttcccccttcccccgtagtccttgcccctctgcacttcccacccaccacaagaaaggaccaagacaacaaacagatgtgtcagtgtgtctcctgcattagtgggtcccaaatgtcagatcttcaacgtcagatcatcctggagggttttaacatgaagatctctaagtcccaccccagaacctgtaattcagtaagtctgagatggccttcgacacccctccctccaggtgattctaatgcaagtggtacaaggaccacactcaggtgcgtgttttgagtctatcatagtcatgaaattcaaattcaattggcaaaatgaaagccaaactcctttcatcctcagaattagtaatatggttgggagacttgctagtaagggaggaggtcacctactaagacactcataacagaataagtcatgccaagaactgagtgtagaagggcactggacccagatgaaacaacatctgaaagattgaaatcctcaagcaggaagaagatttgatgcctcaagcagagggaagccaggctagttctctgacccgtgagacagtgcataaatatcttaatggcagacacactccggctcaccaccaggcccagtcatgatcccagaagaatgccctgctactctggtgcctcattccaatgccagcaagccctgcctaccctcctggcaacattcctctccccttcctagtatcccagacacctgcctgacccagaagtcattgtcctcagacttggaggtcagccctcgcccactagatcttgcaggtcagctgcctcccacacagatctcaggctcttggaatggcctccacacaataaccctgtttgtgctgtgatttctgatggatgttgtgttgccagggacaactctgcacaaggattgatcagcctcatgagaatgcagtctctgggctgcaggcattactgcctgggatcaccacttgcttctgttgcccttcccaaag

SEQ ID NO: 1244869 - DNA, 4001 bp, Homo sapiens
ttccagacctttcataggcattttgtgtgcatacaaaaggtagtgcgcacaaataaagttgtttttgtttttacttttaaatgagatcatattatacaaattgttttgcatttgttttttacttactatttcttggaccacctcctatggcctatacctatggactgacaggtacacacacacacacacacacacacacacacacacacacacaccttttctacacagtaaggtatgccactattaacttaatcatttttttatttgatagaaatttgcagggtttcctgttttcaccattagaaacaacgctgcctttaaaagctgtgtttccatataaatcttgtgcaaaaagaaagtctatctgtaggatgtatttctagagtggagttgctgggtcaaatgaggtacatatttaaaattctgaaactgtttgccaatttgtccaatttactctcctaattaacattgtataaaatgtccaccttcaaccctggtcaagactgaatattattttaaatttctgcccattcagtgggcagggaaaaggtatctcaatgctttgatagtcacttcatacttttccctcatttgcttctcttcttctgttaactggtcgttcatatttcttgcccaaggacttttgttattcacttctttatcaaggatagttaatactttgtctattgtatgtgttccaaatatttccttccatctctgacttgccttttaattgtatgggttttttttttaatatacaaagttttacattttgagatgttgaagctctctatctttttctttatggcttctggatttttttacagcttcctgatgaagccttcccattccatcagcataaaaacattcgtctttgaaatctttttagaaaacgctgacaatagtgtatataacacacataacacacatattgctctgtttcctatacaaggatctaaattttaactttggaaaaactgactgatatggacaatcatttctctattttctagctataataaactgtaaagcattgaatttattcccttcaaatcatattaggaaattagacaacctagcttacatctaggttgatcactggccattcagcttctcaatgtgaggaacgtatttcagattaattcttcaaaaactgaaaaaactctttaagaactcaaaaaaattagccgtttcccccagtcagaaaccctccttttcacacaggcatcagcagacttaaccttgatatagggcagtaaatttgctaagtgtaatcttacatcagaatgttatttataggtaaggcatctgagggccaaagaagataaatttttttaaaccaggtttaagatgtgtgcatgcatgtgtgcacatgtgtatgtgcatgtatgtgtgcacacatgtgtgtgtaggggaaagagtgggactgagggaaataggaattgatgggaggaatatgagaaggcatggtggaaggtttcccaggggccccgtgtgagctggcccatggggacctgacaaggtgccccgccaagacaaaatggagagtacattttaagtggaggacaaagcagaagaaaaggaatagaggcaagaaacccagagccatgttcacaactggcaaggttaggagatactggttcctggcacaggcatggtcctgacctggccggctggccacctcatggttccctgaggagaaccacttgcctataggccctgagggggaacattccccacccaactctacctctgttgtggatcatgccaagaaaggattgcccactgatgagatgattgggattcagacaattgttcagttagtagtaaatcagtcattgaaaacacagaccgagtgaggccatgaggcagcagagggaggagctccacggaggaccacagccctcaaatggccctcaaatgacagtgacggagctccccacttcacctccctgagcctggggttctgctgtaaactgagggaagcttcctccattgtcttcaaggaattttccagaaggctctaaattctaagagtctatgactcaatttccatggaacagaacatacttagagtcctacttttctcttttgtaacaagagaaattcttggcaactgttaaagtcaaggaaagcaaaccagagtgcacatcagctgactaatgtgcctaaggcaattaagtcaaaatatttttcaaatagtactgaaacagctcatctcccattaacaaatacttctagactttccagacttgtcttgctcagcccagctgtagaaacatcccttatgtgtgctggccattaggtggagagtttccaacctatgagaatgagctgcagatcagccgcacctgcatgtgctcaggcaccagaggacaggcatcaacttggcctcctcagcagcccctatctttcccccacctactgccaaacagtacagaaggtgactgtgaggctgctcctgctcaggctgtgatggggttgaacttcatggggctctctatcccagtgcttcattagttcttactctgtacaaacatcacccaagcaccacttctcagcctcactaagaatcttgagtctcccaccaagtaccatatatgtgcttcaggcaaccctgtgtggtcactgttgtgcccattcaagtctgaaaaactctgaggctgactaaaggacggaaccaaaggagagactgaatgcaggctggcccttcacaccactctgctctaggaaaactaacacagcctcatgtggacaggaccgtctctggggttcctgttcgccagcaacatccactctatcttgtttcagtattaagcttctgtcactttaatgcatattaatagatgtgtttgtcattattaaggtggaaggtggttagattctgaagggaggtgagaactgaataggtcctggggtgcaacacaattgcacagaaaacctggttaagaactcaaactctgaaattaaacagacccagctttggattccagttccacctcttatcagtgtgtcaccctggacaagttacggcaaaaggcctctttttccttacatataatgcagataatagtgcctatctcataggggctgctgggagaattaagaaataacacttaacatatgtaagctactataatcagcatccacagcaggtgtgagcacatctttttatccgtgccgactcagcctgtggactcaccggcatgttatccgggatcagacagcttgtttccagccttctctaatcaccagcactggactgtcctgactgtctgactttaggtttagttcaggcagctgtgaccattaagaatgacacaatgacaatgtaaaaatatgtactgtacatatacatcgtaatacaaaatgaaaaggcagaatttaggatgatgtacatcacctaggtaaatgaacacaacaggatcctaggaggcttatagagactaagtattaatagttggtgtttcgtggtgaaagagttattggtgtttgatttcagtgaaaagctgatgaaaaaggatcttttttaaatgagagctgtggataagatctgtagtttcatcaacctcttttttttctgtcccctccccatgttggccacatgtttttcaatattcttacattgtttaccagtaaactgattaattctgtgtattattcttccatttcaatactgatccaaattttaatcaacaatccatatttataaggggttcataatgacattataaaaatcaagtcactgccacaggtgtgataataagcatagctgagcaagcaagaaacaatcagtggcttcatttccatagtcaagggcactcacattcaaggtcaacctcattctaaaggtagtgggaagtgagacctggtaccagctccagtaacaatatctacagttagaccaatcctgtgtcagaaactcctattatgtcatccacagccaatcagaacgtggagtcagcatgaaaccttccatacagggttgcaattccaaacaa

SEQ ID NO: 1244870 - DNA, 4001 bp, Homo sapiens
cacctgtgtctgcaggttccacagtcaatcaactaacaagtatttacagagcagcccttgtgctaggctctgcgtgggatccagagctctttaagtgattctcccaggtctccaagagctcactgtctagtagggtggtatctcaagcgatagagaccaagaacatgtcattgggaatgcatgctttacaccattacgcaggaacactttttcatacagccaaatttaatattcttgggagcaagggttttgttgcctacagaacctcagagctccacagtaaagagtccaggaaaatacttgttgctaagttgtgtatacatgtgttggtgtgtaactgtgtttgcatctgactgagtgacagcgactgtcacggcaagcaatgatgtctgtgtgactgggctcatgcgagcacgtgtgtgcctgtgagtgacagggtcttttgtaattgtgctgctgtgtgcaattgctctgtgtgcatgcatgcatgtgacagtgactttttatgtgtgggtgacagcaactcctccttgccccagtgtgtgacagcatctacgtgtgaccctgtgcgtgggtatgtgcatggatcggtccccatgctcttggtctcccatgggtatatcccacccctcagagctccacggtgcagcagcagcctgtctcttcccttgtccccatgtgggtgtgtccagtagctcctgtccttgagtctgcctgggtgtccctggatgtgcatgtggctgtctgtgtggacatatctctgtgtctgcgtgtcacttttgcttcccccctcattttggacaacagcccccttcatcccctccccctcctggagccaaagccagcactgaggggcaggctcccacctcactggctttccttctgtgtcccccacccccacccctggaacggtggttctttcaattgcccctgtcatccccccaggcctttctttcacgctggacaagggagggccccagatggagaaggggcaccagagacacgttgcaaggggagggaaacaaggtggggtacacacacacaggtccatttctccctctcctccccagccagcaactctcctaatcatctaggcaccaccaagtacaccccttccacacacacattcccccccaacaaccgcgtttttgcaattagcagtgttgcaaccagacagccatgctcaaccgggaggcgggtgaggcgggggaacttccctctccccggacccgtgcaagcccacccgcgccaccgcactcatactgccctccgcagctggaggcagctttgcaaaggccactcgggcctcagaggctaggggtgggggctgggggggcaggcctccggcgcaccgtaaacaaaccgcggcgcggcgggcgggggagctccggcggccggcaacggggcccggcccgggaatgcgcagcagactggccggacagaggccgggcgggccctccagggggaggctcggacgccatctccgcctgcgaaccccggggcccagcgacctcctagcaacacctcccttccccagggcgtcagttgcaagctcccgggctcgtgacagggtcactggggcgccaggaaaggctgaggctggcagcaggcaccccctgggcgcccctagcccgcctgggagctggccacggagccccgcggctttgcataatcaatcgcaaggcatttgcatattaatgccccctcgctccctcctccttacctcggcgtggcgcgccggaccgggctgggcagcgacgcgggggtctcagcgccccgtgctgggggcgtccatggggggccggtggggcccgggccgcccgcctcctgcgcccgggtgtgagtgcgagtgagcgcggggggggcggggggcgagtgtggcggccccgcggctcctccggcagaggcggcggccgctctggctcctccctcccccgccccgctccggctggggctcgggctcggcgcgcccggccggctcgcggctgctccctgcaggccgcctcgccgccgcccgcccccgccccccgccccctgccgcgccccgggacccccgccagaggtccggccgcccctcggccgcctctgccccgccccgctcggactcgccctccccagcccgggcggctcccgcaggagtgggtacttggtgacatattttggaaaagatgtcattaaaaaatagcctttgcttgccgggagaattggggggttttcgggtgtgcaccgtgagggtggaggaggaagtatcgacgagcagcctgcaccttatacatcggggagaaagtctaaacaccaaacgcttgcaggtgtagtttgtttgggagttcgggtcccttctccgccggtaactcactgtgtgaccttgacaaatcgccactgctgtcgggggcagagcttcctcaagcttcagctgcgagggctgggcaggtgacccctgatgtccttttaacttcaatcatcttacgtttttcatccttgtgggggttcattccctgttacctccctcccctctcatttctaacatcaataccgatccactgcctcccttttccaacgtcacccttctccatataggctctttctattctctgtcaccagccatttcccccaacaatctgctccctctcctgagctcggggaggggacaagatctgccataccccctcaattcctagctcccgggtggtggtatttccccccatgtttgctcccacaaaaatccaaatggtaccagagtcaatctaaggaagacggtgggctgcatacaaatggaccccctaacccaacccaaaggagaggtctccaccatgccagccccacccccagcacacacatacacacaccacacacctgcattcatggacataaaaccaacccagtgacgccagagcacctttcatctcaggatctcctagcgccaggccgagccctaattaccccagcacccccctggccccgccggttcccctgctgtcattagcccagttttaccagcgggggccacagccttcccacggctctcagggtggggccctggctacatagtctgctcttggggaggggtgtgtgtgtgagtgtgtgtgtgtgtaagtgtgtgtgtgttagggggagctgctcggctaatcgcccagtttatactgggcagagtcacttggcgagtgtgggattctgagccacagcttacccaagttgggctgcccttgctcatgtcttagtctcagccacctgcatcctcagtgctgttggaaccacttctttcacagggggtactggagttcgtaatgcttggcggaggggagggtacctctcttggggtccctggaaccatggagatgagaagagcagctgggatgaaacctatggcgtgcagagtgcagtggtggtgttgagggcatgccatgggtgaagggagcctgtggtgtgcagtggcagctgtaatggggaattgaggctgcagcgtacggagcctccatgcagtaagcgaacctgtgttcagtctgggctcacaggagacaagcaacagctgcagtgtggggcaggaggctgcagtgtgcagagtcagtgcagtgagtggaatgaggtgcactgagggtggctgtctgccagtcgatgccacctcctcggtgatcaggtttggccggaaccctggggagcaaggctgcagtatgtagtgctcagggtctgtactctaccctgtatggaactagtcccttgggattgggctgctcaaggagctgggagggaatcccaatgcatgagatacatttatactctgcatcacaaaggcagaactaggaggcagtggggagggccagcggtaatctggatcagggcaggagtgatggtgtccagagggggaggaggaaggtgctacggttttgtctctcttccattctggctttccccaccatatctctctttgatgcaaggccctataatgttgggtggtgacgactttctgaaatcctaaacccagagccatagaaaatgaagtgcct

SEQ ID NO: 1244871 - DNA, 4001 bp, Homo sapiens
cccacccctcagagctccacggtgcagcagcagcctgtctcttcccttgtccccatgtgggtgtgtccagtagctcctgtccttgagtctgcctgggtgtccctggatgtgcatgtggctgtctgtgtggacatatctctgtgtctgcgtgtcacttttgcttcccccctcattttggacaacagcccccttcatcccctccccctcctggagccaaagccagcactgaggggcaggctcccacctcactggctttccttctgtgtcccccacccccacccctggaacggtggttctttcaattgcccctgtcatccccccaggcctttctttcacgctggacaagggagggccccagatggagaaggggcaccagagacacgttgcaaggggagggaaacaaggtggggtacacacacacaggtccatttctccctctcctccccagccagcaactctcctaatcatctaggcaccaccaagtacaccccttccacacacacattcccccccaacaaccgcgtttttgcaattagcagtgttgcaaccagacagccatgctcaaccgggaggcgggtgaggcgggggaacttccctctccccggacccgtgcaagcccacccgcgccaccgcactcatactgccctccgcagctggaggcagctttgcaaaggccactcgggcctcagaggctaggggtgggggctgggggggcaggcctccggcgcaccgtaaacaaaccgcggcgcggcgggcgggggagctccggcggccggcaacggggcccggcccgggaatgcgcagcagactggccggacagaggccgggcgggccctccagggggaggctcggacgccatctccgcctgcgaaccccggggcccagcgacctcctagcaacacctcccttccccagggcgtcagttgcaagctcccgggctcgtgacagggtcactggggcgccaggaaaggctgaggctggcagcaggcaccccctgggcgcccctagcccgcctgggagctggccacggagccccgcggctttgcataatcaatcgcaaggcatttgcatattaatgccccctcgctccctcctccttacctcggcgtggcgcgccggaccgggctgggcagcgacgcgggggtctcagcgccccgtgctgggggcgtccatggggggccggtggggcccgggccgcccgcctcctgcgcccgggtgtgagtgcgagtgagcgcggggggggcggggggcgagtgtggcggccccgcggctcctccggcagaggcggcggccgctctggctcctccctcccccgccccgctccggctggggctcgggctcggcgcgcccggccggctcgcggctgctccctgcaggccgcctcgccgccgcccgcccccgccccccgccccctgccgcgccccgggacccccgccagaggtccggccgcccctcggccgcctctgccccgccccgctcggactcgccctccccagcccgggcggctcccgcaggagtgggtacttggtgacatattttggaaaagatgtcattaaaaaatagcctttgcttgccgggagaattggggggttttcgggtgtgcaccgtgagggtggaggaggaagtatcgacgagcagcctgcaccttatacatcggggagaaagtctaaacaccaaacgcttgcaggtgtagtttgtttgggagttcgggtcccttctccgccggtaactcactgtgtgaccttgacaaatcgccactgctgtcgggggcagagcttcctcaagcttcagctgcgagggctgggcaggtgacccctgatgtccttttaacttcaatcatcttacgtttttcatccttgtgggggttcattccctgttacctccctcccctctcatttctaacatcaataccgatccactgcctcccttttccaacgtcacccttctccatataggctctttctattctctgtcaccagccatttcccccaacaatctgctccctctcctgagctcggggaggggacaagatctgccataccccctcaattcctagctcccgggtggtggtatttccccccatgtttgctcccacaaaaatccaaatggtaccagagtcaatctaaggaagacggtgggctgcatacaaatggaccccctaacccaacccaaaggagaggtctccaccatgccagccccacccccagcacacacatacacacaccacacacctgcattcatggacataaaaccaacccagtgacgccagagcacctttcatctcaggatctcctagcgccaggccgagccctaattaccccagcacccccctggccccgccggttcccctgctgtcattagcccagttttaccagcgggggccacagccttcccacggctctcagggtggggccctggctacatagtctgctcttggggaggggtgtgtgtgtgagtgtgtgtgtgtgtaagtgtgtgtgtgttagggggagctgctcggctaatcgcccagtttatactgggcagagtcacttggcgagtgtgggattctgagccacagcttacccaagttgggctgcccttgctcatgtcttagtctcagccacctgcatcctcagtgctgttggaaccacttctttcacagggggtactggagttcgtaatgcttggcggaggggagggtacctctcttggggtccctggaaccatggagatgagaagagcagctgggatgaaacctatggcgtgcagagtgcagtggtggtgttgagggcatgccatgggtgaagggagcctgtggtgtgcagtggcagctgtaatggggaattgaggctgcagcgtacggagcctccatgcagtaagcgaacctgtgttcagtctgggctcacaggagacaagcaacagctgcagtgtggggcaggaggctgcagtgtgcagagtcagtgcagtgagtggaatgaggtgcactgagggtggctgtctgccagtcgatgccacctcctcggtgatcaggtttggccggaaccctggggagcaaggctgcagtatgtagtgctcagggtctgtactctaccctgtatggaactagtcccttgggattgggctgctcaaggagctgggagggaatcccaatgcatgagatacatttatactctgcatcacaaaggcagaactaggaggcagtggggagggccagcggtaatctggatcagggcaggagtgatggtgtccagagggggaggaggaaggtgctacggttttgtctctcttccattctggctttccccaccatatctctctttgatgcaaggccctataatgttgggtggtgacgactttctgaaatcctaaacccagagccatagaaaatgaagtgcctcctgttccactttttttttttcctgaggggcagagtggagcactcaaagacaagggtttaccagtcccatcttctccttcttaaaatttattattattattattatttgagacagggtcttgctcttttgcccaggctggagtgcagtggcacaatcttggctcactgcaacctccgtctcctgggttcaagggattttcatgtcctagcctcccaagtagcggggattgtaggcatgtgctagcatgcccagctaatttttgtttttttgctttgttttgttttgtttttttggtagagaaggggtttcaccatgttggccaggctagtcttgaactcctggcctcaagtgctcctcctgccttggcctcccaaagtgctgggattacaggcatgaaccaccgtccccggccacccccatcttctttttacctctctctttttcttgggctcccagtatggactggtgacaggtctgggcagggcaaagtgaagggcacactgctttcaaagcaggcctctccccaggtgccaggatccagcccgtgtctgggcgtatagccactgtccctgtgttgcctcatctgtcctcccaccccactcaccctgcccacccatttct

SEQ ID NO: 1244872 - DNA, 4001 bp, Homo sapiens
gggcggcagatgggagcagcaccaggcactgcacttgggctcccaagtctggtggagttctcagggataacctttttagggtgggggctgggacctccagaccacatggtgttgtgtctgggataagtgtgtgggggcagggaggttggaagaatgacacgggctcaggacacagagtgaggactcatgtctaatgagcaccggccaaaacttccatcttcagtttttctgatcacaagtcctcaaccccaagccttccctctcaagttgagtttatggtccagaccacctggacagagcaggagggaggcagtgcttggatcagccctgaactgctgtagttggaatgggtttaccttaaataggtcattgcacataacacgctgagacaaagagggtggggtgggggctggaggtgcggatggtccacacacacacttgtctgcgtaggcttgctcaacccagcccagcagcaccggagagcccctccgcacctcattcttaagaacctggacccggctctcctcaccagcgtctccagctgcacagagaaaggactgctctctgaagggtgaagatggagatgacattcccgagtcgttcttgggagccccagctaccactacagccccctcccactctcagggatgcagctgtgatggagaggttgggtatttaaattaaaaagtagaaagacagcaggcaccaagaagagagagcccccaccccacacgagagggaaggcactgcttctcctcccccaatcctccccatggacccagcaacctagagtgtcccagtaggcaacctgtccaccgtccctgagcagggagctgagagggaggtcaacgtgctggctccatgcagtgccaggccacctgccactgcccacggtgacacagggtagaagccaagagtctggcattttgagacagaggagcaaaaagttctcttcagaaactcctctttcccccacctcttccacgtggagacatcagacacccatagcctggaaagtgcccctgacagaagaaggtcagggtgtttcccatgcagatcagcagtcgggtgggggagaccggtgccccaccacttcctgggagaggtgcccaggcagccacaggccctggggtgagagggctgccaaccactcccctgggctatgcgttagtctccgtcagcttggcctctgtgtcgctgtcactcagataactgtgggagtatcgcggtctggaggtgttgtcgagagggtcgtgctcatcatctgaccgatcaggggcaagggacttccagtagctggtggggctgcagggaccgaggaataaggttagggacaaatgacactcctaccattaagcacgcacgcctttggttctggaggcccacaaagctgcgtcagagcactccccaaaagccaaacattgttaagtaaaaaccttccttggcttacttagaagatactcaaaatgctaagaggaaggagactctggaagcttttaaagctccgaggaaagggatgctgagagcagtgagtctcggactcaagcgtgcataagaatctgatgcaggttcctgggcccttcctcttagaaaccttgaatcgctggcttttgggtacaacccagtaattctgcattttcagtccttccccagaaggctctgaagcaggcagtccgtgaaccacattggcttggagactggaggtctggtgagtacaacttgtctagggtaggggctctcttaggcgagtgattcctaaaaagattccttctgaggaggaggcgctttccctgtcaaatactcccagatctgaaccctttcccctaatgatggctccctgaggcctgtgagaattttcagctttgaccatgccatcatctactaacaagaaatggaggctcaggaaggagaggctgggaagacctgttttaggatggcccaaggggaaaagcccctttcttggtacaataacataactcagagtcttcatcaggcctctggctctggaggcctccagctatcccagatgtgaagaggcctcttccccctgatggagcaggatcacagcactgaacagggaagaggggacctcatctcacagctccattcaccttctcttttctttctcccaaagccttggggccacctttcccgtactcctcctgcctccactgcctccgtcagttcaagtgcactctcgtttcaacaccattggagaaaacacagcccagtgtggctcctctcctactgatgccccacactcggcgtggtccctggagctgcagccctgcctccagatcctagagttccaacttgggcaagcaggagttccatgttccctgctgcctataattctgacttaagctgaaaagggacctttgtttactagcccttttaaagttctatccccaaaccaaaataggaggagtcagcgttctgcggcaagaaccaccttcttagcttttcccaaggtggcagtgagagatgcagagggcaagatttggtcactgagtactcctatgtgtaagacacggcctaggcatgtgagataggctatcttactcttcacaataaccctatgaaatattacgaggaagccagtccaaagagatgaaaggatcttccccaaggccacacagccagtatgtaaacttgaatctgggactcttagacctcaaagactttggacgacttcaccccgccactcgattggttgacctgagattaaaaaaaaaaaaaaaaaaaaaggaccaaacctgaattctcctgctggcttgggcaagtgcccaggggttatgtaaagaaaggtcggtctctatccctgggggaaaggaagaggctgatagaatacatgttcaattatgcaaaatggttcaggaatggggcagtctggttaatagttatcgtatttctcatgaatgaattaccatttttaaaggaatcaggatagcacaaaacacatttaacacaaactagactgaacataaatgagtcttactttgataggccaaaggcacttagggactctgggggggtttctaggacaaaattataaagctcactgatgactatgcaatatagaaaaaaattggggttattttagctttggggttgtttgaattctaaattagtgggagcctggtttggttctcattctttacatagaatttctgggcactcagggctaggatctgccgttaggctaaggagtgcctggctttgtggaaagacagtggggttactttgtgagcagagcggggcgaggcagatgccagggctggaatccagatgcaaatgaggtgctgctggcgagctccaaggcactgtaaattgctgaatcagggcccctctggtcctttccattgcctcacctctttttaaggtgggggctccagtccccaagcccacattcctgtacctgctaggcagacacctggataaatgacagccgtgtttccatactgtttcatcaagacgctgggcagtggcaggagctgccggggaggtggtaaactccatgtctctctctgccttgggctgcggacccacgagattgcccttgcccgtagcttgggtgatctttagccattcttagtggcttccactgctccagccatcagggagtcaacagcaggccgctgccctcctctccagggcaagagtcagagctggcaatttgaacattttaaccaaattgtttaaaaaagccttcctcctcacaagccagcgtctcctgctcagcactgtcacaaacaatttggtacataagctaattcctgccaggcaagcccagggcggcagctcccctccccttgactttgctatggaagctgcgttcctgttgcaaattcttgctggtcctcatcaccagatgggaagctaagtgactgctccatcccatgcccccaccccaaagccagttgatgctgagcaccactgaggtcctccctcccctggccttctccctctggctccgtgttggttggctaggttctggcttg

SEQ ID NO: 1244873 - DNA, 4001 bp, Homo sapiens
gaagttcaacctagaatgtatctgatgcttctgatttgctttctagtaacaactttcaaatgacttttaaagagcaatttctctttaaaagtaatgaaatggtggccccagcaaggatttcttagaaggcagagacacttacagattctatcaaacactcagtacaagaaaacatggctcccacaatggcgaaatttttggcataggacattcctctctgccccatgtctttcagcacttcttttgcagtcggtgtacggtaaggatccttagggtcaaagcccacgttggtatcgatgccagcggtaaacaccccaaatgcacctcctaagacaaatcctagaagcaaacacagagatgaaggtgtctttggcatgttttctgcattactctattgggatcatcctggaagggaccatgcttttggatgaccaccggtgcagaggacacccccctcttgccactcaaactctccacttgcctggagacttgcaatccagggtctatgttactgacatcatcttctccgtctctaagatttcttcctcctgtcattccctaacatttctcaagattccatctttaaccctctattctctctacattctctcatatgtaaaccagccaccctcaacttcagctatcaactttgcaaatcactctcttggccactgtgacattcacagtaatgctttactgagcacatgccagtatgccacagcctcattcattcttcacaataatccagtgagacagatgctattagcctctcctttctataaactgaggctcagagaggttaagcaacttctcccaaggccacacagctacctaatggcaaatcccacactgctgccacatctgtccttcctgagccggctggacatgtccagatggatgccctctcatgacctcatggtcaatatgagtttaataaaatcatgggcacctccccttcaacttaagggaaaaacagaaggacaagtgcagacttcgtctctccttgctcggggctgtctagtcacaatggtctttcagtttttcaaacctcaaacaactgctgccctagagtcgtctgcatgtgcatttccatatgtctgcatccttcctctgcagtgttcctgctcaacattcttctccacatagtataatacaggccccatgaagaccaggctcttgtctctttcacctggcacgtgatattgcttaggaacaatttgttgaaagaattatttaagagaatgaatttaagggaatgaacggatgaatgaagtcacccacgtaataactttttgttgttgtttttgagacggagtctcgctctgtcgcccaggctggagagcagtggcacatctcggctcactgcaagctccgcctcctgggttcaagcgattctcctgcctcaacctcccgaatagctgggactacaggcgcccaccaccacgtccagctaattttttgtatttttagtagagacggggtttcaccgtgttagccaggatgtcatgtaataactttcaggccccaaccacagcaccgattctctaacccaattttcatcaggaaagccggcctgagggggcaggagaggtgacgcccgattcacgaacgaggcgagggtgtggtcaaggtcaaggcccgcagtccctcgcctcccaggcgcgtggtcttctcggcagagatccccactgccgtccaggccctcagcctcccaagggtcccatcgcccggcctcacctcccacgcaggccagcgcagccttgaaagcgcagctttccatcgccttctcgatcatcttctgctcctcactcttggctggacttgggatcccgcccaggctcccaggctccaggagccggggctgacgcttgtcacccaccaggtactgcaggagcaggctgtactgcagcggagcttcggcggaacccgctgtctcaggggccgagcctccggcattgggggcggccgccgccatgacagtcgctgcccaagcaaccctcgcgtccttctccccgcagcagattcgacaagcgtcacgttgcgggccctgagactagccactgtgatgcaacggcagattcgccgcaggaggaagccgcggccgcaacgctcctggtgcgcacaccagcgagaccgctatcatgtttccaaaaagaaagcctcttgtgaaaatggaattgggcttggacagctttccccatgtcacagacaaacgagattcagattcaccagaaagcgccctcacggtcggggctgcagcgcggtgagtaccgggatttgtagttctaatccgacacccaactacatttcccaggaagcgttgcgcgtgctctcgcgcctcggccccgcgcggggctcttacgagctcctgaggggagcgaggagtggccgcgcgctccggggctgccgtgctccggatcgccgggaggggacgcgcgagcattgtcgctgccctttccacctcgtgctgtcatcgggcggtgaggcgttaaatcccgtggtcccggaaggtgcggtgagaggtggatgctttgtagataagcgtgaacttgtgctgtaaatgcacggaccgggcgcgggggctcacgcctgtcatccagcactgtgggaggccgaggccggtggatcacgaggtcaggagttcgagaccagtctgacaaacatggtgaaaccccatctctactaaaaattaaaaaaataaaaaataaaaaaattagctgggcatggtggtgcacgcctgtattctcagctacttaggaggctgaagcaggaaaccccgtctctactaaaaatataaaaattagccaggtggcggcaggcgcctgtaatctcagttactcgggaggctgagacaggagaatctcttaaacccgggaggtggaggttgcagtgagccaagatcgcaccatcgcactccagcctgggcgacaagagcaagactccgtctcaaaaaaaaaaaaaaaaaaaaaaaaatcctaactgacagcatttgctgacttgtgtggtgttaatatccccatcatggctgatttcaaactaccaagcgaggtcatcagtcagaattgggaagacgtacagcagcatgtggttacatggtgtttctatcacacagatacaatctatggaaataacctcaacagcatagataggagtacagtgtagtaaaatttttaggaggggatgagttttgagcacatattacctatttttagtgtaatttattataaatgtatagaatgtaatttttaataataactgtgcttaacaaccagctcaaaaactcctgataatttgttgccttactttttaaaattactcttttgagacagagtcttgctctgtcacccaggttggagtgcagtggtgcaatctccgctcactgcaacctgcacctcccgggtttgagcgattctcctgcctcagcctcccgactagctgggattacaggcacatgccaccatgcccggctaatttttgtatttttagtagagacaaggtttcaccatgttggccaggctggtctcaaactcctgacctcaggtgacccacccacctcggcctcccaaagtgcttggattccaggcgtgagtcactgcgcccggccagttagggcctttttgttattgttgttaaacatttaccattataccactgcactgcaagcatattttgggaaccaagaacacttcctcctctttgaggaaaccagaattggggcctggaggcagagaaattgggaatggatttctggtcatatccaggaaaatcctaggggatgttggagagaggttttcagtcccaagaatgctaacactttggcatcattttgtactcctcgtatgaacaaaacgtggcctgggaacacctctgggcatttaagcacactttttgctaatggcctgaaggcagtgccgtagcaagcatctgcctacttgggccagggactctcagaagatgttgatcggaaaagattcctctgctgggcatggtggctcacacct

SEQ ID NO: 1244874 - DNA, 4001 bp, Homo sapiens
cggggtgggggggggggcgggagggggaggggtcccaaggcccaactcctacaaatccaactcccaggtccttttatccacagcctccttctgggccttggctacatcctgccccagcacgtgctggtgagccaaggagcctggacaggcctgcactcctcgtggacccccagagaaaggcccattatggctccctcatcaaaggaacctctccttcacccacaaatcttgctgagcaccaaggctaaactggagaaaagacctcatttcccccaaactgggttttgtggaaactgacacaggcacacaccaagccttccgcccaggtggcctgagccacctgagacctgtgatctcaatagattggtgcaactgaaaacttccccagctgggcacgcagctcctagggctaaccggggtggggcaagaagccgtgggcggggtatgggaagggcgtggctgacagcaggagaaacagaaagtcccacctccactctgggcaggtgagggggcccccgccttgctccatctgccctggacaggtcactcgactgagactcagacataagaaggaaggagggcagggggctccgagaccacctgccgtgtagccagacttgccccaggaaaaccatgctgaccagcaccagggctgcagaggcttgaggtgcaggaccagggtggaaacttcgagccagcgggttcctcccatttctgctggtcctccccctccatggatcagaacaaataactgggcccctcctgcctccctccatggcgcctgtcttttgggggctaggagtccggaggtcatgggtatttgctggggaatctgagcagcagcacagtcccacgtgccgggtccggtcaccaaagtctccagcttttgtggacgtcccgaaaaagcggaacattcgggggtcccggtccctgcccagccagtttgcagggcctcctgggcagggcgcaagcaaggagccacgccaggagacgccaccggctttttcacctgcccctctgggcctgtggaacctgcctcgggtagggcgggcttccatcccaccctggcttgatcggggagcccccaaatggggctggtgggagaagccccagcagagaagcccttccccacccagccccaagcccagagaagcccaactcccaccttatctgcgaaagtttcttcctggggtccccagtcctccagccccccgcccccacgccgtgtcccccacgctccccgcccccagcgctggcatcccagggcgcgccgcctgccaaaagccaaactggctccctttcctggggctggagctgcggcggaatttcggtggaattttgaggttgagacgcatctcggcaaagagagggaaagaaagggagaggagggaggggggaaagaaagtcggctctgggcgtccacttgcaggattcgagaaggcgccgagggaccaggaggcgggcgctggggtccctcggccagcggcgggcgggcggggcgtctgcgaaccctcggggtcgcgggggaggtggggccccgcgcgggggctggggtcgccgctccttacctacatctgcattgcaaaacgcctgttgcgggtgcaccggggagcagctgcaggcgtcggccgggcgaagcagcgtcgccagcagcaggaggccgagcgccagccgcagggtgcgggccgcggcgcccatggcgggccggggggctgggcgggcgggggccgccgctggggggtccgggcgctgctcgcggcggcgggctgggggcgcgggcgggggctgagccggggccgaggcgggcccctcccgcgcggctcaccctcctcacctgccccgctcggccgcgcaaactttctctcctctttgtctcgggggcgcgaggggaggggcgcggggcgcaattcgccgggcggggcggcggggtggggggcggcgggcgagcggcgctgcggttctcggcggccgcgctgccttctacggatgtgtttgctgcgggcttgggccgggccgcagttttattgcgctcggaggattttctgctcctcctcccggtggctggcggccaatgcaggctctgggcgctcccagcagccccctcctccccctccgcccgcgcctccccccagcccgcgcttttgttgtgcccggcctggcacgtcgggggcttcccgcaccacctggcgcccgcgacccgcacccgcgcgggggtccccggacgcccccagccccccgaccccggtccccgctgcgtggccttctgcgcccggggtccctgactcagcgcgggggactcgcgccccgttcttccaggacaccaggcgacccacccgctaccctttccccttcagctcgactctggagggctacgctgctccgtcccccgccaccccggggtcccttcgagcccagcctcggggcgagccaaggggtgtcctttggagcaggggccgttccctgtcgccacctccccgtttctgtgggcgggtggcctattgagaaactgacaggatccctttttcaaatggaggccttagaattttaagtgcgcctggccagtttagttggggggtggggggtgtggttactgtgaacaaaacaggattttatataaactggccatatttttgaccagccaacaagagacgggggtgggcccaggcgcccaggagccagtaggatcgcagcagaggcattggctgggttccgctcacagtttcctctcttagtccacaaatgtgggagccgaaggacttttcccaaaacagttttgtgttccaggaaagacccaggcatatgaagggatgaacatgtgtagggtggtgaggcgggcttcctggctgtgaacctgcctgtgcccggctgtgggcacccaccctgtacatttggtgtgtgccccgtggggctccatggacactgctgcactcaggtcagcactccagccctcaggtcagcattccagagtgtttgcagtccagctagggagagggaagcccaggaaaatgacacaggaagaatcagggcgggcacggtggcttgcgcctgtaatcccagcactttgggaggccgagacaggaggatcacttgaggccaggagtttgagaccagcctggctagcatttagtagagacagtgaaaccccgtctctactaaaaatacaaaaaattagccgggcttggtggtgggcgcctgtagtcccagctactcgggaggctgaggcaggagaatggcatgaacccaggaggcggagcttgcagtgagccgagatcatgccactgcactccagcctgggggacagagcgagactccatctcaaaagaaaaaaaaaaaaaaaaaaagcccgggtgcagtggctcatgcctgtaatcccagcactttgggaggctgaggtgggcgaatcacgaggtcaggagttcgagaccagcctggcggctaacacggtgaaaccccgtctctattaaaaacacaagaaattagccgggcgtggtggcgcgcgcctgtagtcccagctactcaggaggctgaggcaggagaatcgcttgaacccgagaggcggaggttgcagtgagccgagattgcgccactgcactccagcctgggcgacagagaaagactcttgtttttttttgttttttttttttttttttttaaaaagaattgcccactaaattgtgcggtgctgacttgaggtatgaaactttggaaaatagtgaaagaatggaaaaacagcttctttctgtttgtgtatgttttgtaacagacagttctgagaaaagttaaataagcaatgccgttatttttagcaccctgacaaatccaaagtcacttttttggtttttgttagcgtgaaatagagttgggtcgttcacaaaatgatgtttgaagctaacgtttaaaagtacagttaattcagaaaattgttatgtgctggctgccttcagccatttcatcgttttctttccttctttttggttacagggggaacaaaatgctgttga

SEQ ID NO: 1244875 - DNA, 4001 bp, Homo sapiens
aggagtgggagaaggagacccctccccaacaagcctggctcctcattgtccctagtggtatgcagactgagcccaccacagccagaaaagagcagggcagagcaggcagggtataatatccctacaaagagggttggaagtcagaattctctatggggaagaggtccaggaatggtactcaggtggtcccaggaagtgtgggaggagtaaccttctccaagatgtagtggggaaggcagaagcaaaggctacatgtagagggaacctgcgactgcattccaaagtaacctcatcccagagttgttcccagagttcagagtttttctttctttctttttggggtggagtctcgctctgttgcctaggttagagtgcagtggagcgatctcagctcactgcaacccctgccttccgggttcaagagattctcctgcctcaacctcccgagtagctgggattacaggaggctgccaccatgcccagataatttttggttttttttttcagtagagatggggttttaccacgttgaccagggtggtctcaaactcctaacctcaagtgatcaacgcacctcagccttccaaagcgctgggattaaaggcgtgggccaccacacctggcatacagcttttctaaattaatttcagaaagtctttgtgtgcagcgtcaaaagcacttgcttctgggtccaagaagtccaactctgagccacatcttcctgagcaaggggtttgagctgaagtgatccccagggccataaaagaatgttggggcagggcatggtggctaacatctgtaatcccagcactttgggatgctgaagtaggaggattgcttgagaccaggagttcaagaccagcttgggcaacatagcaagaccccagctctataaaaataaaataaaattagctgggtggaggcgggggggtgcacgcctgtagtcccagctacttgggaggctgaggtgagagaattgcttgagcccaggagtttgagaccagcctgggcaacatagcaagatcctacctctagaagaacaaaaacaaaacaaaaagaatggtgcgtgggtagtttactcaagaaactcactagccccacccgggtcagggaatggttctatcacctcaggagagcagaggctccacggcttcagactccttggtttagaaagcgactacgtttccttggccttagaaggaaacagccacattgaataggggtgtacaaaaaggcctggcctacaggggacacaactggttgccaccttctcagaggacttggtggggaagacagctaagctgtaagcagctgtcaccagctccaggagggagtggcgtccacacaggacgaggggcttggcctgggcagaagagggcagagacttcctcctggactgaattcaagggaggagcaccccaggcgggagctgtaggaggctgtgctggtccttctaggggaagggaaggggagggaagggaaggggaggggaggggaggggagggaaggggaggggagggacgggacaaggggtccccggagaagaggaaggagctccaccccagccccgcgaagccattacctttttcctgagaacatcggcccgagaatcacctaggagagaaggtgaggtcatttgagggcccgccctgcgcggatgcctggacacaggctatcaccacgaccacctcatccccagccacgcgcagggctggcccccgcacctggatctgcccccgggtcttgctgggggagccaggcagcacagtgggcaggttaatgcagctcattgcgcctccgggaagttcacgaacccgagtactctccaaggccgtcccgcagtaagcccctggttcccgcgccgaccgctttaaaccacggcgtgctggccaatcacgagccggccccgccgccatggggccaatcagcgcccggccgctgacctggcgggagatttggccgcagcccgccccctcgtgggaggaatccgggacgtgcgcccagggactgggagggcctggaaatcagggcgatggacgtggctgatcggggtggggcctggtctgagccccgcctcggtccgcccaccaagtttaaaggggcggagcgaggcggggctctggccatataaacagagggacgcacgcccatgcggctgtagacgccatgatggatgtgtctggtgtgggtttcccaagcaaggttccttggaagaagatgtctgcagaggtaggtggattgcagggagggactaaggggctggggcggagttagctcatttattagattggaattccaagaaggaagcttagaagccgtctagagcactcctgtgggcatgcagagcgcctagtgcgtgccaggtccccagtgcttgagcaccatggtgtattttaccttctcctaaggatttttgttaacctggttttcaggataaagaaaattgaagtcctgactatgctaataatatccgtagaccctgccaggcgtggcggctcacacctgtaatcctagcacttttggcggatcacgaggtcaggagttcgagaccagcctggccaacatggtgaaaccccgtttctactaaaaatacaaaaattagccgggcgtggtgatgtacctctgtaatcccagctactggggaggctgagacaggagaatcgcttgaacccaggaggtggaggttgcagtgagccgagatcatgccatttgtactccagcctggaaggctgggcgatagaccaagacttagtctcaaaaaaaaaaaaaaaaaaaaaaaaaaaaatccatagacccgcaggaggttaggggacaaagttctggaccttgatctgaggttacacaatgtttttgggtctgtgcttatgtggcacaggctgaaggattcagaacagctggtatttacattggggttgtgaaggttagaaacatacaggccgggtgcggtggctcaaaaaaaaaaagaaagaaagaaaagaaacccattgtataatcatgatcataaataatagcaacaaagatggtggtagtgatcacagagtgtgccaggtgtggctgtaaggatcctacaggtaataacctttccaggtacagattggacagatccaaggacctctgacaaagagctccttcactgggaggaagaagcaacccacactgactggcttgctttattttactcgcatgctttatctcttttaaccttgtgatttggatacatgccttctttttttgagacacagtctcgctcagtcacccaggctggagtgcagtggcatgatctcggctcactgcaacctctacctcccgggttcaagtgattctcctgcctcagcctcccgagtggctgggattacaggcacactgtagctggtactacatgcctggctaattttttttttttttcttttgagacagagtctcgctctatcgcccaggctggagtgcagtggcgcgatctgggctcactgcaacctcttcttccagggttcacgccattctccggcctcagcctcctgagtagctgggactacatgcgcccgcaaccatgcccggctaatttttttgtatttttagtagagatggggtttcactgtgttagccaggatggtctccaactcctgacctcatgatccgccccccttggcctcccaaagtgctgggtttacaggcatgagccactgcgcctggccaatttttgtatttttaatagagatggggtttcgccatgttggacagactggtcttgaactcctggcctcaagtgatccacccgcctcggcctcccaaagtgctgagattacaggtgtgagccactgtgccgggcctggatagataccttctaccagtcaggaaactgaatctcagagactaagtaacttgttgaggataaaacagtaagtaagtgagggaggtcagatggcatttgacctcaggccttgccatgaggctgccctgacttcccatttctcatgatggttttgagccctttcttcaaaatc

SEQ ID NO: 1244876 - DNA, 4001 bp, Homo sapiens
gcagacgctttcctggaagtttggggggtgtggctatcagattgagggctggaaaatcccaaatttccccctggaataatagtttatagtgggtaagatgctttgttttgttagttcaacattactagattttgattgctgctcacagctggctgtgggtgatgttcagtctaaagaggcagtgaaaccatgggttgctggcctcagtgaacaagtacagactgccaacctccagcatcctagcataagaagtagcacacaggtcgggggtgggtggtaagaaaacacggccttctcccagattcagaaagacggagctgagactagattactgacaccaggcctataccacatagtctgcttctctcttaccatgacgtgatggacaaggtattcccaagaggctcgcgtctgtccgctagccacgatgtccaccgtatcgtggatgaaataccctagtggagggatggggcaagagatcatgaactgaacaagcagcttccttctccctgtccccaatttgcctcccgcttcctgggcaagacctacccgcagagaagcaaacgagcaaatagccagaaagtgaccacgccgtctcaatctccactaacatgtcaggagtctgccatacactggaaaggagggaagaggaggctctgcatttcggcaccctcaaggaccatcaacttctcggttacccttcgcagccccgggggatcctgggctcgcgctagtggctgactgggaagctaagagtggctgggcaaaacccaagagcctccagtttcccaggggcgatccccctcccctggggccactgcggcttttggttggataggataccaaacgggatcaggtgagactgcgtggcctcagcccgccagtgagcgatgggggtagtaacacaagagccggccccggctccccgctcaggatcccctggccacctcatttccacagtcgctcactcaccacagcagtgcccagatccccgacacaatggagtgagcgaaggagacgagcaggttgtgccagcgccaggtgcgcagggggtcggcgcgcacgtgcacgggtaggggcaggcgacagagcgcgcgccggagcgcccggaaggtcagcgtggcgcccaggagcagcggcagggcggggtgcagcagtcggggcatgctggccctccctgccgtccgccctcgaggccgcctcctaggtctgttctgggaaccgggatccctctcgggccagtccaggccggccgcctctcccgccggccgccagccccacacagttggcgaagccctctaggccccttggctcctcctcgccctccctgcgaggcctctgcccccgcccccagccgcccgcgcccccgccccgcccgcctgcccccgccccgtccgcctgcccccgcccctcaggcgctgctgccgcgcgagccgggtgtccccgtggcctctcggccaccggccggctcccgcggacttcgggtaactaggagctgtgctgggggcgtcgtcgccgagacacccctcgctggcgcctcccgactgccgacggagtccccgctgccctcgctcgcctggcctcattaacccgcgtccccacttttccccgggccaccggctaccccgccctgggcgggtaccgcgagagctctctccgccctctactttctgcgcagagctggacgggacccgacacgcccacgccccctaagtcctggtcctggggtgggctccggagccccgcgtccgacagtggtctccgtgcagacccagtgcccctaccgcaccactcgcagtcttctggccggagtcccgtgtttacctgtccctcccgcgcccgcgaggtgggcacttgggaactgctgagtaacccatcgccacctcttcccgccggctcttaaactcctggggccgggcggctgtcacagtcctccctcagacagtcccggccctcggcccggctccccggaggctgggcaagcaagacctccgatttgccgggacagctggagtgacccgcgctctccaagccggtagcttgcagcagttgcggctcctagccactaggtgtcagcctgccctcactgtggcgcgggctccccctcccgcctccgagcgaggcagctgctttcggggagagtttaggtataaactctgggcgaaaggaggagcagctgagagccagcgagggaagttaagcggagatgagagcggggagggagaagagggtagtaatagaggaggggcgggaagaagcgggggaggggaaaggtgctgcgggcgggaggaagaagccgagaaaacctgaggcgcaaggacccagggaccaagccgtttgagtgttttcctcccctatggctccaaggttacacattaacccctgtgggactcttaagtcaaccaaagcccagtcggtttctaggtgagaacacgggtgtcctgggtgagcggctttcccgcccctccccttggctcacagagctgctctgtccgccggccgacaccggcctgagccagcgcccttccagcagtcattccacgtgggtgggtttggatacccttgcgagagccaggacaggggcagaagataaaacgcccctttcctcacaccccttgcccactctgatacagggacgctaaccttcagctagtgaccatcctcctcctgaatactgatgttttctttctttctttttttttttttgagatggaggctcactctatcgcccaggctggagtgcaatggcacgatctcggctcactgcaacctccgcctcccagattcaagcgattctcctgcctcagcctcccgagtagctgggattacaagcgcgcgccaccgtgcccaactaatttttgtatttttagtagagacgaggttttaccatgttggccaggttggtctcaaactcctgacctcaggtgatccgcccgcctcggcctccccaaagtgctggaattacaggcgtgagccaccgcgcctggccgaatactgagtttttctagagctcccgcagagcaggagcccgggagaacctggaattaacctcacttccggtaaagagcctagctggtcacactaaccagccccctgcctctaggcttttgccttgagctcatttcggcgaaaccgcggtctttccttctccccttgatgctttcaggtactgacccactaccgcccccatcttcccccatgggaagatgagcactgagggcagattaccctcctgcagcgcgtgtgtgaaaggggagttgagagtgctgacgagcgcggcgctcactagtcgggacggcccgagaccgtgtcatgtcctcttcaggtgaatcaacttgcacgacttgggatttcccccgtccctccccaggcaaacacgaaaccaaccctgctgccttctcccaggagcgctggtctcggtcgttttgggtgtgtttatcgtttgcgtgccaaggagaacccgctttctcctgaaatagcgtcactcgtgggcaagaagggggtcaatcttctcttcccaccccttcccggcctgtggggtttaactctcgggaacgcgacatccttttagtctagcaagctttacaagggctgggtatatgtgtgggaggggcgggtaccgtgcccgccattgcgggcgcgccctattttcttgccctattcttggacactgcgtggggcagggtcgtgaggggaaaagtgacggcgtgtcgcagcgggaggtgtgtggtgcaggcccacaaatacggacgcgtggcggaacccacacctagggcgctggctccgccccgcaagccgctcgccgtgaaggggcggggcccagagtgggtgggtccgcgcacgcgccgcgtgggggacggaagtgaaactctaagaaatgagatggagaagtacgagcggatccgagtggtggggagaggtgccttcgggtgagccagggctctgggggaggaaactgctaggggatagggaaaataagccccaattccgcccgcgaagtc

SEQ ID NO: 1244877 - DNA, 4001 bp, Homo sapiens
aagggtgttagcatccatttcaggggagtgtggattggctggctctctggtagcattttgtcctcacacacccatctactatgtccaaccggtctgtctgcttccctcaccccttgcccaataaaggacaaggacttcagaggagtactttcattagtgttttcaatagtgtgggcgcaggctcagaaggtggagaggctggcctcagaggacacccaggcttggggctaagtcccagtgtccatatgaagctgtttctggccttgtccgtttttgttgtcccaggctctgtgcccctcactcagtcaagaacttgtctttgtgttgcttcttggggacatgctcagggcagaagtcagagcggaggaggcgggaaaagtagattatgatcatcacgtccagcatgagcaggatacccagcaggaaggtgcccagggtcctctggttcacataacgcaagaagaaatgggtgaggtaggcctgaggggccaggcggaagagaaagtacatgaccaggttcacatacttgttaacccggtagaggagatgatcctgggcattactgattttcatcatcatgcgaatggtgaggaagatgttgctgacttccaccagtagtgttaagacacccccaccgacaaagctgctccaaaagatgccggagaagaaggcacccatggcctagagggaagaaagaataggagttagggaacccagatgcagacgctttcctggaagtttggggggtgtggctatcagattgagggctggaaaatcccaaatttccccctggaataatagtttatagtgggtaagatgctttgttttgttagttcaacattactagattttgattgctgctcacagctggctgtgggtgatgttcagtctaaagaggcagtgaaaccatgggttgctggcctcagtgaacaagtacagactgccaacctccagcatcctagcataagaagtagcacacaggtcgggggtgggtggtaagaaaacacggccttctcccagattcagaaagacggagctgagactagattactgacaccaggcctataccacatagtctgcttctctcttaccatgacgtgatggacaaggtattcccaagaggctcgcgtctgtccgctagccacgatgtccaccgtatcgtggatgaaataccctagtggagggatggggcaagagatcatgaactgaacaagcagcttccttctccctgtccccaatttgcctcccgcttcctgggcaagacctacccgcagagaagcaaacgagcaaatagccagaaagtgaccacgccgtctcaatctccactaacatgtcaggagtctgccatacactggaaaggagggaagaggaggctctgcatttcggcaccctcaaggaccatcaacttctcggttacccttcgcagccccgggggatcctgggctcgcgctagtggctgactgggaagctaagagtggctgggcaaaacccaagagcctccagtttcccaggggcgatccccctcccctggggccactgcggcttttggttggataggataccaaacgggatcaggtgagactgcgtggcctcagcccgccagtgagcgatgggggtagtaacacaagagccggccccggctccccgctcaggatcccctggccacctcatttccacagtcgctcactcaccacagcagtgcccagatccccgacacaatggagtgagcgaaggagacgagcaggttgtgccagcgccaggtgcgcagggggtcggcgcgcacgtgcacgggtaggggcaggcgacagagcgcgcgccggagcgcccggaaggtcagcgtggcgcccaggagcagcggcagggcggggtgcagcagtcggggcatgctggccctccctgccgtccgccctcgaggccgcctcctaggtctgttctgggaaccgggatccctctcgggccagtccaggccggccgcctctcccgccggccgccagccccacacagttggcgaagccctctaggccccttggctcctcctcgccctccctgcgaggcctctgcccccgcccccagccgcccgcgcccccgccccgcccgcctgcccccgccccgtccgcctgcccccgcccctcaggcgctgctgccgcgcgagccgggtgtccccgtggcctctcggccaccggccggctcccgcggacttcgggtaactaggagctgtgctgggggcgtcgtcgccgagacacccctcgctggcgcctcccgactgccgacggagtccccgctgccctcgctcgcctggcctcattaacccgcgtccccacttttccccgggccaccggctaccccgccctgggcgggtaccgcgagagctctctccgccctctactttctgcgcagagctggacgggacccgacacgcccacgccccctaagtcctggtcctggggtgggctccggagccccgcgtccgacagtggtctccgtgcagacccagtgcccctaccgcaccactcgcagtcttctggccggagtcccgtgtttacctgtccctcccgcgcccgcgaggtgggcacttgggaactgctgagtaacccatcgccacctcttcccgccggctcttaaactcctggggccgggcggctgtcacagtcctccctcagacagtcccggccctcggcccggctccccggaggctgggcaagcaagacctccgatttgccgggacagctggagtgacccgcgctctccaagccggtagcttgcagcagttgcggctcctagccactaggtgtcagcctgccctcactgtggcgcgggctccccctcccgcctccgagcgaggcagctgctttcggggagagtttaggtataaactctgggcgaaaggaggagcagctgagagccagcgagggaagttaagcggagatgagagcggggagggagaagagggtagtaatagaggaggggcgggaagaagcgggggaggggaaaggtgctgcgggcgggaggaagaagccgagaaaacctgaggcgcaaggacccagggaccaagccgtttgagtgttttcctcccctatggctccaaggttacacattaacccctgtgggactcttaagtcaaccaaagcccagtcggtttctaggtgagaacacgggtgtcctgggtgagcggctttcccgcccctccccttggctcacagagctgctctgtccgccggccgacaccggcctgagccagcgcccttccagcagtcattccacgtgggtgggtttggatacccttgcgagagccaggacaggggcagaagataaaacgcccctttcctcacaccccttgcccactctgatacagggacgctaaccttcagctagtgaccatcctcctcctgaatactgatgttttctttctttctttttttttttttgagatggaggctcactctatcgcccaggctggagtgcaatggcacgatctcggctcactgcaacctccgcctcccagattcaagcgattctcctgcctcagcctcccgagtagctgggattacaagcgcgcgccaccgtgcccaactaatttttgtatttttagtagagacgaggttttaccatgttggccaggttggtctcaaactcctgacctcaggtgatccgcccgcctcggcctccccaaagtgctggaattacaggcgtgagccaccgcgcctggccgaatactgagtttttctagagctcccgcagagcaggagcccgggagaacctggaattaacctcacttccggtaaagagcctagctggtcacactaaccagccccctgcctctaggcttttgccttgagctcatttcggcgaaaccgcggtctttccttctccccttgatgctttcaggtactgacccactaccgcccccatcttcccccatgggaagatgagcactgagggcagattaccctcctgcagcgcgtgtgtgaaaggggagttgagagtgctgacgagcgcggcgc

SEQ ID NO: 1244878 - DNA, 4001 bp, Homo sapiens
ccctgagcagccttgaaacaacccttccatagatggaaccaggcttggcccagggaggggctgtctcaccccctaatacccccttaacctcccattcctgggcttgcttgctttttttttttttttttttttttttcgagacagactctcactctgccaccaggctggagtgcagtggtgtgatcttggctcactgcaacctctgcctcctgggttcaagcaattctcctgcctcagcttccagagtagctgggactaccggtgcgcgccaccacacccaggtaatttttgtatttttagtagagacggggtttcactgttagtcaggatggtctcgatctcctgacctcgtgatccacccgcctcggcctcccagtgtgctgggattataggcataagccaccgtgcctggcctagggctttcatgccccatacccacaccctataccaggacacccccttctcagaaaagctccatattccacatttctgtgatcagctggacacctgtgggggcacccaaactccttaggctcacatggtgggtgccctggcatggtgggtgcccttgtatggtgagtgccctggcatggtaggtgccctggcctggtgggtatctggactccccagctgtggccagcagccacctcctccccctaactcagcctaagactgggagccaagcaccagctgggggcagagactgtgggaaattataggacagcaaaatgaagagagggccgggggcggtggctcatgcttgtaatcccagcactttggaaggctgaagtgggcggatcacctgaggtcagaagttcgagaccagcctggccaacatggagaaaccccgtctttactaaaaatacaaaaaattacttgggcgtggtggcgggtgcctgtaatcccagctacgtgggaggctgaggcaggagaattgcttgaacccaggaggcgaaggttgcagtgaacagaggccgaaccactggaccccagcctgggtgacagagtgagactccgtctcaaaaaaaaaaaaaaaaaaaaaaaaaaagaatgaggagagactgggaacctcgggctggacagggctcccctcctcccttcctgtctggcttctgccctcagagtctcaccaccaaatgatgacagagaagatcccaggtcttgcccaaggtctggttccacagcaggtcagctccgtctgccaggaagtaacctgtgggcatgggggtaggggttaggctgctccagagcccgggcagcttagagaggatttccagcccccccgccccgcccctctcccagttcttagttttcccttggtaaagccttcaggaacgtttaacccccatgggggcggggaatggacctggaaggacagcagaacctgccccccgccccatccccaccaccggcccagccttccctgcagactcacccacagacacagccaccagcaccagagcccagcgcgggtggccatggatggggtcggcggccatctgagggtacagtgacaggctgggggcatggggtggggacatgggggggggcatggtcagcctctcgaggccccggccgcagtctccctgtgcgcacccccaccccagtctcagctctggagacgcccggcgggtctcccggcctcagcctcccacccctcgccctcgccccgtgcgcctcgagcccccaagcccgcacccgagcagcgccccggtccccgagagcaggctgtgcgccagggagacgcagaggttccaccactgccagcggtcccgagcggccgattccggcgtgggcagccgccgcaacccccagtgcagcccccggaacgcgaggaaggaggcgccggccaccaggagccccgtgggcgccatggcctggcggttggggggttgcggggagtccgggtcggtcccctcggcgcccgcgctctcggccgggactgggaacccgtttcccggcagggctggggccccggctcccctccccgccgcgcctttgggatcagcaggaacttttccccgttcgtccacgcccagtccctcgcctgggcggtgattggagcagccgcggggccgccgcccccggagccttggccaccgattgcgtcttgctccagccgggggagcggttcgggggctccgggcagtagaccatgccctggagctcggggggcctccgggatgttcgccaataggggtcctccccagctccaagcgtcctgaagcgctggagttgcagacctgggtctccagtctaacctcaactgacactcccgggccccacccacgaaccttgacctcttcccggctcccgcgactttcacctgctgagcgtcatcaccacccaccgccacaccctgcaaggcagaggctagcgcagcccactcgtacctgcccgagcctggccgccgcccccacttccctccccgcgtccgtggtggggacggggtgccccactttcttggagccaccccttcggcctcctgaggtttccacgcctttaccatatcccggcaaacctgtaattccagcagttctgctccccctcccccacaacccccaggagaccccatgttggagaagcgacccactgggccccgccccgacccccagcattgttttcggccctacggaggagcctcattaggaagaggacgcaaaagggaatcgctggcccccagtcttgaaaagcacttccttccccaagggcttggtacccgttgggtgggtagaatatcttcaatccgagggcaaggaaaggtaacacagggtcccttcaaggctgggacagagtcagaagagaaaaacagacctgtcctgctcttagtagcagggcggttaggattccagaaccctccagccttaagaggaagagcctcccccagcccctcaccacctgaagagccccaggttgcactgctttccttccaccttactccactccacctcttcagctggcagacagtcagcaagtcagagctgtttcctgcaggctgagagggaggattccagctacttcaaagaattaagttcataaaccaagaggtgccccaaccaaaccttctcaccaaaaagctgaggtcttcccttcattcttctacccccacctctccaaaggtttaaataataacactgatctcttaaattatattatatgaaatacaaaatgtggaaaatttggaaattacagaaaaaccaaagatgaaaattacagtgactttgttccaccatacaaagataaccactcaacattttttagtatgccttccgtcttttttatctgctctacgtatacaagcatacacccatattttaaaaaacaaaattgaaatcacataacatgcactatttttacaaccttttaatattcaaggagcatttttctttcagtcagatgttcttttacatgacttttaatgtctgcgcggtactccaccatctggatggagatacaataatttacttaagcaatcccctattgcaaactttcgttacagcagaaaaggaataaattcccaaccaaaccattgcttcccatttttctccattgcaatgctgggatgaacatcttatcactaactaaatccttaagtattttcttaggataaattcccaaagatagaattcgtaggtcaaatgacatggaggcttttaggccacatgacacatatcacccaactgtcatccaggaagcctgcaccgatgtatactcccacacgcaatgtatgggaatgttttttcagtagtctctttgccaatattgggtcttatttttttctgttatggtttgctaagggaaaaatgcttccagctctatttgcctttctttaattactaatgaagcatactttttttcatggttttatccattcagatttcttttatgaatttcctgtgtgtgtcctttcgcagatggttcttggtccttgaggctgcttatataaacattacaggctgggcggaggtggaagtagggcggtgaagccacagggcaccgca

SEQ ID NO: 1244879 - DNA, 4001 bp, Homo sapiens
agatcaaatgcaggtaaatctcaagtaaatatagcatacaagtggtagactactatgtgctgcatcaaacagtaatatattgaaaagttttaaagcagctcagaagtcctcttctatgacagccactttttcttccctagttctgatttgattttaacagcaaaaataaacccctcaaacccttcatataatttctgtaaaagttgagcacaggggaaagaacaaaacaagaactagcctgcaaaaagaaaattccttctatcagccttaatctagctaagtatcttcagatatttatttcccactcaggaagtagtccttaaactaaaaatatgaatcattgacaataatttcaaaagaatataggatgaatcagaagctacaaataactgcaaaatcactattatacagctcctgtctctgaagagctcacagtagctcatgagaaaaggaattattttaaatttaatagagagcccacggtaaaaccatccacctccattcactcagtaaattaatatagctccataacaatccctttaaaaaatctttttctgaccactccctgcagtagttttctcttgattctggacatctgcttttagcccttcttccaagcagggaggggcaggaggacaccatttttaaacttccataaccaattaatgcacaggctactttcagcaaatatgttcatcctttgcaagagaccaactcctacacgacccatttaaaacctctctttaatattaacagtggaaaagaaacatattacatagaaccccttcgaacacattattaagtagttggaatggttggtgtgattttaaagttactgaaaagatgaatcgaacattctcctctgcaatccaacaactctacaatctccagtaacaacccccttacaagtccttcagtttcatttcccttcctggattgagagcctggggcaaaggggaatgaaaaggtgacaaattaaagtttcacccacacatgcaagtgcaggttagagagagaattaggaaattctcagaaaggttgaaatgcatctttacaaaaagaaaaagaaggaaaaaaaagagactgggagaatgagtttcccccgtggccttcctcgcgtcttgccctgccctaatcgaggtcggaatggcaaaggttgcagtctctcccaaaccccaaggtctctcgcaacacttcccaaacctccatccccaggcccggcccggaaaatgacgccccggcggttattccgtttaatgtcaactcatgttaaggaaatagccactccgtctaattccagcggggccttggactgggatcctccctgcagcccacagccgggaagcaggagcgatggggcctggtcccggcgcccctcgccggctccaaactttccccaactccaggcccacctgtcacggaggaagggagggccggctctcgggggcgcccgggaggctgccgaggcctccagctgcctgggggcccccgtctctcctccggccgccggccccaatcccaggccggggccgcctgggcctcccccatcttctgcccggcccctcagcgacccgcagccctcagggagcccctcccgcctcagcgcccaggagctgcggtccggagccggccccgagctgggcccaggtcgcaggctcctcaggccaaaggggtccccaggacggttaatgccccaggcctggagtcctcccccgcccggggctcagcctctcacctgccgccgccgccgccgccgctccacgctcctcccgggaggggccccgacccgacccggctgcggaccgctccgctctccccctgggcaggcccggggcggagccggggcctctcctgagcgccgcaaccccccgcccgggcagccgccgccggcgccgggctccacgagagggcgggcgggggagggggggcacgaaggccgcagatccccgggctcgcgtacagagccaggcgcccgacgcgggcccgggcccgggcggccgcggggggcgcgggaccggcctcctggcgccggacaaaggccaagggaggcgcaggagggcccaggccgggccaggaggtgggggcccgctcggctgggggccactcgggtgcggcgcggagggcgggggggtcggaaccgctggtgcccaggacccgcctccggccccttaatccggatcggttcggtccggattagtagtgatcggtgtaaacacactagtgaaaccgcgtgtttcctcgcgagatttgcacggctgggaggcggggggggtcctgggggggtgggggaagcgccgacagtgggggagcagggggaggggacgaggaaggtgggggggggtccccgctgccccggcgccccgccttctccaatcagcggccgcgctgccgggcaggggttaaccaggggaccccgcgccggcggaggaagccgcgcctcgccggacggctgagggcgggcgacgggcggcgccggctgacgggccgcaacgcgaggggaggtccggcggcccggggcgccctgcgactgcccgaggccggaggcccggaggacccgccgccgcctttgtgtcgccggcccccgccccgctggactggcccgggccggggcggttgggccggcgctgaaggggcttggccgcccgggtccacccgttcccggatccgcctcgccggcccccgcgcccgcccaacccctgcccagcccctcggctccgcgagtttgggtgagaagtgcggcggcttttcccagggatggagtttagaggacgctaatcctatgtgtgagcggcggaccccgcccggacttcccggaggcgcccggttagtgaggcgacggcgcccacccgcgttcgcgggctcccggccgccactccccggagccgccggcccgccccagccccgcgcgtcgcccgggagggcgggctgcactccctccacgtacctggctggcagagcgtctccagggacaaaaggtgccctgggatcaaagccgagcccccgcccccgcggggatgctgccctccggaaggaggggcgctgcccccaaggtactctccccgggcacccagggggaggttccatttcaacctccgatgaaaaacacggccctcccgggtacttaggagggtctgagggtaagtgccaagatggagaaaacacgccggcccctcacagagtatctcctgaggaatgagaactatctagcgggcaaggagggcttcctgcatagcagagggcaccccctctgatcccccaaggccaagggaaaaaaatcactcttcaccggcgcccctgagccaggacaggctccagtgcagccacccaccttataattttccgcggatgctgccttgatcagatgtctgaagatgactttaaggactacaagcaaatctcaagggaaaaattcagaccttgaacaacagccttgaactttttcagggttagacaagtactccccagtggagtttctgcccttatttcttcgttcttctcttaattcttccatattttaacagaacacagacctgccgaaacgacacaggatggctctttgctttttgttagttctccaaccttccaaacccttggggcacatgcaagcactgtggaaaaacttcattaaaccaagagtcatcttactccagatcccagactgcttgggaagttggacatgcatattcccaaagagaacagtgttggaagaagacaggagagcagctcgcgggttgggggtagagggtaggaaaagagggcaagatggaggactaccactcgaggccagcctccactgcctgttagggcggtagaacctaagagccggtccaaggcaacacaaaagacagtgaggctaggtctttaattgcagccaacgatcaagaaagcaactccatcaaatgacactgtctttttaaaaaaaattttttttttttgagacagagtctcgctctgtcgcccaggctggagtgcagtggtgcgatcttggctcactgcaacct

SEQ ID NO: 1244880 - DNA, 4001 bp, Homo sapiens
tagagatcaatttagtattcaaatatattgctcacttctatttgaagctacttcacctagatcagagagtttacatttgtaaatgtaacttcagtatacaacgtccaggggcacagccactctaaagtgccacaaaagtaaactgtttaagtggccaaagaaattaagaatatgtaacaaatcctgtgttcccacagcaccttgtcacagctctaatacagatctcatcacggtatcatctctctctccccatactgcagatgtggaggtactgtgctcaagcatcagccctaacaccttgcacaatgcctagcatacagcaggtgctcaatatttgttgaataaacaaaaactatcaagctggttgggcgtggtggctcatgcctgtaatcctagcactttggaacaccaagacaggcagatcactggaggtcaggagttcgagacccagcctggccaacatggagaaaccctgtctctactaaaaataaaaaaaattaaccaggcatggtggtgcatgcctgtaatcccagctactcaggatgctgaggcaagagaatcgcttgaacccaggaggcagaggttgcagtgagcccagattgtgccactgcactccagcctgggtgacagagcaaggctctgactcaaaaaaaaaaaaaacaaaaccctatcaagctatcccggctcaccaaaactgtgagacccatcaaagaagcccatttttccaactaaacctcaacacgccttctccttggagaagctactaactaaagcacgagatcaacacccaggttaccatgagacaggatttcttgaaaagcacagaaacaaatgttgtatcacactggttaaagatcaaaagctcagccaggcacagtggctcctgcctgtgatcccagcactttgggaggctgaggcaggtggatcacctgaggtcaggagttcgagaccagcctggccaacatggtgaaaccccatctctactaaaaatacaaaaatcagctgggcgtggtggcgggcacctgtaatcccagctactcaggaggctgaggcaggagaatcatcacctgaacccaggaggtggaggctgcagtgagccgagatcacgccattgcactccagcctcggcgacaagaggaaaactctgtctcaaaaaaaaaaattcagtagctcatacgttcacacatctcaagcccaagtaatatgatcttggaccaataaagcttttaaataaaatatcgtaaatatactttgcatactgtattaaaatcaaacattttacacattgtaaaatcatcctatgagagcagaggggtggaccagtgggtacataaacatgcataggaaactataacattgcttaacttcatacgtgcccgttaatgggggcctaatctaatattatgctcctgcaacaaaaataaaaactaagaaggaagaatgagaagagcaacaaaccagtctgggggtgcaaccagtaaagagtctgcagacttcacagaggccaatttttcaatactctaccatgtaactacctccaaagtccaatgtaacaaagctatgcaatgccttgtaattttctttctgaatggctgacaagttttaacaaaatatggcatagaatctatacacacatcctgttagtttccttgtaacaagaaccatgagaaacctctcctataccagaaaggaagaagaaacatatattcccatatagaacattttcaaacctactatgttaaatgactactggaatgaccagtaggatctaaaagttcactgaaattaagacccaaatcttctcccctgcaaactatcagaagggcctacccaaattgctcttaatcatttaaaaaatgtgtttaaattagaatatgaatagtgttcatgatcatcattttactcaccttactaacacctactccagtaaacctggcctccaataattcctgccgtcgtgggtccaggctatgcaattcttccatcatttctgctgaaaaagaaaaagtaggctgtgaaaccataaacactaaaatgtgaggaggcaattttctgtagaacaaaactcacagtaattatttcactgaaagatcaaatgcaggtaaatctcaagtaaatatagcatacaagtggtagactactatgtgctgcatcaaacagtaatatattgaaaagttttaaagcagctcagaagtcctcttctatgacagccactttttcttccctagttctgatttgattttaacagcaaaaataaacccctcaaacccttcatataatttctgtaaaagttgagcacaggggaaagaacaaaacaagaactagcctgcaaaaagaaaattccttctatcagccttaatctagctaagtatcttcagatatttatttcccactcaggaagtagtccttaaactaaaaatatgaatcattgacaataatttcaaaagaatataggatgaatcagaagctacaaataactgcaaaatcactattatacagctcctgtctctgaagagctcacagtagctcatgagaaaaggaattattttaaatttaatagagagcccacggtaaaaccatccacctccattcactcagtaaattaatatagctccataacaatccctttaaaaaatctttttctgaccactccctgcagtagttttctcttgattctggacatctgcttttagcccttcttccaagcagggaggggcaggaggacaccatttttaaacttccataaccaattaatgcacaggctactttcagcaaatatgttcatcctttgcaagagaccaactcctacacgacccatttaaaacctctctttaatattaacagtggaaaagaaacatattacatagaaccccttcgaacacattattaagtagttggaatggttggtgtgattttaaagttactgaaaagatgaatcgaacattctcctctgcaatccaacaactctacaatctccagtaacaacccccttacaagtccttcagtttcatttcccttcctggattgagagcctggggcaaaggggaatgaaaaggtgacaaattaaagtttcacccacacatgcaagtgcaggttagagagagaattaggaaattctcagaaaggttgaaatgcatctttacaaaaagaaaaagaaggaaaaaaaagagactgggagaatgagtttcccccgtggccttcctcgcgtcttgccctgccctaatcgaggtcggaatggcaaaggttgcagtctctcccaaaccccaaggtctctcgcaacacttcccaaacctccatccccaggcccggcccggaaaatgacgccccggcggttattccgtttaatgtcaactcatgttaaggaaatagccactccgtctaattccagcggggccttggactgggatcctccctgcagcccacagccgggaagcaggagcgatggggcctggtcccggcgcccctcgccggctccaaactttccccaactccaggcccacctgtcacggaggaagggagggccggctctcgggggcgcccgggaggctgccgaggcctccagctgcctgggggcccccgtctctcctccggccgccggccccaatcccaggccggggccgcctgggcctcccccatcttctgcccggcccctcagcgacccgcagccctcagggagcccctcccgcctcagcgcccaggagctgcggtccggagccggccccgagctgggcccaggtcgcaggctcctcaggccaaaggggtccccaggacggttaatgccccaggcctggagtcctcccccgcccggggctcagcctctcacctgccgccgccgccgccgccgctccacgctcctcccgggaggggccccgacccgacccggctgcggaccgctccgctctccccctgggcaggcccggggcggagccggggcctctcctgagcgccgcaaccccccgcccgggcagccgccgccggcgccgggctccacgagagggcgg

SEQ ID NO: 1244881 - DNA, 4001 bp, Homo sapiens
ggaaggcagctgtgaatgcatatttggggaaggcagactcagggagctccgctgaagcaagctggttagatggggcagaggagtgtggggagacaggggtggttcaggttgcagagggagcaccccgtgacaatggctaagtgtgtcagcctgagaggagtgtgactctcaaagagagttgagtttagagcgatagagtagagtacagcagccaagaatccatgcaggaggagggagtagaagaaaagatactagagagtaagaggggattgttggttaaaggagaggtatcctcttttagcaaatagaggtgtgaccagcgaggtgtgaccagcaaaagggaccaaggggagctctcccctggagaatgtcattagccaactgtcctgagaagtggggaactgtgctgggtagatcttttgtctttatcgcatgaagatattaaacgaggttgaccatcccaaagtttccctgaatgggtggagagttggaagatgggggttagtaaattggggaaatctgtgtctccttttcctccacttctgacagatcctagtcttggccaggcgtggtggctcacatctataattctagcactttgggaggctgaggcaggaggatcacttgaatccaggagtttgagaccagtctgggcaacacagagatactccgtctctacaaaaaatgtaagctggggcggtggctcacatctgtaatcccagcactttgggaggccgaggggggcggatcacctgaggtcaggagttcgagaccagcctagccaacgtggcgaaaccctgtctctactgaaaatgcaaaaattagctgggtgtggtggcacgtgaccgtaatcccagctactcaggaggctgaggcaggagaattgcttaaacccaggagacagaggttgcagtgaacggagatggcgccactgcactccagcctgggcgacagagcgagactccgtctcaaaaaaataataataataaaaataaataaaatatttaaaagttagctgggtgtggtgatgcccacctgtggttccagctgctcggaggctgaggtgggaggactgcttgggcccaggaggttggggctacagtgagccatgttcgcaccaccacactccagcctgggcaacagagagagaccctgtctcaaaaaaaaaaaaaaacaaaaaacaaacacaaaaaccaacccccacctccgcccctggcaaatagattctcatctcccggaagacgacttgagggcatcctccctgccatactgacctaagttctgagtttatccttagcagtccgcacagattgggcttccagaaatgtggggtgagagtgaatggacgtggaggcaagcgagggtgactgatccgtgagggcagtccctggctctgggtaatttcactgcgccccaccctcatgcctgttattatcctgccccgatgacgtctctgacaaccagctgctccttctgcctcgaccattgtagtgaggttttcccagcatctgctcaacagtggggacagggaggacaggcaggacatgctccctacccggtaggggagctctttagagcagtgaggctctcgtcctttctgtgccccacagacattcagcttgggaccctggggctcctccaggactgactccagagggctgctagcccccacgaagccattgccatcctctcccaagcaaccattcttattcctctctccctctccctcctgttcagaaccccttaggtggcacccagccagctggcccgggctcccctgccagccttctcaccattaggcccccgccaatgaagccgcccatgagccagacttgcaagctgagatggttggtgttggtccaggaggtctccccattaggtaccagcaggagggcgttggccacaatgcagacgaggcagagggtaatgagggagagccccacacagcgggcacattttcccgtacacatggtgaggtgtcaggaaggacaggcggtgagtgaaagtaagccagtggttcccaggtccagaggaaaacaagcctggagcacggagcaaagttcagacagaggcgtggcagaaactggcaggatcagaatgataagggagagaggcacaggatgtgggccctgaggaggcagaggcggaggagctgcagccctgaggtgaagggaggatgtggtgctggacaaggtgggggctatggacacattaccctgggttagtgccttcctgttttttctgcacagctccacagcccctctgttggttccatacctgctttgcaacttagccaagccccttcatgtctcttaagtctcagttgccacttgtgtctgggcacggtggctcacacctgtaatcccagcactttgggaggccgaggagggtggatcacctgaggtcaggagtttgagaccagcctggccaacgtggtgaaaccccgtcactactaaaaatgcaaaagttatctgtgcatggtggcgggcacctgtaatcccagctattcgagaggctgaagcaggaggatcacttgaacctggaaggtggaggttgcagtgagctgagattgtgccattgcactccagcctgggtgacaagagtgaaactctgtctcgaaaaataaataaataagtaaataaagtgacaagaatgaaactctgtctcaaaaagtaaataaataaataaataaataaatagataaataaataagtgatgccacttgccttgtgggctacttgtgaggattaaatgggacaacctgagaagtattttgtaaactaggaagcacagagcagatgtgtggtggcctcttcgtttctgccagcctctcaggcagcattcttcccagggagaaattaaagaggtgattgtgggctcttattgtccttgcatttcgtcttcctggtatttgattattgatgtctcctcctcttgaggccactgcctgtctctcagggtgggctcgggacctaggcctcattgatgagagcgttctatcctgctagcctcggtgtttgatttagcaacagccatgcgatctgagccaactctgtgagaatcagcttctgccatttttccattctgaggtcaaagaagttctgtttttgttggggtgctgcagtttccttgataacttcttttttttttgagacggagtctcactctgccgcccaggctggagagcagtggcgtgatcttggctcactgcaacctccgcctcctgggttcaagcgattctcctgcctcagcctcccaagtagctgggattacaggcgcccaccaccacacccagctaatttttgtatttttagtagagacggggtttcaccatgttggccaggctggtctcaaactcctcacctcaaatgatccacctgcctcagcctcccaaagtgctgggattacaagcatgagccaagccacccagtcgacttcttttttttttaattaaaaaaatgtttttgagaccagggtctccctttgttgcccaggctggtgtggagtggatcatggctccctgcagccctgaccacctgggctcaagtgatcctcccacctcagcctcccgagtagctaggactataggtgtgtgccaccacacctggctaatggttttttgttgttttttttttgagatggagtcttgctctgtcacccaggctggagtttagtggtgtgatctcggctcactgcaacctctgcctcctgggtctcagaagcaaacaggagagtgaaggcccccacagaatgagccctagctcaagtaggatgtgggagtgccatgaagagatgagggtagcaggaagggctgcagggcttcagagggtatgcaatgaggctgtcacctggaaagtgtcaccagccagtggcccctgatgcagcccctccttgcggcccactcagaccactacagaaatgtggaaaatggagaaaagccagaatctctgctatttataagacagaggaactggattgagaaaaatacatggagaatttac

SEQ ID NO: 1244882 - DNA, 4001 bp, Homo sapiens
ggtcccctggggtctcagggacatcgaggatgaaggccagtggctgggccatgtctctggccaatgcccgctagtctgcagacctagggtagctcagagcctgggcgccacctccggagcccccatctgatgagacaggggcacagagccaggggtggtcttcaacgcctggcagctgtccacaccacccattcctgggggaaccacaggaggtgccactcacagcccagacagtcccgcccacccccctatcaccccaggtacataaatggtgaggcaccgaataagcctcatgccagaatggaatggggggccccctccagtgtcaggggaggggagagaggaaggaagggtgtggggtctgcagttccacatctgtttcctcgatgtcgccagtccctgggaaatggggaagaggtagggtgcctgtagacacagcccctttcaggatctccatgcccagggttctggcacagagacacctcctttttggagagaaaggtcagagtaggctgtaggccttctctgcgtctgccctgtgacctcaaagaacttcctctagcaggaaattagctgctggagccctcacccccaaccagccccaggcggaagcagcacagggggctcctcccccacacacagaggtcactccatgccaccgccgtcagggcgccaaggtcctcatgttctcagaagacccactgccctgcattccatcatcccagggcggccggctgggggtggccaggacctcaacaggcctcctttgtcctggctctgccgtcacccggcacaactggaaccagagcagccttgtctggggccctgggctcggggcccgttcatctgtgagagtggagccaggactcagctcccagccaccagcgagtcctgccggcctctgccctggactcctcctgcgctcaccctcaggaactcagggctcaaagtcggccgggttgaagggcgctttcctcggacaggcaaagcccgggggcgccccgacagagcagctccttgcaggggtgccagtcacaggaccggacggcgccctccctcagtgtcctgggtgccatcttcgggcccaggccccacaccaccccctccctccagcaggagcaaagacgtgggaaaaccagcccagagctgggtccgaggcggccccacccagcctaacacgggacagctgccgaaagaggggctgaggacgccccacccagtccctagagctggaatcccttcctccagacaggcccttctaagctcagggaacccggggactcgggcacccagcgccccagcactccgccccgaggcccaggcaagtccagcggagtttccaggcgcaccattcctgagctaggtggggagaggctgggtggcgcccgtttccaggaacccccaccccagccggcagcgagcttcccgggagcagccgctacccagggagaaccgcaacctggccccagagcccagagcggctgcaactctggggccaccgaacccgtccagccggcctccctgtcccccgccccttcccatcccggccacaccccctcccctcccctccccgtgccctggcgctcggctgggggacctgggtgggggctgcggattttgctccccgcactgtcctccccgcccctgccgctcccagctctgtccgagccggagggtcaagccctgggagctccaggagcacccggggagggaactcggctgccaaatggccccagaggccgaaaggaattcaggggggattgccgctgtccccgcataggagaagcagctggggctggcgggacccgggaccgggatcgcggccgctcacctgggaggcgccggggaggaggggccgcgcgcgcagccagggctcacctgtgccccgcaagagccgccgggaactgaggtctcggctctccttgccaagggagtggcaaagggccccaggggcgactgggccagtcgcaggtctgccggggccgggggagtagccgcacctcccggcccacgtgggcggggggggggggggcgggcctcggctatcacgtgacccggcccggcccgcggcgcccccgccctcctccgggcgccccgcggcgactatgccttcctcccctgccaacttccgacccctcctcctgaggtctgagctgggctggattcattccagcccctggttgaagtccccaatttttctgacgctcagtttccccaagttccaaaaaggggcaatatttccagactcatctgcttcccatggttagggatcgtccaagtaagatgccgccgaaagccccagggacacagagtatctcactccagattgggcagcgcccccccccccgccgcccccgcaagcctcctgctgactctccccgaccccggcggggggagcctggttatctcccactcctgacacctgggcggggttcattgtttatctagcaagagttctggctcacttcctgtgtgctgtgtggagaggaggggatgaaaaggaggacacgctgacacttaggtgactgtccccaggtgctgtacccgttgccctgttttctgttattccccatgagccaggaaggtatgcactgatattcccatttcacagatgaggaaactgaggctgagagaagttaatcaccctttagggtgcccccagccaaagcaggagacttagtggtccacctgggaactctatggaggaaactgcctttgagattgtaccccccaccccaagcccatttggaagggagggtcattcctggcggggagaagccatgaagcaggcagggtgaatgtgagctggggcccaggagggcaggagagggcactgctgcaggggagagcaggcaagcaaaagcgaggaccaggcaggggtcaaggctggggccttttggagctgccagtgtggtcctcagatggctaccccaagctggttcttggcaagtggcaccctggcatggagacccagcccctgcctctcctcccactgcttccccctccctgcatacccacactgaatttgcatgaatgccacctcctctggggagcctccccagattgaaccctggtggagcacctaccacttcctattgacatgtacatctgtggttctgtgccccctcctaccccagcccactgtgtgcccagcaccagcacatagcttgcgcctgacacacagaaaggactctggaaaccaggaaggaggtgggcagagaggcagaaaagctatgaacattcagacctgagatgactgggccctatagcaggtagagagggagcagagaggaagggctgcgggcttcccaggggcccaaggacagagaattggcaaagatatgtcttaaacatctagcctgggagagcatgaatggagccaattcctgagcacttactaccggccaggtgctaggcctgggtcttggcacaaccataacgccaatgacaggggctggaagtacagcagtaacaccaagagtatctggaaacccagcagccaggttctggggagcccaccatcctgtcattatcacaccctccagggtgaggccggcagataaagagtttggcccctgtgcccccaccgttcccatccccacccatgtcaggctcccagctcaggcctcgaggtcaagtcctgcctatccaggctggaaggagttgaacagagagggcctcagctgcaggctggacatccctggaggcagccaggcggcagacccggaccagtggaccctagggctgcaggagaccaggccctgactcctgtgcagaggggaagggtgggccacccgcagcccagcatgcacagagctccctgggaggccaagtggcctacgcctgtcaccttcacctctgcatctcaggggcccacaggaagtgcctgcttggcctcagtttaaagcagaggaaaccatggggtgagaggggaggagggaggtagtggagagggaagctgggtttcctgtcatatgacccctcctctgggctccctcacc

SEQ ID NO: 1244883 - DNA, 4001 bp, Homo sapiens
tcgaggtcaagtcctgcctatccaggctggaaggagttgaacagagagggcctcagctgcaggctggacatccctggaggcagccaggcggcagacccggaccagtggaccctagggctgcaggagaccaggccctgactcctgtgcagaggggaagggtgggccacccgcagcccagcatgcacagagctccctgggaggccaagtggcctacgcctgtcaccttcacctctgcatctcaggggcccacaggaagtgcctgcttggcctcagtttaaagcagaggaaaccatggggtgagaggggaggagggaggtagtggagagggaagctgggtttcctgtcatatgacccctcctctgggctccctcaccaccctgcctggcttggcaggagtcgtctgagaaggggactcctccagggacttggtccctaggtccccaggtgagctggatgtccagtggagggagaatgcagagggtgaggggctgtgggggccagctagagccctgcaagggtagcagtgggtccctgctcctgtccccacggctggggctgtagccacaggtcctcatcaggggctcgcggggtacctgggactggaggctggaccacaagaaggaagacagaagggggtcccccgacatccagagtcagatgtggcagatgccgagtcccaggaactgtggggtttgggacacaggctcttccggaagggcaaactgccacgtggagaagagagggaattgtctctccttggggtgacggtgggcccaggcacaggtggatgcggggtgcagcaggtcttggctttctttgcctgtgccggtccagactttctgtgccctttggatctttcaccccatttgacagatggggagactgaggccgtggctgtgtgtccctctgagagttggagcggggctgggcccgaattcgaccgcagcaggattctctctcatttctgagccccggaggtggcagagcggcagacccgggcaagtgaaccctagggctgcaggagcccaggccccgacgccggcgcagaggggacggaagggcccgcccccagcccagcgtgcacagaggccatagccaaggccttaaggctcatccaaccggggactcatatcccccccaccggcagcccggcgccccagcctctacccgtgcccgccgagatgctgctgccgcggtcggtgtcatcggagcgggcccctggggtgccggagccggaggagctgtgggaggcagagatggagcggctgcgcggctctgggacgcccgtgcgcgggctgccctatgccatgatggacaagcgcctcatctggtgggtgccacgcgggcgccagacggtgcgtggggggggtgctgcgaggctgccccgtcggatggtgtgggagcaccccgtctgcttggcccgggtgggcagggcgggtgactcaggggcgcccctgtcaccacccccgtccaggcagctgcgggagcccgcgggggtgcagaccttgcgctggcagcggtggcagcgccggcggcagacggtggaaaggcgcctgcgggaggcagcgcagcggctggcccggggccttgggctctgggagggggcgctctacgagatcgggggtaggacccgcgcgacccgcacctccccttgccctctctggagccccactgcccagatcggaaaaaggagagtggcatcatcccacctgccttcacccgggtcccccgaccaatcggcccctcccccctcccaccccttccgcccgcaggcaccgcaaacctcgggcccacgcagcacccccaggtgactgtcagcggtacctccggactcgggcgggtgggagcctggcgggcaccccacgccgtccggtgggcccgcccttggactctcagcgcggccccagccccggccccggcctccctgacccaccctgctctcccactgcaggcctcttcggcacaggaattcggtcctacttcaccttcctccgcttcctgctgctactcaacctgctgagcctgctgctcaccgcaagcttcgtgctgctgcccctggtctggctccgcccccctgacccaggccccaccctgaacttgagtgagtgtgaggcccaccaggggaagtgctccggtgcccacctgcgccatgggggggctggcccagggcccagagcgtggcgacaacgctgggcgtggtcctgccgtgcaggccccggggctctctctccctgacctcgccttgtgtggggcacgcctttggcacatcctcagccccctgcccaggcctccccagggttgggggttatagagcagtagccgcagagcctcacctatgccttggggatccctctctattgacccccttcctcctcaacagccctccagtgccctggtagccgccagtccccgcctggcgttttgaggttccacaatcaactttggcatgttttgactggcagggtgagtgaggtctgtcccggctatggtccagagtctgggagacccagggaactggcttcaggggacacaagtctaagaggacctctgctcctccagggacatttcggctcctcaggggatggtcttacctagacagactggcctggccggtggtggggttagagagaggctgaggccactgtgcccaacatagactcatggacacatgcccgtggtcctcagagcccagctggtgtaggcggtgccagggacaaagggggaaaagtgccccggcctctgggagaagcacttccccaccctcatcctgggaagccatcgagtggtcaccaatggggttcctgggttccagtcgtggctctatttctcaaagccctgtgaccgtgggcacgttgccgaacctctgtgggcccttgtaagacgggacactccctacctgatggggggattgcacgggggctaacaagatcatatatggaaagcacttgagcagagcctggtgctcacccgggctgggtatcttcgtcgctgtccccaggccttcaccaacacctatctcttctacggtgcgtaccgagtggggccggagagcagctccgtgtacagcatccgcctggcctacctcctcagcccgctggcctgcctgctcctctgcttctgtgggactctgcggcggtgagagcgaggtccacaccttcaccccttccccagggaatcttccctgatcaccccttccttggcagggtaccctcccattggcaggaaggcccatggcccggcacagcaggctcctgggtgcttcctcagcccaggctctggccgcaaaccttaggaacagggccaccgccccctaccccgactcctcactcaccaggacctgcacctggggctgcaggggccttcccagacccagagccgagccaaggctgaggctggatggtagaggtgcccctcctccagcagcccctggtctcctgccccgcaggatggtgaaggggctgccgcagaagactctgctgggtcagggctatcaggcgcctctcagcgccaaggtcttctcctcatgggacttctgcatccgggtgcaggaagcagccaccatcaagaagcatgagatcagcaacgagttcaaggtgtgtgcacgagtgagtgcctgagatccacaagctccaggtatatgggagcgagtgcgtgagagccacgtgttccaggtgtgtgcgagcaagtgcgaccgtgccagtgtgtgtgagcgtgtgtgggagggagcctgtgggagcgtgatggagagcgtgtgaatgtgtgtgcatgtgtggccgagtgtgagggcacatgtgactgaatgggtgatggcgagcacgcctgtgaatgtgtgaatctgagtgtctatgggagcatgacagtgtgagagtttgtgactgtgtatgtgagcgtgaatggttgtgactgtgtgtgagagcgtttcctgcaccctttcctcccatgcccaccccgcctgcagctgcctctgtccccacccttccgggcaggtggagctggaggag

SEQ ID NO: 1244884 - DNA, 4001 bp, Homo sapiens
aggaagggggtcaatagagagggatccccaaggcataggtgaggctctgcggctactgctctataacccccaaccctggggaggcctgggcagggggctgaggatgtgccaaaggcgtgccccacacaaggcgaggtcagggagagagagccccggggcctgcacggcaggaccacgcccagcgttgtcgccacgctctgggccctgggccagcccccccatggcgcaggtgggcaccggagcacttcccctggtgggcctcacactcactcaagttcagggtggggcctgggtcaggggggcggagccagaccaggggcagcagcacgaagcttgcggtgagcagcaggctcagcaggttgagtagcagcaggaagcggaggaaggtgaagtaggaccgaattcctgtgccgaagaggcctgcagtgggagagcagggtgggtcagggaggccggggccggggctggggccgcgctgagagtccaagggcgggcccaccggacggcgtggggtgcccgccaggctcccacccgcccgagtccggaggtaccgctgacagtcacctgggggtgctgcgtgggcccgaggtttgcggtgcctgcgggcggaaggggtgggaggggggaggggccgattggtcgggggacccgggtgaaggcaggtgggatgatgccactctcctttttccgatctgggcagtggggctccagagagggcaaggggaggtgcgggtcgcgcgggtcctacccccgatctcgtagagcgccccctcccagagcccaaggccccgggccagccgctgcgctgcctcccgcaggcgcctttccaccgtctgccgccggcgctgccaccgctgccagcgcaaggtctgcacccccgcgggctcccgcagctgcctggacgggggtggtgacaggggcgcccctgagtcacccgccctgcccacccgggccaagcagacggggtgctcccacaccatccgacggggcagcctcgcagcaccccccccacgcaccgtctggcgcccgcgtggcacccaccagatgaggcgcttgtccatcatggcatagggcagcccgcgcacgggcgtcccagagccgcgcagccgctccatctctgcctcccacagctcctccggctccggcaccccaggggcccgctccgatgacaccgaccgcggcagcagcatctcggcgggcacgggtagaggctggggcgccgggctgccggtgggggggatatgagtccccggttggatgagccttaaggccttggctatggcctctgtgcacgctgggctgggggcgggcccttccgtcccctctgcgccggcgtcggggcctgggctcctgcagccctagggttcacttgcccgggtctgccgctctgccacctccggggctcagaaatgagagagaatcctgctgcggtcgaattcgggcccagccccgctccaactctcagagggacacacagccacggcctcagtctccccatctgtcaaatggggtgaaagatccaaagggcacagaaagtctggaccggcacaggcaaagaaagccaagacctgctgcaccccgcatccacctgtgcctgggcccaccgtcaccccaaggagagacaattccctctcttctccacgtggcagtttgcccttccggaagagcctgtgtcccaaaccccacagttcctgggactcggcatctgccacatctgactctggatgtcgggggacccccttctgtcttccttcttgtggtccagcctccagtcccaggtaccccgcgagcccctgatgaggacctgtggctacagccccagccgtggggacaggagcagggacccactgctacccttgcagggctctagctggcccccacagcccctcaccctctgcattctccctccactggacatccagctcacctggggacctagggaccaagtccctggaggagtccccttctcagacgactcctgccaagccaggcagggtggtgagggagcccagaggaggggtcatatgacaggaaacccagcttccctctccactacctccctcctcccctctcaccccatggtttcctctgctttaaactgaggccaagcaggcacttcctgtgggcccctgagatgcagaggtgaaggtgacaggcgtaggccacttggcctcccagggagctctgtgcatgctgggctgcgggtggcccacccttcccctctgcacaggagtcagggcctggtctcctgcagccctagggtccactggtccgggtctgccgcctggctgcctccagggatgtccagcctgcagctgaggccctctctgttcaactccttccagcctggataggcaggacttgacctcgaggcctgagctgggagcctgacatgggtggggatgggaacggtgggggcacaggggccaaactctttatctgccggcctcaccctggagggtgtgataatgacaggatggtgggctccccagaacctggctgctgggtttccagatactcttggtgttactgctgtacttccagcccctgtcattggcgttatggttgtgccaagacccaggcctagcacctggccggtagtaagtgctcaggaattggctccattcatgctctcccaggctagatgtttaagacatatctttgccaattctctgtccttgggcccctgggaagcccgcagcccttcctctctgctccctctctacctgctatagggcccagtcatctcaggtctgaatgttcatagcttttctgcctctctgcccacctccttcctggtttccagagtcctttctgtgtgtcaggcgcaagctatgtgctggtgctgggcacacagtgggctggggtaggagggggcacagaaccacagatgtacatgtcaataggaagtggtaggtgctccaccagggttcaatctggggaggctccccagaggaggtggcattcatgcaaattcagtgtgggtatgcagggagggggaagcagtgggaggagaggcaggggctgggtctccatgccagggtgccacttgccaagaaccagcttggggtagccatctgaggaccacactggcagctccaaaaggccccagccttgacccctgcctggtcctcgcttttgcttgcctgctctcccctgcagcagtgccctctcctgccctcctgggccccagctcacattcaccctgcctgcttcatggcttctccccgccaggaatgaccctcccttccaaatgggcttggggtggggggtacaatctcaaaggcagtttcctccatagagttcccaggtggaccactaagtctcctgctttggctgggggcaccctaaagggtgattaacttctctcagcctcagtttcctcatctgtgaaatgggaatatcagtgcataccttcctggctcatggggaataacagaaaacagggcaacgggtacagcacctggggacagtcacctaagtgtcagcgtgtcctccttttcatcccctcctctccacacagcacacaggaagtgagccagaactcttgctagataaacaatgaaccccgcccaggtgtcaggagtgggagataaccaggctccccccgccggggtcggggagagtcagcaggaggcttgcgggggcggcgggggggggggcgctgcccaatctggagtgagatactctgtgtccctggggctttcggcggcatcttacttggacgatccctaaccatgggaagcagatgagtctggaaatattgcccctttttggaacttggggaaactgagcgtcagaaaaattggggacttcaaccaggggctggaatgaatccagcccagctcagacctcaggaggaggggtcggaagttggcaggggaggaaggcatagtcgccgcggggcgcccggaggagggcgggggcgccgcgggccgggccgggtcacgtgatagccgaggcccgccccccccccccccgcccacgtgggccgggaggtg

SEQ ID NO: 1244885 - DNA, 4001 bp, Homo sapiens
ctttatgttgaggggtttaccatgaacatgttggttgggaaatcatctgtcagttcctcaaggacattatcaacaattttgcatgcttagaaagtcattgccaaataagtcaatgaataaataaaataatgactctacattgaaatcggatgtaaatttaaaacttagataattatttaaatggattattttaaagtacccagatatttagtgctaagtacattaattattccttatcattataatgataaatagtaatttataaatgaatagtaattatagtaattattcaattacatttggaaaatggtgcctaggactagaaccaaagtctgattgatgccaaagcatgtcttcctaatccctgtggaatattgtttctgtgttcaaatgatggcatgctttctgtagctcataaggagtaaacttgccttcaaataatctcttgggttttaaaatgattgcttcaccagaaaaaaaaatgccattgccttcccacagaacctctgtagtgttatattaattgaggatagaactagctcaacaaatcttttgggagcatttttatcctcttaaaaagtctttgatattcacgatgtgtgtgggtagtaggaaacagaacactttgcccagctgaactgagttcaaaatagaactgtttatctaatgaacttatcttatggaacaatgcagagaacagatctcttgctctctttctttagataaaatttttaaagtctcgttttgtaaaggagacagaactttgctgtctccttcttgtttacttaaataaactatacaggaaacaggcattattgtctttgaaaaagcaatgtaaaaacttggtaaaaccaatgatccccagagagtacacagccacagaatgagaacacgatgtttcttccatcagggcacacagaagggcaccgagtctactttgaattccagctgtacatttgtacccagttaatgaatctgctgttgataactttggatgacttccagtatgatggactcagtagtctcagggaaaccttgcttccctgatttatttcttgctatttattttctaagtttaacttagtttgcaaaactttctttacagcactgatagggcttgattaccttatttttacagcgctaatagggcttgatcatcctttttctagaatctaggttatagcatgaggttttggatcgcttccacaataaaatgaacatttctgactctccaatattatgcaattaaaattagccattaactgaaagtcgagaaacttgagtttgattcttttcctctttgtggcttgggcaagtcacccaacttctgagtgctctattgtcagatctcaggattccatctgtagatacttcattattcttttcttagaaaaaaaaatcctatctgggctcagaatatcagagaactgagacaagacaacttggggaaatagctaacactactacacaagctaccagaacagctgtaggaagcctcttttttaaaaaaatattccctgatgcaacatctgtcagcaaagccactgaccttttactgtggatagtcatctatttccatgtgaagagagtcacaggcgtctggctcggggactgactgcagcacaaaggttttcttcagtcccaatcagaaattctaggttttcaggttcgcacactaattttcactccttcttacccaaagccaatgcagtaaggagcatggggtgtccaataccataataaactgtaaactgcatttgaaaggaaagcagcaggggccagaactcacacttgtggagcctcaccctgctgtgactgacatgacgtaagtcggagacctcggttcacagttttatgtgacaggacacaggagcagccaactttagggaagactgataggaaagcccaagggtgaatctctctgggaacaggaagcatgtaccgcgggaccaacaaggcttttggacagagaactttcacgggttttgtagaagcaactgggctcccctgaggctgccaagagggtgtgctctgatcacatggactgtgcatttccttagagcacctcccttcccagcccacggaatccagaaagaagctgctgtgctgctgtgtgacctccatcagtgcagtggattcctttataagcacacagttctcataagcagagaaaaacgtaacactgtatattcctctcttctccaaattttcttattttctttttggtaaggttacaatcttaccactgtcaaatatgtcctgtacaccagggaggatttgtgctacctgcctcagaatcacacagggtgcttgcaaaaaatacaggtttctgggctccaccccagacctactacattactgcatcaggatagtgtgtgtgtgtgtgtgtgtgtgtgtgtgtgtgtgtgtgtgtgtgtgttgaaaggtcagaaacttgtgttttttatctgcatccatatgaagtttgagatcctctgcttaatgctaatacagaaagctatcaagtttgcaaatccggcctcacccctctttaaaacccatccatgattccccctcatctgaggtctagaatctctacatgacacacaagtcttcccatgagctggcctctccctttctttccagtctcagctccagcttggatcaaattacaaatcacaaacaacacattattttatgtttgtcatgctttgttggttcctactcttggaggctcaagatgatgtctactcatcttttcatgactacctcaagcatcacctgcttctagaaaccttccctggtaagtcctcctctattttcagactaggcagcatgaggtcccttcccccatgttcccgtaatgtttatgccagtgtttctcaatctgagtacttttgacatttggggctggataattatttattgtgaagagctgtcctgttcgttgcagaatgtttagcagcatctctggcctatacccactctatgccagtagcaacccctcctctcctgcacagttgtgacaaccacgaatgtcttcagacattgccaaatcaccctggcgtgaaaatgttcctggctgaaaatactgctctgtgcttacatgtatcatagccctcaaaaaatagtgtggaaagtggctgtttgcttgtttatcttctctaatctaaaagactgagagtttcttaagagtaacgagtgtacagaattaacctttgtgtcccctacactaaagcacaacatctaatgcatagttagacataaaatacacatttcttgagcaaagcgttattgatggactagatgtcagaaaccctagccaatcttggttggctctactgcttgcaacgttgtgactgtggacaaataagtcaacagctccgtgcctcagtttcccttatttggaaaatgggggtaatagtgccctccttgcatatttgggtcattatgcaggtatgggaaagtataaagtgcaggaagaaccctggttatagtaatgtgacctaaaggttgctgctctcatatttgccttctctggaaacattgaaagttcagggccacccacacaatatcatccactttaacaatagctggaggatttcattaatgcagaacattataaatgtgagaaatcttatggaaaatgattgaacctccagtatggaatgagaccaacataattgttaaaagaattctcttaacataatgctgtacagcacactatgaatatcctaaaggtcaaacgctctcatccgtatctgttatgcctcctgctaaagactcaaccaggcctaaaggagccttctctgctacagacctgtctgattttctgttcttgaggaactgcaaatcccattctttgcaccctcttctgtccttcttcctttctgctctgtgctaggacagccagctgcttccttgcttcctgactcttaatatcagttataggaaattagcaggttttgcattgggatgcctctcctattatttattaccttcaagaagagctttgtctctct

SEQ ID NO: 1244886 - DNA, 4001 bp, Homo sapiens
atgccggcgatgaagacaaccacagcaaaggggatgatgcagcggtagcaggagagctcggtaccccctgtagcagccatcaactgaatctcactgaccagagggactgtggtgatcacaacttcactcttggggctcttctccatcgtcgctgccatgtgagcctttggggctcccaggatctccttgatgggctcttcagtcatttttacaacagtgcttctaagctgggtttacagactagatctggacagtctcaccagggtgaaagctgtgaagataacaggagatgtcagctacatgtatcagaatgtacaccctgtaagcagaaatgaaaagctggggaggcacctcctttctaggaggcacagatccatgtgaaaagcaactttactctttttttgaattggttgcattctctttgcatttaggcaaaaaataagatgaagcagatgcatatgaagggaagacagaaaaagcaggaagcacttacagtgtttaatataccctggcggtctacaaaagttttacaagcttttctgctttgtctattgcttctccttcctctgaatacacagaaatgcctgaatcctaatccaaagatggtctcattcaagaggagaatacattacaaacaatatttcgtaccattaatcccagaacttacagcaactcagactccgccaatcttgctgggcataacatgcattctttgcaaactatcacccattggctgcccacaaaatcaatgtcaaggcaagtggccagcaacaaatgatgttcttctccattgaatgacagccaacaaatctttattgtgttactattaaacacagtgcaacctgctccctgggatctttttattacccactttaggtggacagttcagcaaaaaattcattgaaaatgaggtggggatttgtggtctgaagtgtaacaatatcttccaatctgctataaaagagaaaaaataagaaaaaaaaattcaaccccttcataggatataattttgtgctttctcttggcaaaataaaatcaattatttgagtaattagctgtcaattcacaaattttctattaagctcaacacaaaatttcgatattatgtatactacaacatgcagaaacaaataagcatgctaggttttcaggaaactttcacaaccttcattttcctccatgcctttgtgtataaaacttgctgcaatgaccctttctaagtatttcgtacctgaacatttcaggacaaagcttgagacttttgatcaaaagtatctggttgaaatgctgtctatgagaaatcagtgaaaacttgtctgctgctcagacatggttgagtcactgtcttccattctcaaaaagctgtctagctgctacacagttgagcagttgtagttaccgaacaagtttaaagaaagatacttgagaccatttcaatgagattcatactttaaatatattaagcatccactgaaaacaaattcaactccaaatcaaacctcactggttcttccctgctctggaaagtcaaaatatcactccctgagcaatgaaactaaatcttagagctgcctactcacatgtcatttttaatcaccaaactaattaatcactgttgtccaatgacaccctaacttctggtgaggccagttaaaagatatttgagattatgtctgaaaaaaataacttcaccccaaagctgagattgagctaacctgaaaatcaagatctgtccccaaattacttacactcacctcggagagaggcaatccattaccagagtaaccacttgacttggaagacaagaaacagcaacgcctgagcctcttcgtccaacttctgggaaagagcctctaacagcaaggctgtcaataaaacaataggttagggatctcttctggggaaaggaaaagatgtaaaaatactttactatagggtctgctctggtttgggatcctggagttcctgcttctttcaggctacctctgttcctaaatgacgcttgtctttccctccctctctctttttattccctccccctcgggtttgcccctccctaacatttttttttttccttcgttcttttccttgccagcagattctgagttttggcttcccccagctttgctcagtgacatgatgagtccgaatcatttctacagattccccagagacaggagccagcttttactttttctcttgcagcatttactaagcggactgctttgtgaatttgaatgactcattttttcccccgccgacctccagatcttcctcccgtccatcaggcatttttataagaaaatcccagagtcagcgttgcagacccggctgaggggacagagccgaggggacagatactctagggtggcagaaacagctgtgaagtcatcaggcagctgaattcagtctctaagccagcaaaaatccatgttcctaggttttccattattctttatatgtgcgtgatagtcatctgaagcttaaaaccccacttgttgagtgttaattcatttaggaatgagggtgggaggcacaaatgtttgtggttaagggggaaagccagttatattgatttaaacatgattgtttactgcttttgcaaggaggtaactttagcagcaccaagattatcatcatcatgataattgctaccatttatagagcacctactgtggacatggcacaatattaagaaatgtcacatattaatgttaattctcactagttcataaatgaggaaacaggctcagagaggttaagtaatttaacaaagatcacccagtaacagagacacccttggtttgaaccctaatctttaatggatatatatatcatttggggagattgttaaatttagattctgattcagtaagtctgtaacaagctccctacctatgttgagacctctgttccttggcccactttaaggatcaaggtattttaaacattcaaacatatacaacttgacacatcatacttaaacaataaagttaaacatctatttcccaccccataaacctgtaagtgactttataggtttatgctttcttacagacaaactgtgaaatttttaaaaccttgaaacatataaagcccaagattgtctttttgaggagaaaagataatactgggagctcatcctacactctgtagttaaaagtttacatcctccattttttcatctgcacaagtgttaataacctcttctaattaatactgtgaaccacaaatccaaattaactcttggaagagatttgttttccatctttctctcaaattgttagatttctctaatagctggcaaagggcttggatgttctcaaacatctcgcctctcctctaccacagcacactctctccagccttgccttgtagcaataccctgatgacttgtcacaaaaagagagggaccagaagttgtttattctggaatgaaagccagagagagggttatgtccttataaaaaataaagttgaaaagtccctgaggttgggggagtcatggcaagtacctggaggccttggtcaccatgatcctcacactttaaaaatgtcagacctaaagagacagctttcatatctgaggagtaccgtcacttggtgttgagggtcaggaatacttagaaccagggcatttcagaacttgccaaagttgcccccggaagatggtaagatgggggccgctggctacgtacaatggaggttcttgagaagctccttaacagagctgtcttctcacctgcaaactctggcccttgagggcaattcccctctattttctagtaccactttgcctgcaagatagcccaataactgcactgaagctctgaatatcaccttattctgttgaaaagcatgctttcctgttaccaaagctaaaggtgcaaacattgaacgtctagagagaggacaatggcagcttttttcatagtaagcccttgactgagtctataatgaggcgcagtgagtgtgtctgtgtcctaggagcacaaatctgt

SEQ ID NO: 1244887 - DNA, 4001 bp, Homo sapiens
ggcacctccaaccaacagtcccccaacataccacacagatgaggtagatacccaggaacacctggccggtggactgcagggagcggctgcgaggtttccggcggtacagctccccagcaccgctggccaacacaagaaagccgccgatgatggcaactgtgcgcgagtacatacggacctaggccggggtaaggggaccccagtcaagaactgcagccgccacatctctcctggcttcccagagtgtagaaccacccctctctacacatcccattccatctgatgaaccctcttacatttccaagcttggtgggcaggtgcaacagagacagatcattctttttatatatatatagaagtagaaactgaggcccagagggttaagaaaactgtcaggtctggccaggcgcagtggctcacgcctgtaatcccagcactttgggaggccgaggcaggtggatcaccctgaggtcaggagtttgagactagcctggccaacatgaggaaaccctgtctactgaaaatacaaaaattagtcgggcgtggggaagggcgcctgtaatcccaactacttgggagactgaggcaggagaatcgtttgaacctggaaggcggaggttgcagtgagttgagacagcgtcactgcactccagcctgggcgacggagagagactctgtttcaaaaaacaacaacaaaaaagaaaactggcaggtcctacctgccagtaagtggcagaacccagacacaatgtgtttctcccttccccactctcagatctgtagactctaatcttggtgttctttattctacatggcatgggatctatgccacaaaaacattgatcttgctgccctgtagctgttcacacatcttcctcccctaagggtctgacagtctcttcctcaaggacagtgcctttgtccaaccttatctccagcctgcagggcctggcacaggttctggcttaaatgctatactaacagtaattacattttcataaaatttattttatgaaaactaggtactctccaaggtcctttgtaccccatgagtctgagattactaaactaacagtttaaaagattctgggaaccaggtgaccggggttctggtcccaccagtatcctgtattgtggctttgggaaagtctgtttcccatctctagacctcagtttccacactttgaagaggaagtttgtgtggtctctaagatccatttctgcgctctgtaatctccataagccaaggggttcgaacctcccaggcttcacactgtgcagctggccagcaccattcatcgcccaccaacagccctgggcattggcctctgattccccgtcacccagagggaagacccttttggggccgaggcgctcaccttcagccagtccccgtagtggacgtagcccccgatgtaggcggcgtaggtgctaatggccaattggagtgcggcccccagcgcgaaccagcgccgcttcacgccaaaggacatgaaactagcgcacagcacggctgcccccatgtcgaaatacaggtaaggcactgggatgtcgggcttcctgcgagccgggagtggggaagcaacgaggacagaatgaagcggtgggggaagaagcttgagaccccttgagttcccacaggctccactgctcccccaaaccagactcccctcccatgggcaggaccgccctaccagatttggtccgacacccagaccagaacccctcccagggaggtcccaattcctcccagttcaagggtcccgacttctagcccccaatttcttgcccacatcaccgccccctgccgcgtttagcggctgcgtaggcctgctcaccggcgtgcctcagccctctcagcgtacagcatgagctggctgaagcagccccaaaaggggcagcgtgtgagcagcaccgaacccaactgcatgatcagctgcaacatccaccgtctcgaacctatcttcgacgccatcttgggaaagggcagtccgctgcggcctcaccccagtcagagaagcaggcgcggggatgggacacgcagcttccgggtcaagcgctttttctttttcctcccggaaacaacggtgtcattctctagttccggatctaaggtgacccagttgcgaagtccagccttctcgtctgctcatggagccttcagggccatatttgtccctgcgaatttgaaaactagactagaggaaggaacagtgggttcaggatagcagaagtcttggaccgtagtatgatgtattgaagcaaactggtctttgaatgcagcccgatcagggccctaatcctgattccaaccctgtgtgattctgggcacatcacctaaactttatgagactcatcatgaaatggggataattacacctacctcagagttgtgaactttttttttcttttttttttgttttgttttgtttttgagacggagtctcactctgtcgcctaggctggagtgcaatggcacgatcttggctcactgtaacctccgcaacctgggttcaagcgattctcctgcctcagcctcctgagtagctgagactacaggctctcgccaccacgcccggctaattttttgtatttttagtagagacggagtttcaccgtcttagccaggatggtctcgatctcctgacttcgtgatccgcccgcctcggcctcccaaagtgctgggattacaggcatgagccaccgcgccaggccagagttgtgaactttaaatgtgacaaggtcggtcctagtacatagtagtggttcaataaatgatacacataacgcaccagaggaaacccccgtttctgttaagatcaaagtaaggggtcctcctggctcaaagtcacctctttgggtttgccttttgcctgtgccctgagagaaaaaggagatctgaacatctgggacatctcaagtcagtccatttctccagctgccatgctcccgctgtaacccaaattgtcatactttgtcagtttaattgcagcagacatccaggtggtctctgcattcccctccagtgtgttctcagccccttctcccacgccccacccgtttatatgttctcataacatcagctaccttcctttgaatcacttggcacggtggcaattagatagatagatagatatagatacacacgcacacacacacacacacacatatatatatatctgctttacatatatatgctttttttttatttttgagacagggtctcactgtgtcacccaggctggagtgcagtggtgcgatcttggctcactacagcctacacctcccaggttcaagcgattctcctgcctcagcttcccaagtagctgggattactggcgcttgccaccacacccggctaatttttatttttagtggagacagggtttcaccatgttggccaggctgctctcgaactcctaacctcaagcgatccaaccgccttggcctcccaaagcgctaggattacaggcgtgagacaccgcacccagccaatatatttgtgattgttttattgacaatcttcccctactagatcgcaagctccctaagcacaaacacggtgcctgggtttctgtttactgtttacagatgctccttgacttgtgatggagttatatcctgataaacccatcataggttgaaaatactgtaagttgaaaatgtgtggctgactggaagctgtggcttgctgacactgcccagcattgtaagagaaatacagtttccactgaatgcagatctgctttcgcaccaatgtaaagttgaaaactccaatgctgggaaccatctgtagtatacaggatgccctcaggacctagtatacaggatgccctcaggaaatatgtgctgtacagataaatgaaaaggtgttgggctgggcgcggtggctaacgcctgtgatcccagcactttaggaggccgagtcgggtggatcacgaggtcaggagttcaagaccagcctggccaagatggtgaaaccccgtctctactaaaaatac

SEQ ID NO: 1244888 - DNA, 4001 bp, Homo sapiens
caccgcggcacggagggcccgggccgggtccccgcggagccgggccaattctccgagcagcgcagcggagtcgtcccccgtacggagctgtcggccgttcagaaaatagtgaggcaacgtcccggcctcgagcactcggccgagctcgtctagcagcccgaggcagcaggcgcccgcattttctggccgcgccaggtagagcgcaggcagccgctcgcacgcccagtacagcagcgtccgcaggaggtagggcgccgccgcccgggtcccggccaccagcgggcgcagtagcgcctgggccgccgcgtgcgcctgcagcagcggcgctggtatgcgcgctttgagcgccagctcctggcgggcaaaacagagctgccaggcggaggcgcacggccgctcggtgccgccaccgggcaccaggtagaaggaagccgactcagaggccagcggaccggcccacgagtggctccgagccccctcgggccagcccgccacggacaccactgggatcaggtcgaagagcaggaggcggcgagggggctcaggggtagccaggaggacggtggtgaaacccgcgtggcgagctgcgtgcaccagacgcggagcacccgggacagggatcagagactcggcgaccgccgccagcgtagcaaagaaccaggcagccacctgggcggaacataatgtgggccacgcttcccgagcctccgacggctttgggactgggctttcgacggctgccttggtgacgtcactactcattgttttcaaaggtgcggtagagccaaggtcgacgacgtcatgctgaggcgactcggacgctgaaacgtcactaggcgatttttccaaagacaccggcgcctcgtgctcagtgacgtagctgtgcggctggtctacagagctttgccagtccttggaactttcttcgctctccgttcggtggatcgaatcacgtgctcctgggactgggggtcctaagcaatcctgccacatctcccggatgggggttccgcacaccatctctgggaggcagacctgtgcgtaacaggattccaggtccagttgcagttcagtgccgtccagtgaaaacatgggcactaggagtgtgaagccggcatcgtagtgaggtccccgggcgtagggacccaggggtgcatgccccagatccagggagccctcgcgaatcccaccacgaagcagcaagagctctgcctggggaggaaagcgagggtcccggcggtgaactagacctaaaaaaagggaacggatcgtgagggcgtcgcccaaagccggggcgggggcgggggcgtggtgaggctgagagctgtgagttcccaaaggcaagtagggttacttaccaagcaaagagaagacaaagtccttggcccggaggagatcggctcccggcttgggcccgtcactccagctctcctgcacacccagctcctggatcagctgggtcaattcctgcagctgcgccccggagcagaagtcgatgtccgtgagcggccgagctggggccgggggcggcgggccccaccagggggcactcccccagactgcggaagccatgcggttctatcgctttgggctgcggaaaacacggaagggaggtggctttgctgccacaaagtcgtccccgttcttccctcttcctgaggccgagcgagtgccccagacacaacctacaaatgggtctgtagatgatgggttctaaatttagtcctcaaaatgaacaaataaatacctcttctatcctggcccttttctcataggcaggtccccgcccccatgaactggttcaccggactcagcaggtaaaaagtaactgttggctcctcctacggaatgcagtagccagcctccgctgccgccccttgtctacctccctttacctcttttttggaagaggcttattagtctgcggcttcccccttatgggaagcagtaagggtggggagcagaaatagattcaacaggttacttcttcctgatgcccacgtggccacgcccctacattttcagccacgcccctttctggaggctgtcgaggtggtttccgccgggtcgggtcgccagtcagagctcaatcactcttttggccctgctgaaatcccgcgttatcctgggagttgtagtttcccgctctactagggcgtggtagccacgcccccacatcctttcctgttccgctgaagtagtgcctgatggaagttgtagttcctctggagacagattattctgtgtcttttcacacccatatcaaccccactcaaacattccttggggtttgagaggggtaataggatggctctgagtcgcaaaaaataatgagggatgggccgggcgcggtggctcccgcctgtaaccccagcactttgggagactgaggcgggtgaatcacctgaggtcaggagttcaaggccagcctggccaacattgcgaaaccctgtctctactaaaaatacaaaaattagccgggcgtggtggcagacgcctgtaatcccagctacttaggaggctgaggcaggagaatcacttgaacctaggagggaaagggtgcagtgagctgagattgtgccattgcactccagcctgggtgataagagcgaaactccaccctagggcctggggagagatagggacccctgcctgggtggggtggggggggtgcatcttggaatcccaaaagtggtagtgttaggcaggagcacacagatggtgacccagaaatggacgtttgactcataggagagacatacatgttagtgatgcccacctcagctcactgctacctgagtcgtggcagggaaaacactttgggatctcaaatttttgttttgttttgttttgtttttgagactgagtctcgcactgttgcccagactggagtgctgtggcgcaatctccgctcactgcaacctccacctcccgggttcaagcagttctcctgcctcagcctcccgagaagctgggattacggcgcctgccaccatacctggctaattttttgtatttttagtagagacagggtttcaccatgttggccaggctggtcttgaactcctgacctcaggtgatcctcccacctcggcctcccaaagtgttgggattataggcacgcgccactgcacccggcctgggccacgacttcttacattccttctgcccttggtctgtctccaggacgggataggcctaagtccatggataagataattaaggaggacatctaggaaaattagaggcctgtaaaagaagagactccccaactgtagagatcaatttggcaagcccaggactcaggggttcctcgtcactgacagagagttttctccttcagcaaccagagctggggtccctgggagaagcgagagcaccaaagcagcccagaactgcgcaagtaggttcccgtacacacacatctggctgtgacccaagaggccagatcaggagaactggagactgggctgtttctcacagtctggagtaaccaggcatcagacatccctgcatctcacctccttcccagagggtggcttccgaggcactctaaaaagaactaagttctctggactctgtggaagctttgaagatgttaagaatgggtgacaaggaatagttcctctaaactctaaagcatggctctccaatataattttctgtgacgatagcaatgtcctgagttggtcctgtctgatacagtagccaccagcagccacctgtggctgttgagcacttgaaatgtagataatgtggccaggcgccctggctcacgcctgtaatcccaacactttgggaggccgaggcgggtggatcacttgaggtcaggagttcgagactagcctggccaacatggtgaaaccccatctctactaaaaagacaaaaattagctgggcgtggtggtgcacgcatgtaatcccagctactcaggaggctgaggcaggagaatcgcttgcttgaacctgggaggcagaggttgcagtgagccgagatcgcg

SEQ ID NO: 1244889 - DNA, 4001 bp, Homo sapiens
cacaatgctagtctgtgaagctagcagaaacagaccagagatccccaggctaggaagctatgtacaaggcagggcagctgttgaaggcaggtcaagttctagaaaactcttgctacttagggcagtgctgcttttgcctgggagggttggtagcaacctgagtcaaccatctgattattccaaccctctggctacttatccaggcaagagggccctgtgatgtaacaactatgaccaatcatacgttacatagagaagataaactgcgtgtgtgttgggggcagccagaggtaacacagacctaagacagtgagaatcaatcattctaattgttctaattgcagagtccaccaaactgtaattagaagtctctgtatgctttcgctgcttcttacgccatccaagactataaaagttgtgcaatttaaaattcagtaaagaccaaagcggtttccaactgctgagatgagcaaaacccagagtcaacagctgtcaatcactgttcatctgaagggcagcactgcaggcaagtgtggtagcctggagatgaacattatttctttatttttgagacagagtttcgctctttttgcccaggctggagtgcaacggctcgatctcagctcactgcaacgtccgcctcccgggttcaagcgattctcctgcctcagcctcccgagtagctgggattacagtgccaccatgcccggctaattttgtatttttagtagagacagggttttaccatgttggccaggctggtcttgaactcctgacctcaggtgatctgcccgcttcagcctcccaaagtgctgggattacaggcgtgagccaccgtgcccagcccgggattaacattataaacagcatggcgattttgtttggcttgaccactctgacaaacaccttaaaaagagaataaatctgacttacattctgagccaccacagcagcactgtagtcgctgccccatggaactcccccatcctgcttccactatggtctgctcaagcagcagcactcactagtcccatctccagcaagcaatgtgcttttctagaagccaggaacacttaagtgagcaaaaggttctataagtcacactcacgtaggaagagtagagttccccggtctctgtaatttcacccgccatttccaaaagtgaggaagggctggcagcagaggttccttaggtgcaaggacggcggctgccgcagctccttaaaacaaaagagcaggcttcacctatctgatggactgagacaggggtgggaggaggcttgcagacttcccctgccacctctggttcttttatcacagacacttagggcctcagtatctgtcacaagactcacccccgagggaggggtcaccctggatgacagaaatctggacggtttcttctaacatttcccttgctgtgcagggcactgctctgtgcccagcacggatgttttcaatgctgctcggggtgcaagtgatttaaggggcctctaaaaccactaagtctcacccaccacaagagccccctttccacgctctggggtggttatcctcgtttagttccaggaaccaggagctcactaccacacatgggagcccaaggaactgtctgccgcctctgcctagggcagggagctgggggctttcctacattgcccttccaactccactcttggcactaaggcctcctttttttaatggggcctccactccctggccccacctactctcttagggttccccaccctcaaagctccctcttttctcaagaaccccactcccagcctctccctctctctccctcctggaggagtcccgagtctagtgccgccccgccccgccccaacctatcccgacccgtctcgtcctctcccgcccgtcccgacccgacccgacccaacacctgcagcacagccagctcccaagccgccgtctcccgccggtccgctgctgccggcgccagctgtccagcaccagcttccgcagcgcgcatgcgccggccccacagcccacctttttcgcgcgcgctgattgggcgcctcgcgggggcgggaccgggattggggcctggcggctgccgtcagcatggcggaagtgggcggggcgcgttctcacgcgcatgcggaaggggcggtagccggccgggcctgggaacgtggctggttggaggaggtagatcaccctttctgcgggggacgatttcgtcggtggtaggtgggtgtgagcttggcagtacccgggtccgcgtggttggagggtcgaagagagtggtctagaacgccactcaaaggggagggcctaagactaagcccgccttgccctgaagtggtcgggggcggggagggagtggctagagccccgtggggtggtcgccggggtaagaggttggaagtaggtttaaggcagggctgaaagttgattctgggttggaatccctggactggggcaagtaatgggagctctggggatactttggtacttggtacttggtgcttgggtttgaggaatcgaagttctggggagtggacggaaggaaccggcagaaacggagcccaggcttggcctcttggagtgggagtcaaggattgtttaattatccttaaccagcctggttctctttcttgcaagaattttggagtctgtattctttgaagtgtctagacggaactaatgacggaagtcaacttagccccagcaggaaagctggagcgcctacccaaagttggaggaaattcagggtcctgaagtctttgctctccccatctgcatgcaggctgctaccatgaggttgaatcagaacaccttgctgctggggaagaaggtggtccttgtaccctacacctcggagcatgtgcccaggtatctttcccgcttgacatggggtgcgtatcagcacccagagctgtgtaaggtacagccccagtctcagggctatttcccctaagaagaaacattggttgtgagaaataattatatatgaggggggaaaaaaggctgggtgccgtggctcacgcctgtaattccaggactttgggaggctgtggcaggaggattgcttgagcccagcagttcgagaccagcttgggtaacgtagcgagaccttgtctctacaaaaaaatacaaaaattagccaggcatggtggtgcacagctgcagtcccagctactagggaggctgaggtgggaggattgcctgagcccaggagatgaagactgctgtgagctgtgattgtaccactgtactccagcctgggtgacagagcaagaacctgtctcaaaaaaaaacaaaaaaaacaaaaaaacaaaaacaaacaaaaacaaaaaaacggccgggtgcggtggctcacgcctgtaatcccagcactttgggaggctgaggcgggtggatcatgaggtcagtagttcaagaccagcctggccaacatgataaaacgccatctctactaaaaacacaaaaaattagctgggcttgttgcccggcacctgtaattccagctacttgggaggctgaggcaggagaatcacttgaaccagggaggtggaggttgtggtgagccgagatcacaccactgtactccagcctgggcaacagagtgagactttgtctcaaaaataaaataaaataaaataaaggctgggcgcagtggctcacgcctgtaatcccagcactttgggagaccgaggcaggcggatcacaagctcaggagagcgagaccatcctggctaacatggtgaaaccccgtctctactaaaaatacaaaaaaattagccggatgtggtggcgggcgcctgtagtcccagctactcgggaggctgaggcaggagaatgtgtgaacccgggaggcggagcttacagtgagccgagatcgcgccactgcactccagcctgggtgacagatcgagactccgtctcaaaaaaaaaaaaaaaaagagaccagcctgatcaacgtggagaaaccccgtctctaataaaaatacaaaaaaaatagctgggcatgg

SEQ ID NO: 1244890 - DNA, 4001 bp, Homo sapiens
ctggctccgggcccagggtgggggcggggcctcgcgtgtctcccccttgatttgtaagagtccagggctgtcggccatggccacactgagcacccctgggagccaaggcagcttaaggacaaggtgtgtatgaggacggcggggcccagggaggagaggctagcccagggctacccgggtccccggagtaggggcaggggacttgaaaatgagcccccaaggggctctgatgggggcaattccaggagaggcgtgggcaggtgtggggctggagagaggcctgtcctttttcccttgccctgcacactgtctgcagggtggcagacccaggctgcctggcgaggctgcttctggaggcctgaggaaggctgggctgaggactccgcctctcctcaaagccacagcctccctgctctggggctacatgtcgggaaaatccctgcctgggttaccccagctggggactcaagctctctttggaccctacagaaagagctggccagcccccaggccagaagggccgtccgtgacccacagatggccccaacacactgtaaaacacgcatgatttattttagtgtgtgttagaaaaataaagccaacacatcaagcctgcaatttcgcagatactaacacttcggaccaggaaaaaagaagcccatgacatggcacagcgctgtggagcgagcgagatctgggatgcgtaggcctggacggctgaggcttggaaacccctcccctccccaaactttcccaccatgcaggggcccagcaggccctcagcccactcaccccgccagaggagggaggagggaggagggtccgggccaggtgggagcttctccccggaggcctgaggcagcttccctcctctcccaggaaggggctggcccaggcccagctaggatgctcccagcccagctcctacccgccgggtctttcccgtttgtcaggcaggccggcaggctgggctggtgactcatgactggctgggccatctgccctgcacccctgccccgggcgaagtgagaaacctgaccgggctccagcacagacaggaaaccccaccccagggcctgcagtgggacaggtgtggccgccctccacccccacacaggcctcggggagggtgtctgaggccggcctggccctctctgcagcactgaaacaccagctgcctctccccagcccggaactggggatccagtgtcctccgcactgaccccaggctctgctctccctgggaagcacccgctttgacagtggggccaaggactggggttcccaccctcctctgcccagtggactttgtggccccaggcaggtggcatcagctctctgggcctaagcttctcatctctgcagggttcatcagctcaacaagcatttgtgggttcctgagacctgaaggctccactcccccacctaagcacacaacagtccaggcaccacccacatctccctcttacctggagcagaggggcgggtgttcggagccttggggcccagggtcatttgcactggagggggccaggaacgctcccaggagtgtggcagtcccttcctagggggcccctcctggagcagctgccttgagagcccagcctacagcagagcctggtggggtggccgggctactgctacctggcttcactgctttcttctgccattcctcccaggctacccaggaggacgagaggggcagggtactggcggcagcaagagagaacccgcccaggagggcccagcacgggaactccagcctccagagccagcagagccacgggaacaggagttcctcctcacagaggaggcgctgttggagggccaggagcaaactcccagcagagcaaaatgcagaggtgaccagcccagggcacaccagccactgaaaaacccaacagtgggggctgccgtggggatccagggttgggggactctcagacggccccccaggcttgtccccatgcgtattctttgagctgatggggacgcagtgttcacagtcctgacaggaggcaggcgtgaccccagtcggggagtggacttggccctcttcacacccccagggcagaaagccctgttcagaggtaccagggagcaggcacaggccagggtccgaattcgtaacaagcatccgggactccacatgacgcaggtctgagaatcgatcccgggttccagcccagccatcattttcagagaatacgggccctgtcccgagccgccagccattgccaatggctgcccggaggaagggaggaaggggtgcccccagcttgtggaaccaacaagggcttaatggtagggcacgcccaggggcagacgccaagaaaggagaggagggggcgggggctccggccagggaagccgtgtcctctgcaccaggcagaacagggggctgggccgccctcagcctggatctggccagggctgggatgccagctctgagaacagggcccagccctcacctgcttggtttgcctcttgccaggggaaggggctcaggaaggtttctgagctgccccatgcccctgcctggagttcctgaccctcgggggaagctgaggctacagagagcacgaagtgcaaaaggcctggtggttggacccagagcccctgtccctgggtccccgctcctccccaccaccccgtcccagctctcccacgctcccacgaggccacatcatcttctgctcctgctgagttccccttcacgcatatgaaaagcaaattacaggagggagaaggcaaacccggggtgaacgggggcctcctgggactccttggacccccgggagagcctgtgagggcttctatgggccgactgggatctcaggagcaaaataggggcccctagcccacagcggagggcgactctaatcagcagagatcgcccagcatgccttatcctcagcagctcagggccacctgtggggcagggggagggggcctggccagctgggtcggccgcccccggcaaagccaggggacgccaggagcggagctgtgtggtgcagagcaactgtgtcccaggggagggggggtctgtctccgctcctcccagctgcaggccctgggcagccgcaacctctcagagcctgcctgcccctctcctgaggtctggattttgccagcacagagcagggacctcagcaatatgcccagcctggcgcaggcccagggcaggccctctatccgcagggcatcctctggtctacaagttctgtgacgacgtggctggcaccagggtctgagggctttgatgctggggaacgtccttgcgcctctgcagtagatgtgaaagtctgtggagcccggggacctggagcaggtggcctgggtggggctgctgccttctgggccaggaccagattccactccctggctggacagccctgggcacagcgtttaaacacccaacacttcaactctgctctgtgaaacggggatgattctaacagtgctggatcacggcatggttgggaggcttgggtgaggtcatgtgttccatgatcctgtccacacgaaggtcatgcagccttggggggcactggagcggcaggtgtggttttggggacctgccacgggccacagccctagaccaagccggaccatcgggactcttttcctggaatttgaatgctgagccgagggacactgggcttgtgctggggccactcccgagccgctgctgttggggcctgaacagcgccttccccctgccctccctgctgcaagctccaaccaaatacctgctcccggcttcagttagtcagagtccacttctggcacctgcagtcaaatttattgattgattgatttgagagagtcttgctctgttgcccaggctgcagggcagtggtgagaataaggctcactgcagcttcgacctcctggactcaagcgatcctcggcttcccaagtagctgggtctacaggcacacaccaccacgcctggctaatttttgtgttttttgcagagatggggtctcactatg

SEQ ID NO: 1244891 - DNA, 4001 bp, Homo sapiens
ctagagagagagaaggtgagagggagggccaagatgcaactgtgacaaatatttactgtgccagcttcccagaagcacgcctccacccacaccatagagcaatgttagaaacatgccacatctgccccagagcaggactggaagcactggactctgctaccaaagttggcagctcagctttgccatctctagaatggaagtgagatttccactaataggtatgaagaatctctgaaagtcaccagcaaatcagagatgcccagcatctttggaaagttcatttgtaacttcctgaactgaatgaatcctaggacacacagtgttgctcagaagcacagtggctagaatccttctttcccacaaggggctggagaatacaaccagggaaggagggcaggtttttgcagggaacccaaggatagttaagtatctccctggccagcctgagactgggaggtcaagagctgggagcagatctaaccccatccaaggagactcagaggggctgccccaggccaacaggctaagaactttccctggattccaggctatttccagagccttgggccactcaccttggggaatcttgccactgccctggcaggtgggacaagtcacgaagctggcatcagcagttccttcacaaggcacacaggaacaaaaagacttgctgctaccggtgctggagtagttgacagccttgctgccaatggctggtttggaggacaggattgacttgttctcatcctcccgccaagagcccagctgggaaaacgtcttacccattcttcaggggcgggggtttcactaatgagaaaagaccaaagttcagtgctaagcttgttagcactgacgccagatgtaattttggtttgaagttctcaagactggcaaggagcttcaccacagtttaagcaagctcaagcctaaggaagataggatgtgaaaaactgggtggtcacatgggactctcagaagtctcaatgcatttcgactcctttcattattttaaaagagaccaatctgcctacaaaagggaaaacaaaagaaaagcagaagttacttcactttaaggaacttccataagtgattgtcagagcatttaatttttctctggaaaagttgctgagctgtcattcagtttaagggaaggaagttggatagggcagaaaagagattctttgaatcaaggagagaggaggccagactggtcacaggtgtggttaagacccctatctaaagaagccctgggagaaagcagacacctcactgctttctgaggcggggtaagaaagcctgaggagggtcatagtgataccagggtctgtctttcactaggaaaactcaaggctaaatctggactctgtgtgacagaacgaggccggcaagtgagccacacagatctttctgggctaaaatatagggatgctcaccttgttcaggtctgggatcccaggctcctcagccgcacgagggcgagacttctggagtgcgtctttggggagaagggcctctaagggcagagtgggctgggctgggctgagctgagctgggcggtggtggggagaagcaccgcctggggccggcaaccggccggagtcctaggggaacgaatgtgccgcactggagagtggggatagtaaggacgctgacctccccgaagggccaagccgattcctgggctacatgggggctctgccatgggccgaccgggtggaagcggacggagaaggtgtgacttcattaagggaggatttcaagtcccaccacacacccctagaggccgttagtcaagcttggtacccgtgcggggggcgcctgtgtgttgggcgaggaggcggcaacaggaggtgtcttgacctccgaaaggtaaagtaggtataaagggtctagggagggccttacccgcggacgactgcagcgacagaaacggaagagagtggaatcgaaaatgcgggagcgaacactcccctcaagctttgactcagtgcccagggaagtcccgccccagcccctaagggcccacccccccgtcccccggtccgccccttcgccacgcagcagcctgagacgctgccagctcttcaaacgttacccgagggcccggacgctgcttccgcaaggactagccagtccgggtaggaatttccaagaacatttatttcaccattctttaggtggttatgtacaagtacatacataaccaggagagcaacccgggccctcctggccctcgattataaaactccgatggtcaagacaggtcccacccatcaacccaattacaccctgccgctccaccttctacccggaagccccgattaaaacgttttaaataatgaacggcctggctggcttgcagtttgaatcctggtttatttaagtagcattcaggagttatactgtaaataaacatcattatggctaatgactaattaaaatcaccattcattacaaataccaaccaggttagataatactattaactatcttttccccttcggtctggggttcatattcttccttttctggaagtcattttcatggataaaatatttagcattttttgttacctcttccttcaccaactgtactcaacacacttctgtaaacagagtgagaacctgggttcatggacaagctcttttccacttatcttcgggttaaaccaaaactttttcagcaactttgcccctgtccaagttttgcagaacaccagctgcctcttcctgttctaggcattctagggctagatacctgtgaacggacttcaagcattaaagaagtcatcagcatttcctatacctcacacacactcatttgcccaccctgaacttcactgacattaatttaggagcctgccttttgcctttcacatgtttctatttcccccactgtactgtaaaataagatctgccctgacattaagaaaaaaggcaactgttaaatttacttttccctttaaataacgggattttttccttttctataagattagcaaaatatttcacaatacctatattttttcccttaaataaaaatgtatgcaaaattactataatagacattgctcaataggtgctggtaggtttatcagcacactcttcctcctttcattgaaatgcggagattcccttgaagttggatactcttgaatgcaccatggagtctttagaaagcaacggtgccaattattaagtattgcaggaaaattactttctccttgagagaggaagagtaacaacatttctatcatgctctgggtgttatttcaatgccaaataactatgaagcttgaggtggattacagaaattatgagaataagaattatgagaataattcttaaaaacaacttccgaggttaatgtctttcaaaacctgaaaattaacagatatccccataaaaaatccacattagccaaagaaaaatactcagtttcaataaaagcagaaagaaaaatggttctatatgaagttgaagttacacttgtcaatgcactaaaatagttttatccaaatcaactgaaaaactgtcttcatactattcatccaatgtctaaagtgaaaatttaagttctggtctttagtttgctccccaaaatactgtagcaggtattgtcttggtaactcaacgatgggctctatacagattcatcagattaaaaataagcaagggcttctatcccataccccaatgacagaataaagatcatctctgagcagcaggcagttatttaatacaaggtcactcctcaatagcgttggctgtaccagtcgttgttgtttaactgaagaagttctgtcacaacctgcaggatattgtaattgtgtttcttcagcagccgtaggttcagctgcctgtcacagaatcccatttcaaagagatgggccatcagggctgctgtctgatcttcagaaattattggctgtgtagagacaagcaaagcaaaaaaaaaaaaaaaaattctgtataatttaaatgtttattttatacatttgt

SEQ ID NO: 1244892 - DNA, 4001 bp, Homo sapiens
gcctacaggatgttgagtggatctggtatctcacacatggaggaaagggctgggtaggggaaaaaccttcaggtttagggccaaccttcctccctcatccccaaatattggatgctaccacacctgcagaagacaaaaatgtaccaatacgtagtgcactcccaacgctcgaatatgaagaaggacagggccacggatgcactacagtgagccccaatggcttgggaaggcacgagattaaggaaagtctttggatcgacagacagtgatgggtcagaaaaggccagtggtggggctggcatctgcattcaggttcatcccttgctccctcaccatgtttcaagggctagagtcagcagctctgacttctgaattttaggacagtcatgtgaggagagaccagaagtgactgcacagatcggacctcaggctaccctaccccttatctgtgggccagcctggatccttcagatgagaggtaagagtaggctctccttctgctatgccacaaaggagtgctgacagcgacttaatatgcgctggaatcagcctccagtgtcctggtcctcctggtccacaattctctgacccatgtgcctcatctcctttgcctcttctgagttcccagtgctcgcttccgttgcctcttctgagttcccattgtgctttatatcttttgtttgttttttgacagagtcttgctctgttgccctggctggagtgcagtggcacgatctcagctcactgcaacctctgcctcccgggttcaagcaattctccttcctcagtctcctgagtagctgggattacaggagtgcgccgccacgcccgactaatttttgtatttttagtagagacgggggtttcaccatgttggtcaggccggtctcgaactcctgacctcaggtggtccacctgcctcggcctcccaaagtgctgggattacatgcgtgagccatcgcgccctgcctgtgctttctatcttcacacacttctatagcacagtgcttatcacactgaattacagatttgtatctacctcctcctcattgtaaaaagaaacggtggggtttttattattcctattatttttgtagacttgggttctcactatgttgcctcctgcctgcgcctcccacagtgctgggattacagacgtgagccaacatgcctggccaaaaactgtattttactctcattttgggattttaagtgcctagtaaacagcaggatttagcacatcgttgaagatctttgaactggaaggattggctacagcagacactattgtgtcaggtggctgaagggagtcctgatagaagtgggtcgtgtgggaaaggtgggcaggcagaaaggatacagatgaggctctgggtgctgttgaacatggagactcctgagaggaaaccggccagctccactgcaaagaggcccagggtgacagagagcgcggccaccagcctgcagagaggaagtggactggcccaggcctttggacttattctaagacccctccactcccaccacctcttcgttctggccaccccgtcccaagagctcactgaatgtcctgcttgtcatactcctcgggggtgaacgtgagaggcaggcaggcctgtatgttgctgtcctgggagcagggcacaggaagagaagtgaaaaaggggcaggctgcagggcaggcctgggggcggcgggaaacaagaaaacccaagagggtaagacactgggagggggcagggtaggactaggaccactcagagatgggaatggggacggattgagtgcagccgtgggtcttacccgggaccagaataaggtgatgacgaccaccagatgcgccaggagcgtcaggaagcgagagggcacaagccctgagacccggcccatggccctcggggacaagggcggcggtctctgaggctggaagttcagagacagcgactcctgaagtctccccgcaagccgacaaatctagacgaacgcctccttcccgcccgctcaggcaccgcccagttgccttggtaaccgtgtacgcgggctcggcgccgcgttctcggaaatcctcgcgagcagtacattctccggctgctgcgggtctctcagggccagcgaaggtcaggggtacccgaaggcgcttctaacctaacggctgggtacccgcgcgcagccaggccctttgttcctcagagggtgcgaggtggcacagccccgcagcgcccgatctgcccacgcagggcggatgaacggaaacccaccctggcctagcttggggacaccaatgcttctgctgttgcccacgccgggagcggcccccagccccagctacgctgcccagttgtggatcacttgagaccgctgccaccaccacgccgggctgagttccccgccatgccgaagactcagacccgctccccttcccctcctctgcatgcctttagcttcccaccaagctgggcctgagaaacaagggacccgaacctggagaggccggtgttcctggactgctctgcagtcacagattgtcacggagcccctggttgtctgaggaccccaggcctgaaccttccttgaggaagactgatttctttcagactactttgctcagtttggtgagggatttgcagagtgcaaaaaatggccagcgtccttaaactagcatggggataagagcagagcaaggtggctggaaagagtgggagtggacgaagggaatgggacagtccctgcgtctctgggaggcttggagccggctggaagggaaactcaactcagatttctttgtcccttggaggtgctgggcctccgacattgcccagctacagtccaagaagctcttatcatcggcgacctcatgacctttgggcctcagcgcaggtccctgcagatctgaaagttctttaattgctgagtcaagtcccatcctcaaggaacctcccggcccatctcccaggagaacaatctcttcctactccccactccccatctcagtgcttttagccagcctaaactacaagcccaagaggcatttctcattccttcaacaaatatttgtatatgtttattgattacctagtaagggtattctagtcagggagatcaacaacagacatgcaaacaaataaatccgtaagataataggcgctacaaacagggaaaagcgggctgtgcactgtggctcacacctgtaatcccagcgctttaggaggcctaggagggcggatcacctgaggtcaggagctcgagaccagactgaccaacatgctgaaaccctgtctccactaaaaatacaaaattagccgggcgtggtggcgcgtgcctgtaatcccagctattcgggaggctgaggcatgggaatcgcttgaacccaggaggtggaggttgcagtgagccgagatcgcgccattgcactccagcctctgcaacaagagcgcaactccgtctccaaaaaaaaaagaaacgctagaattataattctataaaaatagggcatttataattctattaaaatagagcatttattttgttttattttatttatttactttttctgagacggagtctcgctctgtctcccaggctggagtgcagtggcgcaatttcggctcactgcaagctcggcctcccgggttcacgccattctcccgtctcagcctcctgagtagctgggactacaggcgctcgccaccatgcccggctaattttttgtgtttttaggagagacggagtttcactgtgttagccaggatggtctcgatctcctgccctcgtgatccgccagcctcggccttgcaaagtgctgggattacaggcatgagccaccgcgcccagccggacatttaaccttaaactttattttagaaactttggccaaaaattggccgggagcggtggctcaggcatgtaatcccagcactttgggagaccgaggcagggagatcacctgaggtcaggagtttcagaccggcctggccaacatggtgaaacctcatctctactga

SEQ ID NO: 1244893 - DNA, 4001 bp, Homo sapiens
tgtctcaagccaaaacaaaaacaattctcagcatctattttcttagatcaataaaagcttaacctgtgctggcaaggctcctgttccctgcctgaggcatccctattcggctcttttcagatgcttttagtccaacaagagggcgtatgtttctaatactttgttttctaaacaggttatttcgtattactgtttgcattgaatatcttgaaaatgtttgctagtttttaagagcatctgaaaaccattgaggtaacttatttaaatggtccaatctaataccaggcgggagttagaaaaacaaaagtgtgtttaccactgcttttccaaggaagaggaaatgcagaatgggcaacgctggataactgggctaaagaataaagtgcaagcaagctaaaggattctatcacaactgccaaacaggaagaatcttcccagctgggaaagccatctgcaagcaatagcaatgaacacgggatggaatcagtcacagaaaaggaataatgcagagtagttgagaggaagataacttttctgttagacaatcctcaccaaaaagacggggagggggagaaccagcaaaacaaaaacttttccttttttgctgaccgctgctataacaatcaagctttagcggacagttaatccaggtggctccaccaatacatcttctcccaaatttctagtggctgaacagcttctagtggtttccactagctgaaactgcttcccagatgcaaaaactgcaacttgaacatgaaacacggaaactactccaatctcatcttctagaaatcagttattcaaatggaggtccctgttggaagaaacacgctcctagctccctgcccacacaccattcattaggaaaggtcactttaaaggacttctacggcaggagcgcttgcacagaaccatccaaaagtcttcagaatcttccctcgaggaagtggccggctctgggctcggaagagacacatctggcgggagctaaagctccctagtaaacgtgcagatcaaactacccctgccgcggccggcctgctctgtgaaggcttccccttctttctctctccgggggccctgccttcctctacacgtctggggccgcggccgagatggccacgcgcgtgcccaggcgggaagggtgcttcagcagccgatcggcccgcgggcagctaggcgggtccctgaggcctgcgctgggcgccagttcctttcagcacggcccggcctcgggccccgccccgcatggccgctgcctaccttactcagcccggctaacgccccttcccctaagctctccgccgaggccttcgacctcgctcccacccggatcccggatcctccggaactggaacccagtatgcccggcgagggtagggggagcgcggggaaaccagggaaggaaggctgctgcagccctcggaggccgcgctgggctctccggccgctgagccgcctgcactgggggcaacaagcccttggatctcacctctctcgggcgctgccgccactgctgcccgggccaagacgcctccttccccaagcggccatcttggagacactctgcttgccaacgtctcgcgccaaggcggcatcgggagagcaggcgggccgacgggaagtgtagtccggcctgcggtccggggccgctcggcaggcggaagccagacccggcggaactaccgtgcccacaaggcagcgcgccggaagccccgcccccggggtcgccggggcccgtagtccttctgcgagggcgcgaggactccaggagccgtcctggttcgagcatttctgaagaaactgagttcccggcgttcgcagcctgggagtcacaggcgcccacccaccggtaggtccttgagtttcgagagccagtagctgaaggagagaggagaggcaagtgcctacaactcccagagcactgcgcggaggcgcccggccgcgctgtcctggccgccaggctgcctctcccgctgggggccgccgcgctgtctgcgggctactagcgccgggcccctccgcgtcgccacgcctgcccttcacagccttggcccataaggtcaccgaggggcgggaggcgccgcccgggccctccttggaggcgggcgctgctcccgcaccatcctcccccagttctcttagactccggggtactttggaggccgagacagacacgctgtccctgctgccacggaggtccctgcttgcaggtgcaggctgttagaggagagggtctgaaaacaagaaaggggaatagctgtatgataactgcttgaaggcgagagggcccagcgacagctctgttttagacagggcctccaggcctcttagactcagtccctgccacgcacccactcctgccctggccgctgcgacggcataatctcgggatctttgaaggcagatgcggggctaaaccatcccacctgacgggaaccctgccacaggacccgacatatccctgtctggacactgctgtaacgagtcaaagtcaggaaggactaactggagcccagagattcccaggtgctgctgcctcagacctgtggactctttggaggatctcttacagtttgtgaacttctcagttcctctactgctcccacagacaacgttgctaaacatattaattggtcccataaatacttgagcaaaacaaatgcgaaaatctgtcccgaattcagcctagaagaagcccagccctgcgcgtcacacttctgtgtagtggaaccccccttcccaccccgccgcaggccacagcaggagggccagcagacggaaaggcgaccctctccttgttgaggattcctttcgatttccttccagctgacattctaccacagttttagctgcttgcaatcctctcaccgtccctcatcacctacagtgtgtgattcaaattccttagcacaatcaagaagcccctccttagtttggaagttgcctagctctccaaattcaactgcctacctttcccgtctggaacttgccaggctagtaaattcagagggtttgcagatacgtagatgttctatgctttacctaaaatgcttttacctcccagccaacttttttttttttttttgagacagagtcttgctctgtcgcccaggcttgagtgcagtggtgcgatcttggctcactgcaacctccgcctcccaggttcaagcaattctcctacctcagcctcctgagtacctgggattacaggtggtgccaccacacccagctaatttttgtatttttagtagagacggggtttcaccatgttggtcaggctggtgtccaactcctgacctcatgatccatccccctcagcctcccaaagtgctgggatttacaggcatgagccacggtgcccagctctcccagccaacttttgtccttcaagaccttgtacctgtctggtctctaaaaagtacctggccttcctgttgagtcatacagccctgcctccaagtgtcagcgtagttcatgctggagacctcttaacagttccatggtatgacactgcggatatggctgtcttttctttgtatcagtgtggtgattcagagggtatactagggattctagaacgcacttctggctcaggggctgcttgtgtaacttctgtttctcagctgcctggtttgtatcatgggatgatagtatctcccctcagaggattgcggtatttcatgaggtgatacgtgtatggaggccaagtgctgttttatattttaagtgatctacatcttgattttcacaacaactgtataaaagtgatactgttggccaggtgcgttagctcacgcctgtaatcccagcactttgggaggccaaggcgggtggatcacctgaggtcaggagttcaagaccggcctggccagcatggtgacacctcgtctgtactaaaaatacaaaaattagccgggcatcgtggcacacgcctgtaatcccagctactcgggaggctgaggcatgagaatcatttgaacccgggaggtggaggt

SEQ ID NO: 1244894 - DNA, 4001 bp, Homo sapiens
aggtcacaagtgcagcccatgcagctccagtgcgcagacaggcagcccacctccctctcccccaccttcattctcagtgttgcacacagagcctagagatttctggttccccgctatgctcccacttcgccccacctcaccctcgcccccctgctggctcgctgctctgcctattcctcccatagagaactgaggttagctgtctctggtgaactgaacgcaaaacaaccccccctggtgttacctcagccgggaataaccaagccacccatagagggaggtctgcctgctccccgcccccctcctagccccaggaccctacgattccgagagcccctctttttcttattctctcaaccttgagaatgcgctttggtcagggtgaaagaggccgctggttagagaccttgggcacactcctggcgagcttgagcaggctcttagggactgggcagatctgggcaagagctgagcccggcacaccgagggcgctccaccaatgcggagagcccactgccccctccatctaagcgccctccattctgcctgaggctcacccctcagcgtggagcatcgaaacacccccgccccccaaccccgccacgccttgctggttaagaaaatgtatcccaggtcggctggtttcacgttaggagggagcagagggccccgcttctccactctcctttcggagctctctccctcccacctcggtctgctcccctcgcctcctggagcgtctccagcttgcggaaggcccgctgcagcctccttccctctggtctgatttcccattcttgggggctgttcaaaaacccgctgccccccacccgtatgcccgctgtcccaccgccaaagcgcgccaacctcaatccctccttctcccaccccctttaccgcggagcccggggcgagcctggggagcagacgcaacagattgcagaatgcgagagcgcggagcccgctccctccgcgcgcggcccgcggcccaccgccccggcctgtgcgggtgcccagacccccgccctccgggctcgcctaagccggccatttagatgcagctcacaggaccgcgggcgtgcgagccgcggcggctccccggcccggagtcagtccacttcccttcccgaggaccgccgcaggaagcgaggcgacgggcggcgcggccccgcaccggcctgcgcgcccggggcgaggaaagacgcgatcccggcggatcccaacagcccccagcccggccggctgcagggagagacgggggcggggggcggcctggacgcgatccggaggatccctcggatccctctagatttccgtgggcggacacgaccccagaccttcgggttcgaacccttctttataaccaggagaggactggagcgacaccctccccccacccttttctggcgccgggctcggtcccctcagctgagctcgccggagggctcgggggctggcggtaactcgagctgcagccagagacgccaaacccggagtggcggctgcgagtccagggggtgtgggtgctcctctccccagtcttccccgtaccccctccagtggcgcctgccgcatcctcacccccagtccgcgccgcgacacttaccgtgggcgagtagcgctgagaggcagagcagggcggcgccgccgcggcccgacatccccggggccatggccgaggcgggggcgggaggggtccgagagagcaacagtcgacgacgacttggccccaggctgggcttggtcacatccaactcagggctgccgtggcgcccggctgtctcagatgcagctccgggaccagagagtgcaattcggggacactttgcggggagggggcgtcccaggcgctggcggctacaccctcggagccggtgggggcgcagctccgggcgggaggagcctccacctcccccagctggtgccccctgcaggatctgcgaggcgcggggggagctgcacgtgcagtccggagcccggtggccgcgggcgtcccgggggctacctagagcccagtgctgaatctcccggcctcacggcccagctcgaatccgaactcactcgagggtgccgacttccaacgcaatccccagtttcctcggtttcggtagtaaccgcacatggatagcgccgctttcttcctccaagcccctgcagcagcccagcataaaaatcccaggtcaggtgcaaatgaatgctgtctttctcaaagaaagagaaaatccagacaactttaatccatctggagaaggaaaagtttccgtgcggtgctgaaactggcgacgccggtcgccaccaccctaggcgacgcccagaccggatgcccgaggcgggcggccagatgtttgtcccctcgcaaggctcgctcctccgctccagcgcgctttctccagtctggatcagggcccaggctccacacaggccggctcagcgcctcctgcccaggcagccgctcggcggctggggcaagggtggcgcggccagaacgggctgccccatgtagatggggcttggagaagcgagggagcgagaaagccggctaatgcgccctgccccgagcccttcctgcccaggacgtcgactccagcttgatgaccataaacgctgtaagatgcagaggggctcctgcagctcacggcagctccgggccaccccgctaaggtctcgctgtctcggcagagaggcgcgctgccccgcctcgctcctcgccttccctgggggaacctgcacaaaccttgaacttttctggggttcagagtctccgacgcctcctccccgccgcccccaccctgtccccggacgcccgttcgcccgctgtctcgatgctgccgggcatcggctcccgctccctccgagtcagtttgggcgagcggatcgccgcgccagtccgggctgcgggcggtgagacgcgggcgcggcgccaggggccagggcagccggcacctgcgcagcttgcggccagggaagcggcagctggtgcctacggggccgagaggagaggaggtgctggcaggggagccggctccccatggacgtgtgtgggggaagaagaagaatcgaggagcaaaaaggaagaggaggtgggggaagccacagttgcacgaagcagccgccgccgccgtcgccgcctcctcggcgctcgcgccggctgctccgccgtaaatgactcgagagagacacacacactcgcgctcgcccgccctcctcctccgtccgggattcagcgcccacccgggcagaagcgggcgccgagcttggcgcgctcactcccacccctcccagattccccgtggtcacgtggcccccgagcgcgcggcccacagctcgcgcgccacggagactccccgactcctagctccccctcctctgtccacgtgtccattccgcattcctagcctggcggcgcgcgcggctccttaatgagactcgggccaagggccgacctcgcgattccgctcgcccctattttatgtttgatttttccttcccaacgccggctagcgctgggacccgaatggggccggccagctgcggcgggaggagcctccacctccctcagctgcgtttctccagggtagacgccaccgcagtcactgatgtcccttttcaaaggatgcacgctccccaccgggcgccggaggtgttttgcagccgctcttccagaggcgcgggtagggggcaccctacccccacccccagagttcgctgggcactggctgggaatcagcctcgctgctgtgcccagctcctctcgggccgcgggggctctggggctcagcttcgtgcgggatgggtccggggcgcagctgtgggaaacctatttattctgttgctggggaaggaagacggagaagaggaggggacagtgctttcctacaggttgtttagcaagcctttaaagaggcatgaggtgggggtggggaactgcccctcttgcatactcacccaggcacctgctgactagcgggaggggtggctggagtgatatctgttcccaccat

SEQ ID NO: 1244895 - DNA, 4001 bp, Homo sapiens
ccaaagtgctaggattacaggcatgagcgccgtgcccggctaactcccacttctatgacgtttaaaacttggtcaccatctcagcccagagtctcagtgaatgagatgggaactgtgttgtttgtatgcagacttcctatggtccctgaacagtatagaaaccaagtttccatgttttttctaaactctgtatcttcttccactgcagggccctactctgaggggctacctagaccacgtactgaagagcatgtccttacctgacaagtgacgttgcgggtgatccgtttatattcctcattggccagctgtatcttaatcttctccagccgggcaactagttctgggttctgaagcagaaaaatcaaatgagaagaatgatattcccagcttgttagaaagcacatcacaatcattggttccaggggtaaagcactgctaaaggtatcaggagacccacatactagtcgtaactccagtgctttgaaactgttttttttttttttgatctcaattttccaaacagctgatggggaggacaatatctggctcccccagatcccaaagatttcaaaaacaatttttcaagcctaaaagttgatttataagttcagtgtatcatggataagcccaactcagtcaataaccactctcacaaacatatcccttacatacccgtggaggcttcacaacctctgggagatagatttcactgccttctaggagctcatggaggtatagtttggaatctgagaagaaaaggtttcacaaacacaatgatccacgagctgaggttgaagggttaagatcaagaggggtgtagcccttctttctaccaaaataaaacagggccatctctacattaatccatttccaggatcattttcaattgaaaagaattttggataattccatgtaggtatctcccagtgctgcgcaggtgactttagctgtcagctctcaattatcctgccagtgttataactaacaagtaagccatttacttgtgcctttgggttagatcagttctgtggccacaacagctcttccctaaataagtttaggtcatagtgatgctaaatgctcagaggacactaatactaggcaatctctttctaaggtcctttctagttctaataattgagcagtctaccctttgcacttctggctggtctatgttacttctggcaaaataccttatgtgctagtttgtcctgttccttccctttacacataagggaactgaggcccagcgaggagaaatgactccttcaaaggattagtgacagagctaggactggaactcacatgctactctcaggccagatctttcaacacagcttttgccatcctatattaaaaaaacaaacaaacaaaacaaagtatcagatttcaccactcttgcttttgaggtggaaagaaatccggattcctacaagctcactatgctaagctgattcctaaagtggagaaaaagaagagacaaaacctgtgatatttgtatttggtaaaaacctagactttctcaagggtgaattgggcctaggtgtgcctggaagtgaagagggggctctcaaaagagcagaaactgcacaagcaaatttgtcatccacgagaaattcccatgggagttaagaaagtgggtggccctgggatttatggagtgactcttgacttgtctagatgagtgctccgtagaagaaggggaatgatgggaaaagacctcaggagggaatcgatctggacacaaggaggggaccccggactggagactggggctcacccctttctctcagatgctggtgcagatcccggatgagacggaaagaaaccaagcgttgggggccactggagctatcaccgcccttgtgcttcttccccagcgcggcctcaagctcggcccgcagctttcggggtagccgctctggctccagctccccgccggggcccaaagcacgcaccaatcgctcgcccgcaagcaaagaggacgccatatctagccggctctccggtcaggtgaccccaacccggacttccgcccgccgcgcgccggaagtaacgctaagcgcaccggaagttgctctgagctccggggtgggaccaggcgggccaagagggccgggacgccgcgcggggcagtgtgggactggggcggaacgccgcccggccgcgggtcgggctctgtgtcagcagccgggcgggcgctcgggcgggacatggcagcctgtacagcccggcgggccctggccgtgggcagccgctggtggtcccggtcgctgactggggcccggtggccaaggccgctctgtgcggcggccggagctggagccttctcgccagcgtcgaccacgacgacgcggaggcacctctcgtcccggtgagggacggagccagggggcgcgaggaactgggcctggagcccagagagcgtgttcctagccagtgcggaggccaggggcccgggcctgctgagggtgactggagtttgacccgggagagggtcccgagcagggagccgacctgcgctgtctgggacatgtgccaggagcagggaagccagcgcggcccagagccctggttgtacagggctggccctgggggggaacaggttaccctccccaagtgaatcctacttccccggctggggtccccagcaccgatgtcagagggaagctttttaattcagccctagggcattggcttgaaccctcagcctttggatttggtgaaggtctgcctcagaaagatgctagaggtgggaaacgagactcttgggtgtggaccctcgtaggccccaggtttccaagtgactttggggagatcgattttctatctgtgacttggggaagggggtttgaggccatggggatggtgtggaaactgtttccacggatgggacaggcggatcaaatgggctggtggatcagtgggaggaagcataaagttcacatcttcaaaacagtaaaaacagcctttatttgaagggcccctagaaagagcagccctgttcagagtggtgactgacattttagtggctgatattagacactgaacattggggagagatgatagctatttgcaatttaagacccctgtgagaatatgaacaaaaacggtattgagagagcgatgtgccgtaggaaatctagagatgtttaagcttttcaagggcaatgtaagggctacaggttagagggggagatggacatggaattataatacaggacaaatattttttgagcacctcttgtacactaggctctgagggggcagtaccagctaatcagactcaggcattgctcccagggaatttacagtatttaataaagataagacatggacacaactgaaatgtaaagggagcaggatattgtttgatgacttgtgatatagaaaatgtaagaaaagaagaaaaaaagatactccccttctaaaaaaattgaaaaagtgagcaagacagttaaagtgctgtgggaggtcaggagggtgggttagggaagaaacaagggcaggggtacatttgagcagagtgtgagggcatgatatgaagaatgcccagtgaagagagaagacagtagtatgggagcggtcacatctaacactgggagactgtggaggttttcaccaaggaggaggaaagcctttcctgctccagctggtcccactaccccaaacccttctctgctgtcatcgccctggcccctcagtatcctaggagctttttcttatggataactaccattaccttctcagcttttctgttgcttgttcttttccttcctactcagaaaccgaccagagggcaaagtgttggagacagttggtgtgtttgaggtgccaaaacagaatggaaaatatgagaccgggcaggtgagtattgggctgggtcatctttcattttcatagagtgctctgcttctgaaaaaagtcagattaggtcacaggcctgcatggtatggtgttccattcattccaccttgatgtttggtgccattccagaa

SEQ ID NO: 1244896 - DNA, 4001 bp, Homo sapiens
atggagtctcactctgtcgcccagactggagtgcagtggcacgatctcagcacactgcaacttctgcctcctgggttccagcgagtctcctgcttcagcttccctagtagctggggactacaggcgcatgccaccacgcctggctaatttttgtattttttggtggagacggggtttcaccatgttgctcaggctgatctagaactcctgacctcaagtgatccacccgccttggcctcccagagtgctgagattgcaggcgtgagccaccttgcccagccaggagttaatactttctagaaatataagtcactgaattagcagaacctcagaacttaagcctgttattttccggtcaaaggtttgcattgagtgtctggctagaaactcataaggaattgttcaactgatcttgagaggcctactctaggtcctcaagaaagtcctcagttgggccatctaaccaaagggaatactgcagaaagacctgtttccagaaagttcgaaattcacacacacattacattagaactctgatcctgcctattaatattttaggaaaaagcgcttcccaagggtttgatttttaagtttctcagaaaattaagcagggaggaggggtaaagacataaaaccgtgtgttttgtgccgttccccaattcttccaaacggaggaaagcctggaagcggctcatactcaccacccacacctctgcatctgggtcatttacctggaacgccagaataccaaggtgttagcagacatcctgtgctgttccattccttttaaattcatttaagcacattttttattaatttgttaagtgccagacactgcaataggcatcgagggtacaaaatctgaacaggatatagtccagatgaggacgggtgaaggggtttctggctgacacaacagatgtttttaacaggcagccacacatttttgaaaagccttcacgggagctctggagaggactcgccaacccagaacgggtattttaagggccctccacccccaccagtctcaagaaatgagggaaatgattatgaagggggtccccaagccgactaaaaagtttaatgatgctataaagggttttggtcggcttcgtctcctaggccctgagatatgttcagtgtcgtccgcgggccggacgttaacgcaggagccagggccgcttcttctgaggtcccctgggaagttccacgcgcggaaccagccccttccagggtgtgagccctggtatgggactcgcttccatgaacacatccgcgtctcttagacgggggagaaagtgggggctccccaagcagaaagcccaagtcccgtcctccccactaactgtgcgcccctgcgactctgcccgctagtcagttacacggcccgctaggccagggggcggagctgggagccgggcgggtccccctcccaccgcggccgcctgacctgcaccaaggccgccagcgcgaagaaggcggccatgagtccgttgcaggcccgccacagcgctggcgccatggctcggagaacacggcgcggggcggtgagtcctgccacgtgcggggcggtgagtcctgccacgtacggtccgccttcctccttgcgcggagggaccgagacccccgcctcggtttcggtgccttggggacactgccgtggccgtcgctccgcccgggggcggggagcgaagggcgtgggtgtagcccccactcagcgacccattcagcccgccccgaacgccgcggggtgtaggcggcgccgtcctggtttcgcggatgggaaagcgagtccctcagggagcgcaggtctcggtggtggacggaagtcgaatttgaacccgtataggttcaactccaaaccctgttttcactaaagctaccttcctcacaaaaaaaaaaaaaaagaagaaagaaaaaaaagaaggaaaaaaggaaggaaggcaggcgggaggggagagaggaagaaagagaaagaaagaaaaagaaagaaggaaagaaagggctgggcgcagtggctcacgcctgtaatcccagcactgtgggaggccgaggtgggcggatcacctgaggtcaggagttcgaaagcagcctggccaacatggtgaaaccccgtatctctactaaaaatacgaaaaaattagtcgggcgtggtggcgggagcctgtaatcccagctactcaggaggctgaggcaggagaattgcttgaacccgggcggcggaggttgcagtgagcccagattgtgccactgcactccagcctgggcaacaaagcgagactcctcaaaaaaaaaaggataaaaattgtttttacaaaaataagaaagagaaagaaaaagagatgtgtgtgtgtgtgtgtgtgtgtgtgtgtgtgtgtgtgtgtgtgttctgtttagtatttatgcatttccttccaaagctcaggaactttcaaatccctgtaagcattatggtaatttctagagtgacgacagttatattaacatcttatacggctcacagcttttcggcagacaggctcatttatcttcatgggcttttattataaaagatatttacatattatacatatttacaattctctcccaccaccaaaaccaacaaaatttccaaaattgctcatgaatttcttatgaaccgaagacactgaaatattcactgttctcccctagtctgtctggtctttttctgttttgtaattcgcccttctgcttagttcctccccgggctcatttacacatccataggcctcatttctgctgttctaaagagtctttatcgcttcaaatcaggagcttctgtgcctgtcctcttttcctttgagctaaatctcctaaaactgtctagttttttttttctttccctctcagtttcattcttttcacgaaacacttatttcaagaacgttgtctgctctgtgcctggtgctgggaccgtgaaggtcccgtgccgggactaggcagggagcctggcggctggcgggggtgggcacccgtgtttgcagaggtggggtggggacagcggggaccagcactgggtggagttccacagctaaatcagccctgggattggaaacaagcgaagactattctcactgtgcttttccttacataaaagaaaaaaatgagagcgagagtgctaggggctgacttgcattccccctgcacccccaattcatatgctgaagccctaacccccagtgcctcaaaatgggactgcatttgcagacagggacttgacagagatgattaagttaaaatgaggttatagggtggaccctaatccaatatgactagtgtcctgatacgaagaggggacagttacagagggaagaccacatgggcacacagggagaagacggccgtctgcaagccaaggggagaggcctcatgagaaaccaaccctaccaacatcctgaatttggacttccagcctccagaactgtgagaaaataaatttccgttgtttaagccacctagactgtggtactttgttgggacagtcctagcaaattaatacagggaatgattataatacccacaaggaaacaatggcatggaagtgcttttaagctcttgaatgccatacaaccaccatgaagttttatagttttcactgttgtctgggactttctttttttatttctatttttttgagacaaagtcttgctctgttgcccaggctggagtgcagtggcacgatctcagctcactgcaacctctgcctcctgggttcaagtgattctcctgcctcagcctccagagtagctgggactacaggcgcccaccaccatgctgggctaatttttgtattttttttagtagagatggagtttcaccatattggccaggctggtctcgaattcctgacctcatgatctgcctgcctcggcctcccacagtgctgggattacaggcatgagccactgcacccggctgggactttcaaagtcaccttagtgagcgtctgttggttttgcctttgcagggttcagtcccct

SEQ ID NO: 1244897 - DNA, 4001 bp, Homo sapiens
ttgtgtgtggaactcaggctttgcctgaaaggaaaaagggtgtacaaaacgggctcctgggaagcctcgctctggaatcttcctgactcgtgtcatgtgggcatacatactctctggttctcacacgcgtgcagagccacctgcataggcacaggcgtgtgcacacgtgcacacaggtgcatgtcaggaggtctttggagcacagttaggcagtctgttggatgaacacaaggctcctaactcctccccagttgcactgaggaagccaccagcacatgtgcaccacccacacatgcactcactcatatacatgcccacacactctcacatgcacacacatgcacactgacatgctcacacactcatattcacatgcacacacaactacatacactcacactcacatattcatatttacatacacagccaggtgctcacacatgttcatgttcagcacatgcacacatattcagatgcacacacatgctcactcacacacacacccctgccctgccagccctcgcgctgtgaaggggaagctccccaggctggccccagctccggaggagggagctggggggaacggagggggccctgtggaccctccagcctgctgggatccccttctctctccccggactctgaagcctctgtacacatttggaacccctgcccccgcggcatcaggaggtgtggggtgaacagctctgacagtgcctgacagggacggggacaaggggctgccaggcccaaaccccggggagcgtgatcaagaaacaacccctggtgacttggatgaggccccccaactacacacctctaggcttccctcccccactgtcgccccacagccccctcctccggctgtgaggggccccgaactgggctccctccctcctgtagcccttgggctgtcagttttgggggaagacggagggtgatggggagggagcggagagacaccctggggcagagcgggatgcaagagaggggtcctggaagggggtctggcggggcaacacgagcagggcggggttaagggggtgtcggagggacgaggtcgcggagggaggagggccggcgcggtggccggttaccttcgcagatgcgccagagccccgagtgcgaggagagcagctctgcgcgcccgggccaggcgctgccattgccggcgtccgccacctccaggatgtaccagtagtcgctggcgaccgcggcggccaggagcgcgaagctgagcagtgcacccagggcggcggccaggagcagcgcgcccagccgggccatgggggcggccggcgggaggggacgggtcgggggtagcagggccccgggggcggcggggggcgcgcggagccgggagccgggggacggggggcgggcgggcgcggcggcgcccggctcttctgagcacgtccccgctcctgcccgcgcactggcctcgcgggccccctggggtcgcagggagatcgaccccacctctctgcggtcgctgagctcgcccctgggggaaaggagaggaagtcgagagccgcgcggcgaacctggggcttgggctccaatcccagcgtccccacgggctggccccgggtccctgggcacgttccttaatttccctgaacccccggctcctcagcagccaaacaagatgcacctgcctggccgggctgtgcagggcttgagaggaggagggaggatcggccagagaccgaccccaggaggatggccggccaggcagcaggaccacccacccgtgctcctggaagcataggagcctggcacgggctggccctggggtcctggtctgtatcagtcctgaggaccaaccagacggcatccggtgaagtgcagtggctgggccccacagccgggcggggggctgcggaaggaaaaaaccttgttttggattcactcataattacaaatgccccctccagcaaggccggcctctgcctgtccagtcactcacggagaaaacaggcagaaagaaccttctaggacaggcgtggggtgccagtgggggtgggaggcagaggagccggcgagaggcccccacccatccacccaggactagccccatgagcaacgcccgcgtgggcagccacacaggcggaagggacaggctgggcagccatcgcctaaggtctggggttaaatctcaaacgaaggggaggcttcctctgggttgccacacagggctgggcagagcctgcagagaggggatcagaggtctgaggacatcctcccggatggtggcccttggaggtgaagccaaggctctcttcttggggcgttttggccatgctttcctctgctaggctcttgttggtttgaggaatatagtcaggaaggaaaaaccagcctagcagttattgaaacaatatttcaaacagagttcagacagagtgacagaatggctcaggtattttgtagccgtcctcacacctgcagcaccagactgtgttgccgcacgtgggcagctctggggttttccagcccccttggagctggggcttccctgaccacagcccctctctgggagccatgtggcatccagcagccctgttctctaggggtggggatagcacattagatctggaaggtgaaagaactcaacaggtgctcagagagtagcagccgttataaaggcagaggcgatagggatagggggtggggcctcgttccccccctaaacacactgcagctggggaaagaacggtgcgtgatgaaaactcgtggtactctgacactgaccccacaataaagcaatataacaagaatcaatattgcttcggttggatcaacacctttgtgcatgtgaaaggtacgaactgactctgcagggagaacagaggagccccatttgggctgcgtgctccatgtgtgtcctcccggtgacttccccttctctctctcactctatttatttttttagagacaaggtctccctatgttgcccaggctggactcaaactccagggttcaagtgatcctcctgcctgggcttcccaaagtgctgggattacaggtgtgagccaccaagcccagcctctcctttctttttttttttttttttttttcagagacagggagggcaggggtctccctatgttgcccaggctggtctcgaactcctgggttcaagtgatcctcctgcctcggcttcccaaagtgctgggattataggcgtgagccactgtgcccagcttccccttctcttgagctgagagctggtttgagatctgttattgcacccacataaagcttacgtagggccagatatggtggcttgtgcctgtggtctcagctacctgggaggccaaggtgggaggattgcttgaacccaggcaggaggttgaggctgcagtgagctgtggctgtgatcaacagagtgagaccctgtcttaaaaaacaaaaaaaggccaggtgcagtggctcacgcctgtaatctcagcactttgggaggccgaggtgggaggatcacttgaggtcaggagttccagaccagcctggccaacatggcaaaaccctgtctctactaaaaatacaaaaattagctgggagtggtggctcatgcctgttatcccagctactcaggagcctgaggcagaagaatcacttgaacccgggaggcagaggttgcagtgaactgagatcacaccactgcactccagcctgggcaacagagcaagactccatctcaaaaaaaaaaaaaatgcttaacgccactgttatctaggaggaggttttggccaggtgcagtggctcacgcctgtaatcccagcactttgggaggctgagacgggtggatcatgaggtcaggagttcgagaccagcctggccaatatactgaaaccccgtctctactaaaaatacaaaaattagctgggcctggtggcgtgtgcctgtagtcccagctactcgggaggctgaggcagaagaattgcttgaacctgggaggtggaggttgcagtgagccgagatcgcatcactgcactcca

SEQ ID NO: 1244898 - DNA, 4001 bp, Homo sapiens
cgggtgaattgcttgaggtcaggagttcaagaccagcttcgccaatatggtgaaaccccatctctactaaaaatacaaaaattagccaggcatggtggcatgcacctataatctcagctacttgggaggctgaggcaggagaatcacttgaactcaggaggtggaggttgcagtgaaccaaaatcgcaccactgcactccagcctgggcaacagagtgaaactctgtctcaaaaaaataaaaataaaaataaaaacaggccgggcgtggtggctcatacctgtaatcacagcactttgggaggccaaggcaggcggatcacctgaggtcgggagttcaaaaccagccttgccaacatggcacaaccccgtgtctactaaaaatacaaaaaattagttgggcatggtggcaggcgcctgtaatcccagctattcaggaggccgaggcaggagaatcgcttgaacctgggaggcagaggttgcagtgagccgaggtcgcgccactgtattccagcctgggcgacagagcaagactccatctcaaaataataataataataataataaaattaaaaacctagtatgcatcagaaccacaagatgagcttattaaaatacagattctcaggcccgaaagagtgcttcagtaggaatctgtgttatttcaagcattctttatgactttgatgcccaccagggtaagaacattataataagttaacttaaagtgaccagaatccccagacctaaggctcactgattaagtcttaggaaatggagggagttcagaggttgaatccccacccttcgtcctccaagaggttagatgaacaaagactccaaagtttatttgcctttcctttttaatcctcttcttactccaactctttaaaaaaaaaactgcccagaaaacccagtaattaagcaaaagggagctcaaagagccaaggcaagccagcccaagagtagcagggtccctcccgcaggggccaaagtctggatgctggggtctccactcagagcctggtagtaaaagctggtgcagaataaggtcgttccggaagctagcaataacccagcctgaaggagacacagcacagaaaacaggattgttaagaacagggcaggctgagagggagtgtgtggggcttggtcagggttaggcgcagggaaagattacccagagtggctttctgcaatggggcacccctaacagggccaggctgtgtaagaagtggtgtttgttggccttgtcaaacagctgtaagaaaaacagaaacgaagggatgtcgtaggcaatacaggtactgagatcccctgatgacacaagggaccaaagttccttcccccaccccacccttgaagtcccagcttgatcccaggcctttggcttacagagcctttggcctttgctgctccagagatccgcggctcgccccaccctctccccgcccacttcccccagggaccccagactttgtgccttcgtagacccacgagtcagggagccccagcgcagttacttcacctccttcccgtaggcatctgggaattgggcgcctgtggagaaaagaagcaaaggttagcggtcctagtgccagccctgaccgcccccaatccggggggacccaggtggacattggcgagaaagggcacccccccccccgccccaggaagcttccgattggtgggaacacgctcgggcagtactgggaaccaattggacccagctgggggactttaaaaggtttagggctccgcggactgtctgataaacgagaggccgggcacctcccataggttacgcccttgcagcagaccccagaggacgccccaagtacagtcccatcttcgtccccagccccctgaccgtgcgccccgtaggaagcgaagcctaaggccgcagctccggacaaggcgcccaagcggcggaaagctgcagctggcccggccatagctgtagaacaggacgcaccggaccaacgccgcccaggccacccaagaggccagccaatcccgaccgcccatgcaaataaggttcacaggcgcccaatccgggccgtgttcatttcagcattgcgctcttcacccgcctttgtaaaaccgctgcagagtggcgaagacgtctggcgggcggagaaaccagcaccaattaggaacagaggagctaagcagtgggggggcggggttgagggcgggactagggggatttgcgtcaaggattggcccactttccaagttgatcgcctcttcgaaccccccacccccatgctccggccaatttccaaagatcccggtcttctctcaaagttccgcccctttttccacaggctcctcctgttcagcttcaaatcaaacccactaccaaaaagaggcggcccgaaagatagcaaagccccacctattgccagtaaaccccgcccactgcacaaatggcccctcccccatgtctgaaggctccgccttctttgtatgatgccccgccccctgtagttaagatattctcccccccgccagccctccgagaccgcgagagccccgagggtgggagatccgggggaatgtctccaccctgccctggcccgctacgtccatctgtccgtctgtccgctcccgcctcttcccaccatctccaatccccccattctccggagggcgggcgggcaggcgggtgcgagcggggggtgcgagcggggggtgtgcgccgctctctcggcagggggcgggggaggcggccgcgcggtgacgcgcggggctgctgcggctgctccgccggcggatcatcactctcgggctgggatggacgcggggcgggccggccctggcgcgcggagccaggagtccgggcctcccggctgctgagcgtccctcgaagcctcccctcacccccgccttccctcctaggatccgcgctgacccccgccccggggctctggactcggctcccgccctcctctgactccccggacctccccctcacgcccgccctcgggatcgactagatccctccccctccccgaggattccggctggatccctgcccctgcaccgcggatcctgcgctcccgggccccgggcccctggggattaacgtggactcctcctccagcacccgatccttaggatcctccgcctggaccgccttctggtccctcgaagccggcccacggaaccagcggatcctcaatctagtcctgtcccgttgccccctcctttctctatcgtccctactgcggggttccctgttctcgggctccccctgatcccatcccctagctctccttttcccggggatcgactggatcccggccccgccccccggggctggggcgatccccctcccccgccgggtgaggcgctgcgggcgggggctgggcctgcggggccgcgggggctcagaggccgccgccccctcccgaaggcctttcgccccccactcggagccctggatggaggcaccacggccccagggctgagccaggtaggacctaagccgggtcggtggagggggctgcgtggcggtccactggggtctccctctccccatctccctccctgcgcctggtttcccccagcctgctctgtctgcgtgtctccgcctagggatgctctcgccgtgtctctgcgtcttggtctctttgtctctgcctctctccagtccatgaatgatcctttgaatgggcccacagaccccgtgtgttcccatctccccctccccctccttctccccttcccagccaagccattttcaccactgcaggaagggggggcctgcggcctgagcccccgtccctcaactctccccggctgggggagtcaggcctgggcaggaatggagagagaaggcagagggatagggagaaggaggagggagcaagatgtggcagacagagatgaggagagaaaatgggggagacagtgatggggaaagacaggagagagagacagaaggcttaagggggaaatttggggaaggcatttggagagagagaaagaaatgaga

SEQ ID NO: 1244899 - DNA, 4001 bp, Homo sapiens
cgtgactgcaatgtcatcctgggctcggcgcaggagttcctcaagccgtcgggtcagtgcccggggaatgcacacccgcctggtaatgtggcggaaccttacgcaaggcatttccccttaagggcctggctgcaacccttgttttctggggctcgttttcgtggctcagaggggcgggactgattctggcctactttcctgatgctctgatccttctttccagattccttctctgccggggagccccgtgtgctgggcctggccatggtacccggacaccacatcgtttccattgaggtgcagagggagagtctgaccgggcctccgtatctctgaccacgatggcgcttacctttcagacttcattaaacttatgaccgaatgggcctgtgtctgtgtgtagctgggatgccggtgcaggatagcacaccccatccctagaggaaagggctcatctgaagtcgggagcaccctcaaccctcctctcccaaccaagatgtccaggggtgccaaaggttctctcaagttcaggggtagagatggggggcagggctgaatgacggaccaacaggccccagggtgggcccctgcatcttccctcccacggctgctgctccagaattgtggcgggagggggtgtcatcctgctccggaaggcccattgtttcccaccccggcctggcaacaccgagttcctctaagctggggtcagagaacgggctcaggtccccaaggggagcagcggcaggcggccgaggctgggcccctccactctattgagggggaggtgcctggggtcaggaacagatctctgaggtctggccaggaagaacggacaaaagcgataaggccagggggctcaaggatgctcctctctgctcatttgtagccctggcacatgtttcctgttcctcggcacagggcaggggtgatagtacttgtgccacgcctctgttcgcagagcgcgttcagttcgttaaatctttattgatgcgtggacactccttcccctccagccccgccccccagccccagaaatactagagaagctgcaccataaaacgagggcacgagattgttgtcccattcacgacggagctgagggggaggtgtgcaggttccagcctagatgttcaggattgagatgtgggtcgtgaaaggaaagtgggttttccgggatgtgggggcttttctcagcactgggtccactgacgctgctgctcccaaggggatgctaggactccgctcaggcaggggtgggggcagggcaggtcggaagatgccgggcttcaagtccttgggccgaataagagggagggcagccgtcagggttgttcttgactcgagggtcattagacccagacctttcctgatgtgggaacggcctgggaccctggtgaggcccggatttgccgcggctgcggggcgcgccgacgccgataaagggctcggctgtagggcacgaggcaatcggctaggcggaggcgcaggcagaggcggcggtagctggccagagcaagcacgagcagcggcacgaggagcaggaatccggtgaccagtagggccgtgaaaccggggtcccgcaggtgcgcggtgcaagggggtgcctgggagcgcaggaactgtgggagaagaggcgtcaggcccaagccgaccaggcgatactgtgcacggggtggaaacagcccaggcgggttgaagttgtggcccatagaccccaccgccagcatcaccacacaccaacactcacactcacacgcacaccccggggcgcacgctcacctgagagtggcagaggaagccgaagcccagcatggtgacagcgggtagcaagatggtccctagcaccagcaccagcaggagaagattgaaggcagccaccagcagattctgggctgttacaagaacagcgcaggcccaacagtccagggggtcccggggctctgggccgtcaccaggaaccgctcgctgtgccccggggacatccgccatggcccgcctggatcccgcccgcctgggccgctgcccttatagccctctttcctgcccctcccccggcccagcctctccccaccccccttatcctggaatgcggctctaggattaggcaccccccatcccgaggagcggaccagagccctggacattccacaggcgcctccggggaggggctcaccctcgccagggtctgcgcagtcctccccatcaatcacggtcttgcagccctcccggtactcaacctgctaccaccagccgttagcgaaacaggattttttttctccgtttatttttaatattaatattctcacacaaaaatcaccgaaaataggggtagggttgggaagacccctctgcccctggggcagagagacagtgcagtgcgagggtgcgggactgtaaaccccccacccctccgcagccccagcgtggagaaaaaacaaccaacaaaacgaaaataaagccccagagaaactcaccccggggtgtccctgccccagtgaggccctggccctgggttgtttcacacttaaaaagaaaagggggtgggggtgaaggtctgtgttttttaaagttggccggggctgggaaggacggggttccttttcctcatagttctttctttaaaacctttaatttttttattttatttattttttttacaaaataccatttcagttcccacttcttcccctacagtacaggagttgctcaccctcaggtggggctggggtcgggtcgggagtggggggactggtccgagaaagtgcaggacgtaggggaggggagcgggtttgagcaccatgagaacccggctggagccgcgggcggacgggtggagacggtcgggccgggcccggacacacactggggcgcggggagagcccggcgacgggcggtccctggaggggcgggcaggatggcttgggggtgtgggaggtcgggttttcccaaaaatgaataaatagaggtgagtgggactgttataaattaaaaacaaaaaaacaagaaaagaacaaaaaatacaaatcataaccaagtgaataaagagacatgtacaggggtcacagctagcattggaagtaaaaaaggaggttccgggggaggggtaaagcccatagaaagaatctcattaaaaacctcggctgccgtaacgtctatgtacatacacgagccgcgtgcatctgcgccgggcgggcgggcggctggcagggtgagggaacccgtatgtgacccccgccgccgccggagcctggtccttgtgtctgttgctaaaaaggccaaagtcggtgaggggaggcgctggtgggcgaggggctgccagccccctcccccgtctcccattttttttccttttttcctcatatttgctaaaaaaaaaaaaaaagtttttcttaataaattaagtgaggggagctgccaatggggtggaagggctgggcccgacccccttctcggccacaggcgggacctaggtccagcccaggcatgtgctggtggccccgcggcgccttgcgcgggcaggcaggcgggcggggcgtccggcctcatcgcgacgtgctggctggggcctggggggagaaagccggcgggggctcagggaaaggcgcggccgggctcccgaagcccgtccctgcagcctgccccagtgccctcctccgctgcccgcgcgcccgccgggccctcaccagcgtgaaggcgtcgtaggcctgagccagctcctcagtgcggtactgctccagcaccaccacgccctgcaggcctgcgctgcggcgccgggcacagccctcgcagtgtaccaggtacgtgttgcggctgccattctcacttgtcacgaacaggatgttaaacacctccacctggggcagggaggacagtgcagtcagggggagggagggccactgtggacactcagggagagcagcagagccggcccactcacatcgcactcgttgcagtagtaggctggctcgtccttgacacggccctggtaagcgattttc

SEQ ID NO: 1244900 - DNA, 4001 bp, Homo sapiens
gcggaggggcctgattctgagccccctgcggccgccgcctccagcactccaggcgcggagcttccgggagcggccggcaggtggcagcgtcgcccagcgcgggtgcccccgggagccgggaggggcgcggccggggcttgtgggctgggggcgctgggcgagggcgaggcaggagcagtgcagccaggaccgcgggagggggagagggggtgatggagcgtggggcgctgctccctggcccggccaagggggaccctgagaggctcaacgtcatgtccttgggcgcctcctgctgtgtcgccaatctgtcttgacccctgaaaaacacccccgacgtcgtgggcgtttcttctctttccttgctctctgcctctcacccttctccctcatctctcccagtcatgttctctgtcttatatttaacccctctgtgtctctccccgtttctcccagcctctgtttttctgtttcggtttcttcccatctgtccgcacccagtttctctcgagttcccagcctttccctctgttctcccgtctgtttctcctctctctgttcacctctgtctgcctcggcggaggcgtctgtttttctcggtttctctggtcccttctccttgtccctggtttggtcctgcacccccagtctctcggtctgtttcttatgctgtctccctgctctctctctccctttccctgtctctatttcccattacctcctagccctttttgccccttaagaagataatcttctagtctcctgatccgaggggtattgggatctggcccctctgtatttgaagtgactgtgagcttggagaagggaaggggccgccgtctcccctcctcccctgcaggtggaccttggcagggggacctcgtcctgagagtgctggagcctccacctcttgagtcgttgccaacttgggctgccagggttcttcttgtccccacccaggccccactgcaacagcaaggcctggggtctctaccccacactccctgctatcctgcccaggctgggagccctacagaggtgtggcccttacgggagaggaaaatgggaaaatggttgagcttagaggaggaagataccctgcggggtgaaatgagggtgctgagaagggcatgtgggaactcaagggacagatgtggggggtcagcaggagtgggggtgagggaactaggcgggcaccagtgccctgaagaggggcaggaggagggggaggaggctggcatagctgctctctgggtctctggcatcaacctgacccagatctagggttgccggacaaaagacaggaggcccaggtaaatccaaatttcagataaacgatgaataatttcattttagtataattatgtcccatgcaatatatatatattttttgagaaccaagactggaatggagtggtgtgagctcactgcaacctccacctcccagattcaagcaattctcatgcttcagcctcccaagtagctgggattacaggcatgtgccactatgtccagctaattttttgtatttttagtagagacagggttttaccttgttggccaggctggtctccaactcctggcctcaagtgatatgcccaccttggcctcccaaagtgttgggattacaggcgtgagctactacacctgggcccatgcaatatttgagacatacttatgctaaaatttacttttctatctgaaattcacatttaatgggatgttctgtgtttttctttgttaaaactggcaaccaggccaggcacagtggctcacgcttataaccccagcacttggagaggccgaggtaggaagatcacttgagcccaggagtttgagaccagcctgggcaacatagcaagaccctgtctctgcaaacaaagaaaacaaaagcaattaagccggtgtggtggcatgtacctgtagtcccagttactctggaggttgaggtaggaggatcacttgagcctaggagttcaaggctgcagtgagctgagatcacaccactacactccagcctgggtgacagagcaccaccctcgctctaaaaagaaaaacaaaacaaaacaaaatctggcaatgctatccacatcgctacaatgtcctaggaacaaactccacccccaccccacatcttccaatgaagaagtgaggtccttagcacttgactcaccaggcagagtctgaagggctcttgagcccctcggctgggcccccagttccatgacaccaaactgccctacgttccttcctgcagatggggacaagatgaggagcctggaagtgggtggtcccaggccaggccaagaacaccagggcctgttagcattcatcatggccccagggccctcggatttttggtgggtgaggtcagaagggggtgggagcaccatggacccccctagactgagcagagaagggctgttctagaggaaggagggtcctggacaaggccagcatcttctgtttggcacgtcacctagcaccaggagggcagcgtgtgcaggtgctcaggcatacacgagcacagaaacccagaggcctcatgtagtcagcggccccctagattcaacaccaaattccatctggggtttcccaagagcagccacttcgaaatgtcttcataaacgctcgctgggcccccagtgcattcactaaagaatgagctgattgtgcatcctgccggggcccagctggaaggaggggcctccgaggccagccggcccacttacgcccttctcagaggaggcaaccagggcctggagagcgggaaggccaggtcgcacaggacatgaggggctgagtcaggatcagaaccatgcagcgctcaagacgccacacccagcacaggtggcactcacctcgggcctggggagccctgctccactgctctggatggaggatcactcagggtgggtggcctcgcctagcctggctcagcccagcccagggggccaggcttgggtgaaggggaagagccagggtgaattctgttttacttggcagtcccccccacccccatactttggtggacactaatatctgtaatggctgatggcactaggctgggatctcttttcaaagccagcagaatgctctgctctagcccggctctgcctgtaggggcagtattgtgtcgtgttagtcagtgtgccactgaatatgttgtgctgtgtgaccttagacgagaaatggaacttctctgggcctctctcaacaggaaggagagggaggagttggataacagtacctccctcatcatataggccatgatgaggatgaaacaggccgctcagagtctggcatacagtaatggcaaataaatgctagctgtcattcctggcagagacaaggggcccatacttccttctctgcatttcacatggaggcagagtggggtgccaaggagtgcagggtctcgctgcttttggactgctcacctccctggatgggctgcagcatccaaccccagtttccccaggaagctttgctcactaaacccctctgctgtccactgggccccacttaaggccagtcaggcctgagaaggtggggctggtgacagatcccagaggatgtccgtccaggtgccgaccactcctgaacgtggtctgggactggagatgtgattccctccactcccagtttgttccccctttctactcccgcacagcccactgagcgctgcctgggtctacttcacagaggaggcccgcctctccacatgggctgagagctcatggagactggaggctgtgcctgtcacaggtgtcctctccctttatccccactgccatcggcaccccgtgcagcctggctcctcaggactctcgtagccatattcaacaaggcctctagcttggtcacctcattgccaaggagggacaggccatgttgggcatgtcgctctcttgttccctaatcggaggctccctgctgccacctgaataaagtcccatctcagagagaccttcagggtcccccataaccagtccccacctgac

SEQ ID NO: 1244901 - DNA, 4001 bp, Homo sapiens
cagtcccaggctgagtaccatctcacaggctttgtccccttgtggggacaggaacaggaaggaacccctgcaggttggcccagaaagggtgagtctgtgaatccaaatcacacagcacacaggaatgactatagaattggagacaggctgggtgcggtgcctcatccctgtaatcctaaataccttgggaggctgaggtgggtggattgcttgaggccgggagtttaagaccaacctggccaacatagcgagaccctgtctctattcttttttcttttttctttttttttctttttggagatggagtctagctctgttgcccaggctggagtgcagtggtgcgatctcggctcactgcaacctccgcctcccaggttcaagtgatactcctgcctcagcctcccaagtagctgggattacaggcacgtgccaccatgcctggctaatttttgtattgttagtagagatggggttgttggtcaggctggtctgaaactcctgacctcacgatctgcctgcctcggcctctcaaagtgctgggattacaggcgtgagccactgcgcctggcctctattctttaaattaaaaatatatatatacagagagggaacttggagacaaatcgaggggtccatccaggcactcaacagcaccccttccccctcagaccccactctggcccttgtccttttcctggaccccagctaataagtaatggataattaacaggtttagtaaattaatctcaagttccggtttgggagggggaggagctcttctcccagattgtctccccacattttaaccagggggtagtcttgtctggggtggttcagaggctgagttttatggagcgtcagggtggtcttgggctgggagtaagtaaatctcagcttacttaactccagaattgaaggtattaacagcacctcgcccctggggttggtgggaggggtaaaccagaggatgcccagcccagcattgacacaaactgaccgcccagtgatttagaaggaacaccttgctcactaacccgggtccacggaagggttttggcagagcctctctgaaagctcagcccagatgtgtgaaggtgccctgttctaaaatcctaactatggaagaccctgacttccctccggttcttaaatggaaataagacacaaatgcatgttctagacccgtctctgttcccaggataaacacccatcccaggaccggacagctttcccccatcacctgtagagtttacttgggaggaacagaagggcggagggaacactcgaaccctacacctccctctcaaaatcacagatttcagaggtcaccccagccttggtcaggcagccaggtcaaatcccaccacaggctgggattacttacccctagaaggggacaaaagagccttctctcccctagggaacaagcagagacacagtcccaaagagggtggggacatcccagggtcccccagcactggaggaactgagctggggctaagtgctggcccaggtgtccaaagctcaggcgggaaggagctggaaggataagctgaggctaataaggggtccaaagtccctattcacagagacgtgctaggtgtcagataaggtggtgggtggtggccacttcccaccacaggatccccctcagaggtgggagaacccagcctctcccagagcctcctccgctgcccccacctccacctccacagcaaagagagaaaggaagtagctaactgtgtgtggtcaggaggaaatcctgattctggaaggtggcgaccaggctccagaagcaggctcctgacctacaagggtagggcccaaaagttcaacaaccttacctcccagtctcaccttttgggggccagccagcaggctgaacagcaaggtgggcgcgaggccggggacccaagcttgggacatcctggcttgggggccactgagctttcctgtgtagagaaggcggggctgcgacctctcccacttctctccacctatggggccccgcctcgggatgggggcggagctgcaccgggagaggcggactcggggcagggaggggctgggaggaggaagggaggaagggaggcgcagaggtctgggttgggttttgggatttgggaggtagaagagattaacggatttttaaaaaagcggtcccgggcgcggtggctcacgcctgtaataccagcactttgggaggatcacttcaggtcaggagttcgagaccagcttggcctacatggtgagaccccccgtctccactagaaatacaaaatttagccgggcgtggtggcgggtgcctgtaatcccaactactcaggagcctgaggcaggagaatcgcttgaacccgggaagcagaggttgcagtgagccgagatcgtgccagtgcactccagcctgggcgacggagtgagactccatctctaaataaataaataaataaataaataacctaaatttaaaaagaggtgggatcaactccacaccgctgagctgggccttcctaactcccaactcctccactcctaagtgccccagactccagggaggggtgccgggaccggcgggagtgggaaggggacgtggaagccccttcttatctggacctctgggtctggtgagaagtcaaatgggggcagaggttgagggaggggaaggcgaaggttctagggtagattttgaggggttatggttgggggatatcaccccattgtgttttgaccaaaaagggagggacagagcagcctggctgatttcagagtgccctgagatttccaggtcgaggaaggaagaccaggagcacaacgtgggtaccttcgtgtcccctcccctcttgaaatcctacaggaggtgttggtgcattttctcccattgacaaaacgggaactcaaggccccagggtttagactgccccggggtccgcagctggggctggtcctctgccaggcccgccggggcgcgggcgagcaggcccatccagattcctggaaagaccccgcggaggccgccccagtgcggaggggcctgattctgagccccctgcggccgccgcctccagcactccaggcgcggagcttccgggagcggccggcaggtggcagcgtcgcccagcgcgggtgcccccgggagccgggaggggcgcggccggggcttgtgggctgggggcgctgggcgagggcgaggcaggagcagtgcagccaggaccgcgggagggggagagggggtgatggagcgtggggcgctgctccctggcccggccaagggggaccctgagaggctcaacgtcatgtccttgggcgcctcctgctgtgtcgccaatctgtcttgacccctgaaaaacacccccgacgtcgtgggcgtttcttctctttccttgctctctgcctctcacccttctccctcatctctcccagtcatgttctctgtcttatatttaacccctctgtgtctctccccgtttctcccagcctctgtttttctgtttcggtttcttcccatctgtccgcacccagtttctctcgagttcccagcctttccctctgttctcccgtctgtttctcctctctctgttcacctctgtctgcctcggcggaggcgtctgtttttctcggtttctctggtcccttctccttgtccctggtttggtcctgcacccccagtctctcggtctgtttcttatgctgtctccctgctctctctctccctttccctgtctctatttcccattacctcctagccctttttgccccttaagaagataatcttctagtctcctgatccgaggggtattgggatctggcccctctgtatttgaagtgactgtgagcttggagaagggaaggggccgccgtctcccctcctcccctgcaggtggaccttggcagggggacctcgtcctgagagtgctggagcctccacctcttgagtcgttgccaacttgggctgccagggttcttcttgtccccacccaggccccactgcaacagcaaggcct

SEQ ID NO: 1244902 - DNA, 4001 bp, Homo sapiens
gcctctgagggaggccaggatttcaaactgttaacacgatggagggagggcatgcccgcgaacccactgatgtgatctcactctagtggggtgagttttccagaacatgcattcccggattccccatcagtcataggagggcctggaatagcttctggggcagatgcccccgctttcccggaacaggcagaagggggtgtgggtgtggtgggagtggcgtaggggattctttccttctgtagatattttcctggcattgttgacagccatgtgattggttgagggctggaggggaggaactttccagctgtgggtgcctgggttcccgggaggccatctgacactgggattgtgggggatctgggtttttggggattttcttgtttttcattatctcaccaaccagaagcagggatgtctgggttttagggtctggagactgtctttggagctgggactaaggggctgactggttcccctccaagggatgtggaagttgtgagtgcataccccttagagctggaggctgggaggttttcagcgtcttcacaagccactttttgcttggaggtggtgggacctgagggaagacgagggtgggaagcctacgggaggggcctgggagggacagagggagggaggatgggtggtggaaggcactgggcggggtaggattcctgtctttatcccaaaactcactccaccaggaggctcagaacacccagaagcaggaaagctccgaagatggagaggagcagaatcttggcttcccaaagatcctgacttcctgcagggaacccaggaggcagtgaatgattctgggacccacacgcaccgacttgggagcccaagggctcagggatctgggcaaggtggggcggggccaagatgggcgtgaggacctgggaagcagcgctttcggggccagcaggacacctccgtccccttgcaggtggagcagttgtacagcgtggtgctgccccctgcaggagacagcagaggcaacgctggggaggggaggccgggcctccaccctgcctggtacccagcttcctcctgcagctgccaggccctcctctgacaccctgcaggccccaggtccttgctacccctttcctttcctactcacggcaggcggggggacagagagctgaaatgaaagacaaggaaggggtgggggtgtgaatggatgagctgctcaccacacattcctttggttaagaccctaggctccccttgaggcccatcccgcatcggtaccttccctggtgtactcagggagcttggtctttcgaagccaactccaatatgaagggagtgaggagacagcctctttgatttctggggaggcagacagcagctccgtttccctgggcctcgacggggccagttccccctctcttcacgcagcccctccctgatcagccctcctgtctctacccctccacccttccctgcccaccccaacccctgtcacccgtccctctccttggtatcctcccaagcccctaggtcactctttccccttgacctcacccatgaccctcaggactctgtgagtcttctctgtgactttgttcatggacacctcatctgtggagatgggcaaggaccagcgattccctcatcagcccaggttctggggtctctcctgactttcccagatatggagctctctcagagggaaaggccagcatgtccagaaagggccacagatggagggcacagctggaaggtcacatgccaccctctgggggtaggggggtgagtgcttgctgggcccatccctggatgtctggtcctacctaaggcaaaggccgagaagtctggggaggccccacattccttctgcctggcctccatctggctgcagagccgagccaggcggcctgacaagtcgtgggctgggaggcgacagaagacacaagcctgggcggctgccaggaaaaccccgcctagtgccagcctccacatgaggaccactgggggatggggcggcgctgccccagctgagccgaggaatgctctgcagccctggctccagcccttgcctggaggttctagaatgttccagaacaatgaacaatggcactgcccatcctcagctggggtaaagctggggctcaaggaactggggtccagaaggcatctccagcaggcgatgggcagagaaagcagggcttctgttgtgaggggacagcacccccaacctggccctcaacagccttcacaagtttgtggttccaaaagcagttttatttttcttcttgtaaatcatgaccagtgagaaataatgtgtgccccaccccccaccagtgaagaagctgtgcgtgagtatcccacccgctctgggacccagaaatcccatcccttcccatctcctcccccactgtcccaaactcttcgtctcctctctctgccctgggcggccttgggccttccccagctatctcctagcaacaggtccatggttgcctcagcaaccaagagttccatacaggcctcagaggcccagctaagcccagtgacttctcttacctctcaccaggaagatcccagtgactcaaaccccaacaggcccctcctggctacgtggtgatgcatatacatgcgtgcacataaacacacacacacacacacacacacacaccctgtgattaaactactaattgtcaaccacctcacaggtataccacagacacaccctgtgccagaagagtcgctaggcaaccccaaacaggcctggacatgcggacatcacagacactgtagtcagcaacacagatatgaaccaggatgccagggacctatacatcagtcagccacacgggctgatatgcacgcacacatgaagaaaggccaggacccacagatactaccctcttccccctggccagccctgccatcagtatgggattcttccagatgagggatgctccagccccattgccatggggactgtcctagctcccatacatcaacctagggtgggttgtggcctttctgcctccctcagtagatggcttggaacatagcaaagaactcctcttccgatgttccagagtgttctggcctctcattggtcaggccaggccaggccacccagcttcaggagtagaagccatggtccaagagaccgcattgggaaaatgcaaagtcctcccttttccccagacctcaatatccttccagggttttgctaggtctagtctgggtaaagagatgttccccccttttccaagcccttaaacactgagctccaaatcaaggagagactggaggtgctcagccttaggcaagaacaagctgagagaaccttccctacccctcccagggtcagcacaggttgagaccttctggaccacttgtgagtccttggtgggctcaggtttgggaattcctgcccacatctgagctccagtcaggtgcaggagagtcccgactctcatagctcctgaagcagagctggaaagaggcttcaggggtgctagtaccccattctctctcctccccacagtcaaactgagaacagcatcctcagtgccggacaaagcgcagagacctggagttgagcaggtcttcggggtcggggaagacagagtctagtcggaagccgtgctcgagagccacccgcagcacctcctccaggaagcttggggtgcccaccacctcccgccgctctcctggccccccagtccacagcggctgcagccccagtctcccatactccacctcggggagttccacggggcggggggcccactccagatgaaaatgtgggctcccctctgccctatccccactggccacaccaaatcgggcccgcaaagcacctagacactcagagtcggtgcagaaaaggttggctcggaaggtgtccacctggacggagctcagctcatagtgatggggtccccggcgagcagagaagtgcaccaggcgggggctgacatctacatctgcgtggagcagggcagctgtgggtgcaggggtcccctgag

SEQ ID NO: 1244903 - DNA, 4001 bp, Homo sapiens
ctttgggaagagtctgtactctctggccctgtagtaggctgaataatggcccccaaagataaccacatcctaatccctggaacctgtgactattactttatttggcaaaagggactttgcagatgtaattaaggattttgaaatgggagattttctgggttatctggtgggccctgaatgtatgacaagtgtctttataaaagcgaagcagagggaactctgactacagaaagggaggcaatgtgatgacccgaagcagagattgaagtgacgtgaacacaagccaaggaacattggcagccaccagaaaatggaagaggcaagaaccagattctcccctggagccctcagaaggagtgagccctgccttgatttgagcactgtaagatttcattgtgaacttctggcctccagaactgtaaacaaataaatctgttaaatcactacatttgtggtaactacaacagcaatatgaaaactaacccaccctgtatatgtttgagcttataatttaactcaactctctcaacagttgaggaggatatagagccctgacctgcccaagtcacctccagttcttggaagaaccaagtccccagactgcaacttgctacacgctacctacgcttttcccatgcaaaaggaggtcagaggtcttccagttgtgtttggttctagaagcaaacaaaaaagagtgacttatgggagtggtagaacattcttgagccgtggcctttttgggagagttaggccccttgaaaagtcgatggaagctatattctccttgcaggaaacaaaaggcacacacacttgcacccatttttgggagttcatgaccctcaggtaaagaacccctcctcggcagataaaaagcatttaaggaaaaacagacgcaaaataaaatcttcgggtagacaagtcagtcctgcctacagttatagataagatggagaaacaaaactgaggacaggaattccatggaagaaggtcacagggtccagatacgagaaaaaaacctcaacgaaccgggaaactaaaactatagctttgaagaaaaaaacaaagcattaaagcagagtttggggttgaaagaatgctctccaacaaccaggaaatcgggattttcacctttatttttactcaggagatcattgttactcgaacccaatattgaagagccaatctgaaaagatggcaatttactcctgagctctggaagttgctggaacctgatctcgaagcagtgacgatctgtgaacgccccagctgcaccaaccaaggtgctaaaccttcagacaggtctatttctactcggattttttctttgggatcagactggtattttaaagcccttccaaacaaacaaacaaaaaaccagaagcttaaagcaaacctaacatgtgactttggacaccacttcatccagactacttccctcagacactgacaaccggccagaggtggaatcgcgggaaaccttaaacccagggaagaagtgactttaaaggaaacaaagcgttcgcccccgccgcttgggagaaggggctgggatagagacaaagcccgaggaaaacaccgaactaaagttgggttaggagcgggggaggcatgggcaggacccgagagaggcaactggaacccagagtgcgcgagcgcggaggaggtgaaggccctgtggacgcagcgccgggagagcctcagcgggccgggataagaggggcgcccctcacctcgactgggtagagctcgcgcggcagcaccgcctgcaggtccatgaacagggtgatggggatgtggctgaggaagtagaggcccagcagccactccacgcagcgcctggttgccggagcccccatagtctgtcggttgggcctggacccgctgatgtgagaagaggggccaaatccgcgcgccttcccagacccacgcgcctcggtcgccgccttgcccccgcgagggctaggcagaccgcttccattggctggcgagaagaggaggctcgtggacagggggcggcactccccacagggcgcacccattggtccgtataagtatagcgcgtggagaaggcgtctcgtaagccatttccattggccgccaggagcgccgtgtgggcggggcttagtcacgccgttcggcgcgcggctactcagtgtagattgcggttgtgagcgcgagcctagcgtttcggtgctggccgcgtggtatcctggtgtcccggcagctgccggcggcgctcccttccctcgtggctccgttcgccactacaacagcagtatgaaaactgcactggcccttgggccttctgcagtaagtcagcattaaaaaaataaagctgacgctgtgcacggtgggtcatgcctgtaatgtctgcactttgggagcccgaggcaggaggatggcttgagcccagaagaccagcctgggtaacttagtaagacattatctctacaaaaaataaaaaattagccaggtgtggtggtgtgcacctgtagtcctagctagttcgtgtactagtgaccagcgcctgtgctgggccgcggtaccccggtgcagtgcggccgtcacggagcaggggtcgcagagcggggcacgagcgccgcggtgcaggttcccggcccagccggggttgcgggtctggggaggcagctggccgcggtgaacaaagaagcagaggggaggactcgagggacgtaggaggcagtaaaatggacaggaatcctcaccggctgtggagcatgagggaaggtcaaggattcgtttacacgttcagcaaatactgatgttcatctccacgctgggcgcaggcctgtctcggggcaggatcgccgaggctgccatttgctaagaggggacacagggcaagggagtgcgaggaaggaatgcagcttggactacgtggaccttgagtgggctgcagcgttgggtggaggaggcagttgggtgagcctgtctggagtcgtaagcttgtgaggcatccgcctttgatggcgagcagagggcctgggagagatcctgggggagctccagcctcaggtcatgggaggaggggactgagataggagcgtactagcagggggctatgtcacagggaggggcagcctgtcaacactgagtgatgcccgcctgtggccctgtggggaacagttgtgtcgtgggggcaggagccagggagtaagaaagtggggaaatggaggcaggaagtgtagacagctggtcacgaaggggagaagacatggggcagtagctggagagagatgcactcgagagtttattttgcaggtgagaaagacttgagctagtttagttttgacagtgggagaggttacccctactcgagaagagcaggaaatgcggctcaaagccctggaggaggcggagggaatggaaggattggggtgggttaggtgggtgcactgcgctccgcccagcttccccttcccttggggcgctgtgggctaggacagagggattatggcagtgttgaaggcccagctgaggtggggggccgctgacccggaggccccaatctcttaggctgtgtgctttgcatttctctagtgcggggtctacccagaagaaggctgttggacccctacagagtttgggttcagaaaagcgaaaggtggctttgaagagctgaagaagagtgattgaggtgcagaaggttgcagttcaagctaggtagggggagagggagaggtgaggccaaagggggctgtaagacagggagacagtggaggcctgctgaggaacacgtgccagcgtgatgggagtcactgggccggaagggtgggagcttatgaggagggcgtgcaatacctgaattcctggggtcaggaagaggttctgcccgtgggagtgtgcggctgaaatggagtggaggggaaggtctttggagatgaggtcaagggaaggccacccagggtggtggtggcgaaaatgccactgcacacgggggagtaaccagaaggaaggtgagcatgggatgagagtggagg

SEQ ID NO: 1244904 - DNA, 4001 bp, Homo sapiens
tcaactccatgtgcctgtgcttcctgcagaagaacacagaaaagagagtaactgtgcttgcatgacactttctgggaactgacactttcacaggagtggtgaggctagagctgggttttgaaggatgagcaggagtttgccaggtagacaaggttgggacatgcctggcttaaagtgccaaggaagcctttctcaaagggctcacagagctgctctcccatctcgagctcactggaccacaagaaggagaaggctggcatctgcctcttctgtgtgtgtcgctgattttgtgagaggtaggtgggggaggggggtaattctcagggtccgcctctgtttctctacgtgtgtgtttctctttactgtccttttaaccacctccttttggcctttgtgttttctgcctcctcttatgtctgcctttatctctgtttctctttccaggcatctttccctctgctgctcccgtctcccgcttctcagtgtctctccttcccctcccccggtccccaggcctccaagaccacccacttggtttcctctctcttcctgtgcgttctgagtgtttctctgatcgtgtttctctgggtgtgtgtgagctgagtgtgcttctaagtgtgtttctccgtgtgtgtttgtgttagtgtgcgtgagctgtttttctgtttctgtgtgtgtgagctgtttctcagagtgtgcttctgagtgtgtgagctgtgtttctcagagtgtgtttctgagtgttagctatgtttctgagtgttttctgaatgtgcttgtgtgagctgtttatcttgagtgtgcttgagtgggtgtgagctgattgtgtttctcagagtatgtttctgagtgtgtgtgagctgaatgtttctccgagtgtgcttgtgtgtgtgagctgagtgtgcttctgagcgagtgtgaactgtttctcggagtgtgtttctgagtgtgtgtgaactgaatgtttgagtgtgcttctgtgtgtgagctgagtgtttatcttgtgtgcctctgagtgcgtgtgtttctgagtgtgtgtgaactgaatgtttctgagtgtgcttctgtgtgtgagctgagtgtttatcttgtgtgcttctgagtgcgtgtgtttctgagtgtgtgtgaactgaatgtttcttagtgtgcttgtgtgtgtgacctgagtgtttatcttaagtgtgcttctcagtgcgtgtgagctgagtgtgtttctcggagcgtgtgttcgtggtccttctctgcagtctgcgtggcgtttctttgtgtttttctttctctattcttccctgcgtactgaagagtaagttttcctgtttttctccgtctctttctctctcccttactttcccccttcccctccggttccagaaccacaaggacagaacagacccaagaccctacccgcttccccgtgctcgtccacccaggacgcccactctgtccccgggagggagggacccccagcccgcccgggacgcgccgcacgggccccggagcgctccggggcgcggctcctactcctttccccaacttcgggcgcgcggccccgcggcaagaacaaagctgcggcacccgcctcccctctccccggcagccgggccaggccccgcgcccccgcgtccccttccccgactcgccgcggcccgcccggcccggcggggctcacccacctcaggctgtggctcccgggcgcatcccgcgactgccccgccgatggcaaagtccgggcgcgggcgcgggcctgcagcggagcatgccgggaagcgccgcggccctaggaatccagcctcgcgcccccgcgccccggcccccggcccccggcccgcgccaaatccccgccgccaggcgccgccgtcaccgccaggccccccggcggccggggcagctgggaggcgggccctggcgacccaacaccccttcctcgcgcccccgcggtggcccgtccgggcggcagacggagaggggagcggagggtccctgcctgcgccccgccccgggctggcggtcccaggcggcgagcgcggatgggtaccgcaggggggctggcggcggagccagtgtgctccgccacggactgtcccattgaaaccctgcctctgccactcactagctatggacaacttagttcagcctttgtgcctcggtctgtaaaacggggctgctgcttgtcagcatcctcagagttggtattaggaatgatgggatgcaggatgcatcggactgcctggcccagggtaaagagtgaatcgagggtcgctcttatttacagcctgacccacgggtcagtgagaagcaggcccacccctggcgactgcctagccaggggcaagagtacaaatgcagagcccttgctagtagtcttgctgcttctattcccacacgactccatcccatacatactgaagggggtctactggttcaggcaaacacacaccccctaccctgccatccttcattctaacgatactcaggccaggcagggcaggctgccctgggtggatggaagtcagaccttggaagcaggctcagggctgtttacacagggatttccggagtccagggtaccaggagcatgatctagaagggaacatacgctccagctggagtgggccaactaaagcacggggttcagggcaggatcccagtggtccaggtctgaggtcagtatcggtgacagttaacaaaggatacagattgggtcctaggccgcttgacacagggtctgcaaactggtacccccaaggccacatccagcccacagaggtggtttttttggttcatacttttgttgttttattttaatttttttgagacagagtctcagtcagtcgcccaggctggagtgctgtggcacagtcttggctgtttacgggtggagggtgtccaggttcttgcctttatttatttatttatttatttatttatttattttttgaaacagagtctggctctgttgcccaggctggagtgcaatggcacgatctcagctcactgcaacctctgcctcctgggttcaagcgattctcctgcctcagccccccaagtagctgggattacaggtgtgcgccaccacgtcccactaattttttttgttatttttagtagagacggggtttcgccacgttggccgggctggtctggaactcctgacctcaggtgatccacccacctcagcttcccaaagtgctgggattataggcatgagccaccgcacccggcctgttcttgtcattttgaacaaagaattagacaaaaggcacaagcaaagcaagtaaagaaagaatgaagcaacaaaagcagagatttattgaaaacaaaagtgcattccacaaggtgggagcaggcccctgcatatgggctcaagagcccctgctgtagaatcttctggggtccaaatacctcctagaggtttcccattggccacttggcgttcaccccatgtaaatgaagtggtgccacaattagtctgattggttgtggaaagcaaccaatcagaggctgaagtgaagttacaaaggttgcactcctatgcaaaagaagatttggcccgcaatcagtctgatcggttactttccacaaccaatcagaggctaaagtgaagttacaaagttacactcctatgcaaaagaatatttggccgcaatcagtctgactggttgctttccacaaccaatcagaggctgaagtgaagttacaaagttacacttctatgcaaacgcaggattggttgcggaaaggcaatcagaggtactttcaaaagattttccatctgccaagcagaaagtggggagtgggggttgcaaagggagtagtctctggtccgtttgttacttaggtgcggaaagttggggttttccttttgatttagttctaggaagtcaggtgaacccttaggtttcctgcctccagaccctattctcctgcctcatctctctcctgagagacatgacccccataaatctttatgggatgcagaggaactgtaactgctttatgcc

SEQ ID NO: 1244905 - DNA, 4001 bp, Homo sapiens
atctatgtcactacaaaagccatatctgcatctgacctcttctcaaataactgtgcctctccctccagattctcaacctaacaactgataatgccaacatcctgcttcagatcgacaatgccaggctggcagctgatgacttcaggctgaagtaagttaagtgatcgttgtataatactatcacaacgaatacatcagtggtttttaacaatgacttgggatgccctcaataacatttacatttttctgaattcacccaaagttaaatagtattggagttatctgagaaattttccatgtcagtgttacctttttggcaatattaaaggaagaaaatgcattttaaagtaactgctaaggttttttccattaaaccactattacttctaagagaactgtacatgacaaatattgccattacatgagatcaactatgtagctgctttttaaatagtctctgcccagatacatctcccctatataagttataaccagtattgatatcatgcttgtttcaggtatgagaatgaggtagctctgcgccagagcgtggaggctgacatcaacggcctgcgtagggtgctggatgagctgaccctgaccaaggctgacctggagatgcaaattgagagcctgactgaagagctggcctatctgaagaagaaccacgaggaggtgacacaaaagttatacttttcccagccaaaagagagttcattatggtcctcgtgtagccaataaatctttctgttcctcaaacaggaaatgaaagaccttcgaaatgtgtccactggtgatgtgaatgtggaaatgaatgctgccccgggtgttgatctgactcaacttctgaataacatgagaagccaatatgaacaacttgctgaacaaaaccgcaaagatgctgaagcctggttcaatgaaaaggtaaagtaatcttccttatagtgaaactcatggaggttttatcatttcagaatttcctcacccttttccttgtttttaatactctagagcaaggaactgactacagaaattgataataacattgaacagatatccagctataaatctgagattactgaattgagacgtaatgtacaagctctggagatagaactacagtcccaactggccttggtatgttaactctcatgaaatgacttcaactttatcatacaaagtttcatgctcacctaagaatatgcaatgcaacaaaaaaatgcagagttggaggtaagaaagagaaaacaaagtgaagctcatgttaatggaggaaaagtactactagtgttgatctaaaagtgctgaaactgaaatggtgccattaaacatacaacaaattctgttcattttcttattcttctatataatgccttactaaataatcaaataagcgtcaccatactcaactgaacaaggaagtcactaagccacaaaaaaatccgtttcagaaacaatccctggaagcctccttggcagaaacagaaggtcgctactgtgtgcagctctcacagattcaggcccagatatccgctctggaagaacagttgcaacagattcgagctgaaaccgagtgccagaatactgaataccaacaactcctggatattaagatccgactggagaatgaaattcaaacctaccgcagcctgctagaaggagagggaaggtaaattttaaaatgaaaagttatcccagtttcttttattcaatattccagatagcaaggcttatctaaaccccaagaagatgccagagaatgagaggaagggaggagagagggtagagtacagaaaaaggagtacgcaaccgcaatctcactttctcatgaatttggcccaaaatgattcttaagagttctgtgaacttaacattgttttcaaaggatgggttttaaaatatatacctggcagggttttattttttcaacacgttttgcttattttctaaattaacggcaactggaaagctacccaccgttttccaacgttagagataaccgaatgtgacctcaccccgtttagttccggaggcggcggacgcggcggcggaagtttcggcggcggctacggcggcggaagctccggcggcggaagctccggcggcggccacggcggcggccacggcggcagttccggcggcggctacggaggcggaagctccggcggcggaagctccggcggcggctacgggggcggaagctccagcggcggccacggcggcagttccagcggcggctacggtggtggcagttccggcggcggcggcggcggctacgggggcggcagctccggcggcggcagcagctccggcggcggatacggcggcggcagctccagcggaggccacaagtcctcctcttccgggtccgtgggcgagtcttcatctaagggaccaaggtcagcagaaactagctggggtaatcagaattagttttaacttcctgtgatggtttttttgcgctttaagctctagagttgttttaaaaaattaaaaatcttagagacggttccgtttgcatttgttcacaaactactcttaacaccagccgtgaaaaatggcatgatcaaaatgtcataccttaagcatttttttgggcttaacaatgtaaagttgaaatttccttctttttacaatatttgcttgttaattactaaggatccctacagactgtttaaaattttttttccatcattcacacagatactaacaaaaccagagtaatcaagacaattattgaagaggtggcgcccgacggtagagttctttcatctatggttgaatcagaaaccaagaaacactactattaaactgcatcaagaggaaagagtctcccttcacacagaccattatttacagatgcatggaaaacaaagtctccaagaaaacacttctgtcttgatggtctatggaaatagaccttgaaaataaggtgtctacaaggtgttttgtggtttctgtatttcttcttttcactttaccagaaagtgttctttaatggaaagaaaaacaactttctgttctcatttactaatgaatttcaataaactttcttactgatgcaaactatcccaatttgtcagaatttatctttacttaagtacataatactctttaaaattaaagattagtaacccatagcagttgaaggttgatgtatccagaaattcggaagacagaactattgtcatgccttttctaagttttttaatcatgtatgttcagaccaccgtcagtaaattcactgagtaaagtctgtaaatccccaatattactctttaagatacacaatatgtggaaggctcccagctctctggctttaaattatttcaatcctggaaattctggaatatctcaaataaaacccccaaaataataataattggaaattttatattttctaattacctgacttctcacctttgccttttcttactttcttccagttactatattacttcttcccaattgttatatagcttgacatatcttctgacaccacccaagtaaaatcatatcacccccaacaaaattatttgatgtccatcagatgaacgtgagaaacgctgtcaggaagtagtgatgccagtgtaaccaaaaggacaccactaggtctctgccttccccaactgtgcccagtgatcaggactaaagaccttgtactttcatagcccagtcacatccctcagccaataagaacccaaccaacattacttagtactctactggggatcctatgaagggaataagctggcgtgtcccttagactaccttgtgtcctctgatgagttcttggattactcatgtccaccaagtagcagctttcctcagtatccttgatttgagctccagatctgagccctgatccccatgccatttgttggcactccactctgtagacactaccctctgtaccccaaattgatgacaggagccttgtttcaatgggatggatttccctatagtcaaggcttcataacctgcttagcaccaaatattag

SEQ ID NO: 1244906 - DNA, 4001 bp, Homo sapiens
ccaacatcctgcttcagatcgacaatgccaggctggcagctgatgacttcaggctgaagtaagttaagtgatcgttgtataatactatcacaacgaatacatcagtggtttttaacaatgacttgggatgccctcaataacatttacatttttctgaattcacccaaagttaaatagtattggagttatctgagaaattttccatgtcagtgttacctttttggcaatattaaaggaagaaaatgcattttaaagtaactgctaaggttttttccattaaaccactattacttctaagagaactgtacatgacaaatattgccattacatgagatcaactatgtagctgctttttaaatagtctctgcccagatacatctcccctatataagttataaccagtattgatatcatgcttgtttcaggtatgagaatgaggtagctctgcgccagagcgtggaggctgacatcaacggcctgcgtagggtgctggatgagctgaccctgaccaaggctgacctggagatgcaaattgagagcctgactgaagagctggcctatctgaagaagaaccacgaggaggtgacacaaaagttatacttttcccagccaaaagagagttcattatggtcctcgtgtagccaataaatctttctgttcctcaaacaggaaatgaaagaccttcgaaatgtgtccactggtgatgtgaatgtggaaatgaatgctgccccgggtgttgatctgactcaacttctgaataacatgagaagccaatatgaacaacttgctgaacaaaaccgcaaagatgctgaagcctggttcaatgaaaaggtaaagtaatcttccttatagtgaaactcatggaggttttatcatttcagaatttcctcacccttttccttgtttttaatactctagagcaaggaactgactacagaaattgataataacattgaacagatatccagctataaatctgagattactgaattgagacgtaatgtacaagctctggagatagaactacagtcccaactggccttggtatgttaactctcatgaaatgacttcaactttatcatacaaagtttcatgctcacctaagaatatgcaatgcaacaaaaaaatgcagagttggaggtaagaaagagaaaacaaagtgaagctcatgttaatggaggaaaagtactactagtgttgatctaaaagtgctgaaactgaaatggtgccattaaacatacaacaaattctgttcattttcttattcttctatataatgccttactaaataatcaaataagcgtcaccatactcaactgaacaaggaagtcactaagccacaaaaaaatccgtttcagaaacaatccctggaagcctccttggcagaaacagaaggtcgctactgtgtgcagctctcacagattcaggcccagatatccgctctggaagaacagttgcaacagattcgagctgaaaccgagtgccagaatactgaataccaacaactcctggatattaagatccgactggagaatgaaattcaaacctaccgcagcctgctagaaggagagggaaggtaaattttaaaatgaaaagttatcccagtttcttttattcaatattccagatagcaaggcttatctaaaccccaagaagatgccagagaatgagaggaagggaggagagagggtagagtacagaaaaaggagtacgcaaccgcaatctcactttctcatgaatttggcccaaaatgattcttaagagttctgtgaacttaacattgttttcaaaggatgggttttaaaatatatacctggcagggttttattttttcaacacgttttgcttattttctaaattaacggcaactggaaagctacccaccgttttccaacgttagagataaccgaatgtgacctcaccccgtttagttccggaggcggcggacgcggcggcggaagtttcggcggcggctacggcggcggaagctccggcggcggaagctccggcggcggccacggcggcggccacggcggcagttccggcggcggctacggaggcggaagctccggcggcggaagctccggcggcggctacgggggcggaagctccagcggcggccacggcggcagttccagcggcggctacggtggtggcagttccggcggcggcggcggcggctacgggggcggcagctccggcggcggcagcagctccggcggcggatacggcggcggcagctccagcggaggccacaagtcctcctcttccgggtccgtgggcgagtcttcatctaagggaccaaggtcagcagaaactagctggggtaatcagaattagttttaacttcctgtgatggtttttttgcgctttaagctctagagttgttttaaaaaattaaaaatcttagagacggttccgtttgcatttgttcacaaactactcttaacaccagccgtgaaaaatggcatgatcaaaatgtcataccttaagcatttttttgggcttaacaatgtaaagttgaaatttccttctttttacaatatttgcttgttaattactaaggatccctacagactgtttaaaattttttttccatcattcacacagatactaacaaaaccagagtaatcaagacaattattgaagaggtggcgcccgacggtagagttctttcatctatggttgaatcagaaaccaagaaacactactattaaactgcatcaagaggaaagagtctcccttcacacagaccattatttacagatgcatggaaaacaaagtctccaagaaaacacttctgtcttgatggtctatggaaatagaccttgaaaataaggtgtctacaaggtgttttgtggtttctgtatttcttcttttcactttaccagaaagtgttctttaatggaaagaaaaacaactttctgttctcatttactaatgaatttcaataaactttcttactgatgcaaactatcccaatttgtcagaatttatctttacttaagtacataatactctttaaaattaaagattagtaacccatagcagttgaaggttgatgtatccagaaattcggaagacagaactattgtcatgccttttctaagttttttaatcatgtatgttcagaccaccgtcagtaaattcactgagtaaagtctgtaaatccccaatattactctttaagatacacaatatgtggaaggctcccagctctctggctttaaattatttcaatcctggaaattctggaatatctcaaataaaacccccaaaataataataattggaaattttatattttctaattacctgacttctcacctttgccttttcttactttcttccagttactatattacttcttcccaattgttatatagcttgacatatcttctgacaccacccaagtaaaatcatatcacccccaacaaaattatttgatgtccatcagatgaacgtgagaaacgctgtcaggaagtagtgatgccagtgtaaccaaaaggacaccactaggtctctgccttccccaactgtgcccagtgatcaggactaaagaccttgtactttcatagcccagtcacatccctcagccaataagaacccaaccaacattacttagtactctactggggatcctatgaagggaataagctggcgtgtcccttagactaccttgtgtcctctgatgagttcttggattactcatgtccaccaagtagcagctttcctcagtatccttgatttgagctccagatctgagccctgatccccatgccatttgttggcactccactctgtagacactaccctctgtaccccaaattgatgacaggagccttgtttcaatgggatggatttccctatagtcaaggcttcataacctgcttagcaccaaatattagcacagcccagaggctctccattttcgttcctgtgcctctaaatgcctaaatgtctaaatgctcacatgcctctggatatttgtaccagctaac

SEQ ID NO: 1244907 - DNA, 4001 bp, Homo sapiens
tccagattctcaacctaacaactgataatgccaacatcctgcttcagatcgacaatgccaggctggcagctgatgacttcaggctgaagtaagttaagtgatcgttgtataatactatcacaacgaatacatcagtggtttttaacaatgacttgggatgccctcaataacatttacatttttctgaattcacccaaagttaaatagtattggagttatctgagaaattttccatgtcagtgttacctttttggcaatattaaaggaagaaaatgcattttaaagtaactgctaaggttttttccattaaaccactattacttctaagagaactgtacatgacaaatattgccattacatgagatcaactatgtagctgctttttaaatagtctctgcccagatacatctcccctatataagttataaccagtattgatatcatgcttgtttcaggtatgagaatgaggtagctctgcgccagagcgtggaggctgacatcaacggcctgcgtagggtgctggatgagctgaccctgaccaaggctgacctggagatgcaaattgagagcctgactgaagagctggcctatctgaagaagaaccacgaggaggtgacacaaaagttatacttttcccagccaaaagagagttcattatggtcctcgtgtagccaataaatctttctgttcctcaaacaggaaatgaaagaccttcgaaatgtgtccactggtgatgtgaatgtggaaatgaatgctgccccgggtgttgatctgactcaacttctgaataacatgagaagccaatatgaacaacttgctgaacaaaaccgcaaagatgctgaagcctggttcaatgaaaaggtaaagtaatcttccttatagtgaaactcatggaggttttatcatttcagaatttcctcacccttttccttgtttttaatactctagagcaaggaactgactacagaaattgataataacattgaacagatatccagctataaatctgagattactgaattgagacgtaatgtacaagctctggagatagaactacagtcccaactggccttggtatgttaactctcatgaaatgacttcaactttatcatacaaagtttcatgctcacctaagaatatgcaatgcaacaaaaaaatgcagagttggaggtaagaaagagaaaacaaagtgaagctcatgttaatggaggaaaagtactactagtgttgatctaaaagtgctgaaactgaaatggtgccattaaacatacaacaaattctgttcattttcttattcttctatataatgccttactaaataatcaaataagcgtcaccatactcaactgaacaaggaagtcactaagccacaaaaaaatccgtttcagaaacaatccctggaagcctccttggcagaaacagaaggtcgctactgtgtgcagctctcacagattcaggcccagatatccgctctggaagaacagttgcaacagattcgagctgaaaccgagtgccagaatactgaataccaacaactcctggatattaagatccgactggagaatgaaattcaaacctaccgcagcctgctagaaggagagggaaggtaaattttaaaatgaaaagttatcccagtttcttttattcaatattccagatagcaaggcttatctaaaccccaagaagatgccagagaatgagaggaagggaggagagagggtagagtacagaaaaaggagtacgcaaccgcaatctcactttctcatgaatttggcccaaaatgattcttaagagttctgtgaacttaacattgttttcaaaggatgggttttaaaatatatacctggcagggttttattttttcaacacgttttgcttattttctaaattaacggcaactggaaagctacccaccgttttccaacgttagagataaccgaatgtgacctcaccccgtttagttccggaggcggcggacgcggcggcggaagtttcggcggcggctacggcggcggaagctccggcggcggaagctccggcggcggccacggcggcggccacggcggcagttccggcggcggctacggaggcggaagctccggcggcggaagctccggcggcggctacgggggcggaagctccagcggcggccacggcggcagttccagcggcggctacggtggtggcagttccggcggcggcggcggcggctacgggggcggcagctccggcggcggcagcagctccggcggcggatacggcggcggcagctccagcggaggccacaagtcctcctcttccgggtccgtgggcgagtcttcatctaagggaccaaggtcagcagaaactagctggggtaatcagaattagttttaacttcctgtgatggtttttttgcgctttaagctctagagttgttttaaaaaattaaaaatcttagagacggttccgtttgcatttgttcacaaactactcttaacaccagccgtgaaaaatggcatgatcaaaatgtcataccttaagcatttttttgggcttaacaatgtaaagttgaaatttccttctttttacaatatttgcttgttaattactaaggatccctacagactgtttaaaattttttttccatcattcacacagatactaacaaaaccagagtaatcaagacaattattgaagaggtggcgcccgacggtagagttctttcatctatggttgaatcagaaaccaagaaacactactattaaactgcatcaagaggaaagagtctcccttcacacagaccattatttacagatgcatggaaaacaaagtctccaagaaaacacttctgtcttgatggtctatggaaatagaccttgaaaataaggtgtctacaaggtgttttgtggtttctgtatttcttcttttcactttaccagaaagtgttctttaatggaaagaaaaacaactttctgttctcatttactaatgaatttcaataaactttcttactgatgcaaactatcccaatttgtcagaatttatctttacttaagtacataatactctttaaaattaaagattagtaacccatagcagttgaaggttgatgtatccagaaattcggaagacagaactattgtcatgccttttctaagttttttaatcatgtatgttcagaccaccgtcagtaaattcactgagtaaagtctgtaaatccccaatattactctttaagatacacaatatgtggaaggctcccagctctctggctttaaattatttcaatcctggaaattctggaatatctcaaataaaacccccaaaataataataattggaaattttatattttctaattacctgacttctcacctttgccttttcttactttcttccagttactatattacttcttcccaattgttatatagcttgacatatcttctgacaccacccaagtaaaatcatatcacccccaacaaaattatttgatgtccatcagatgaacgtgagaaacgctgtcaggaagtagtgatgccagtgtaaccaaaaggacaccactaggtctctgccttccccaactgtgcccagtgatcaggactaaagaccttgtactttcatagcccagtcacatccctcagccaataagaacccaaccaacattacttagtactctactggggatcctatgaagggaataagctggcgtgtcccttagactaccttgtgtcctctgatgagttcttggattactcatgtccaccaagtagcagctttcctcagtatccttgatttgagctccagatctgagccctgatccccatgccatttgttggcactccactctgtagacactaccctctgtaccccaaattgatgacaggagccttgtttcaatgggatggatttccctatagtcaaggcttcataacctgcttagcaccaaatattagcacagcccagaggctctccattttcgttcctgtgcctctaaatgcctaaatgtctaaatgctc

SEQ ID NO: 1244908 - DNA, 4001 bp, Homo sapiens
ttacttgtcatctcacgtggcagaaataaaattactaagagaagaaatcttcccatttgcattatgacactgctcttccatgccatctttaatgagttaaactcagatctactaagggaaaaatagtgcagttggttttgtactttggtctgcaatgagttcgtgaaccttccttctgtctattatgcatttaaagtgaagtcccagatgaatcatcccagctataacggtactacttctagcttttaattaaacaaccctgtctgactaagttcaaagtacatttagtagtaagaaattttttttaaaagcaacataaaaccacaggaaataggctatgacagatagagcagcgtcagggtgccctggggaagatgaaaccagtcttccctagagaaactgatagaatttcattttagcagaatgaaacttgtctcattctcagacagtccctactgaacaaagtaattcttgttctgaaagtttttcttgggtcatttttgtaaagatgttctctgataatagagagtttttgagactactccaaatcccatagattcaaatggtgtgtacgtagaaaagcctcaattgaaacatggcctctagtttaaaccatgttaatcttgtctttctcccactattctctctctctcttccccttgacccaatggactaaaaataataaataataaaggtgtcctttctcccttcttgcttttgcttcaactctccctctccctaagatattctccatttccatctgggaaaaaaacatatattcattacttcctttcaagagtactactataaatatagcgaaccacatacggaaaactttctgcgcaacagggactgtgctaaacactttacatacatcatttcagtcacaattaagcctcctaacaaccctcctgaggtcgtttctatagatttaaagagactatgtaatttgcctgagatcccacagacagtaaatgtcaaggtcgggatttgaacccagactcccaagaccatgctcttaaccaccctactctcaaccaccctactacccaatctactgcctagattaatattcttttcctttaagaagctgctgttaggctgggtgcagtggctcatgcctgtaatcccagcactttaggagctgaggcaggtggattacctgaggtcaggagtttgagactagcctgaccaacatagtgaaaccccatctctactaaaaatgcaaaaaaaaaaaaaaaaaattagccaggcatggtggcgagcgcctgtaatcccagctactcgggaggctgaggcaggagaattgcttgaacctgggaggtggaggttgcagtgagccaagattatgccactgcactccagcctgggcgacagagtgaggctcggtctcaaaaaataaaaataaaaaataaaaaaataaaaaaaagctgctgttaatcttttccagtccctggccactgggagttctctccccttaacaccagtattaatttacaagagctgaaatatacctatacctactctactcctcccctgtcccaggcgtgccctgacaggagtaagtttcattcatgccaggctcaccctttctggcagacaagcctgcatcaatcttttcgtaagatgcaattactactaatattgattcttttgtaattttaaatatttgccaaaaagatttctatcacagtgttgtaacagtgattactgcagaatgtggtcaatagtagagttttctcaagcgctctgcactacaagtactcaataaaaactgagagtgcaggcttcttgccagacctcacccagccctattaaggggacaaatctatgtcttctctttccctccactccaccgagacagcaacttttcaaaatgtattcccctcacttggcttgtttttaatctgtatgactctctactttctatataagacagtcttaccacttacctcttgagctctgagaagctgacttccttggccaactgttcctctgcctgaaaaccctaaatgctttccctgttacaatcctttataatacttgaatttgaacgctttatgacagcagggtcaaataaataagataacttgggttcaaagtctgtttttctttatggagtcttagagaagatagtaattgggaaagacatcttcttaagatctaagtttctatgtctacctcggttactaggtggggccggatattactaacagggatgtgttgttccaagaaagcttgaacttgtgcaaaaatctgtagcgcatctcactgaatattgtcatatttaagtaagatggctgcgttttgatcatctagcctggggattgtgaagggacgagtccaaagagaagtttgactttaacagaggtcaaaacattggaagattctacacaacttaaataatgctggaaaagtcttagttaccactagtaacccaagcccagtgcataagctgtaccaagccaggcatggcagggagccgtttttttgttgttgttgtttgttttgttttttgaggcagggtttcactctgtcacccagattggaatgcaatggcacaattgtggctgactgaacctctgctcccagcctcccaaggagctaggactactggcgtgagtcaccatgcccagctaaactttgttaatatatatatttttggtagagatgaaatttcgccatgtttcctaggctggtctctaactcccggccttaagcaatctgcccaccttggcctagggaacagttttatcctcttgaggctctcacctgattgggagatccttgcattacactatgtttatggtattgttaacgatgcaaattttatctgccaagtactattgttcccatttacacaaaaatataacagaagaatatttatagttatctacacattttaacacactgctgaagcacaccagcaatctgcctcttactagctatgtaactttgaaaagttatttaacctccatgagcctcaggatcttcatcaatacaatggaaatagtaatagtaccctccctacggagtcactgtgaggattaaatgaaatgaagcatgtgaatctgccgcacagtaagctcttggtaaacagtagctcttattactattattattaatataggctgagcagggcatcctaaatcaacacaacctcactatagcattgttcaagcaaaaatcagagctaagagcagctcctgttggctgggttgcaagcaccacccaaacaggttttgagtttgcctctccagggatccaagattgtcattttaaaatgaatttagcaatggagtgatgttttggttcttggtgcctccaaaatagaccctgagacagagctttgagtgccaatagtttatttaaaggtgatctcggccgggcacggtgagtggctcactcccttaatcccagcactttgggaggccgaggagggtggatcatttgaggtcaggagttcgagaccagcctggccaatgtgatgaaaccccgtctctactaaaaatagaaaaattagccaggcatggtggcgggcgcctgtaatcccagctacttgggaggctgaggtggaagaatcccttgaggctgggaggtggaggttgtgttgagccaagattggaccactgcattccaatctgggcgagagagtgagacccttcctcaaaaaaaaaaaaaaaaaaaagtgatctcaggaagcatagtaaggaagtaagatagggaagggaggaaactagtaaagaatgtgttaaagattactaccgtgagcaactatatccctggagctttggacaagttgtattctgtgcagcatacctcagaatcaactactgatagggaaggaagcaacttctctccatctccggctgagggacactctcaaggtgttgactctctggcactttcagcctgccctgtgagggcaaagtgtactctctcaagctggccaacatgtccaggaaaagatgctcaggaagtcactggctatatgggaactc

SEQ ID NO: 1244909 - DNA, 4001 bp, Homo sapiens
tgaggggttgcaaccaggtctctagtttgtttaggttctaactgacccagccctgaaaaaaaaaaaaaaggagttcagtgttgtgtagaagggggcacaaaccttcctaattccggcaccccaacctaaacctaaagacctaccctaccctttgcctctattgtgaaactcttgctttcacgttctgtgaccttcctctctcaaactccaacttcccaatgagtgtggatcagcaggaaaagcccacagccttgctgctgctgctactgttgttgcttttttggtgaatgaggaaaaatctttgctgaggcctgagtttctctaggatttctatcgcttggtcaagcaaatatgcctcctaagcagcctccaaagtggcttcagagagacccaaaagcctggaatattttactgtggggcccccctggaagcactgtttagccatccctgccagattgtctcatttgagcctatttcattcctggtcacagatccaggctgccagatgtcaagagccaaagaaaactgacctaccatcaaaagcagagtcagacaaatctaaaacgataactctgtagggaccgcgggcagatactatgcagcagacattatgtgccgcctctgaaacttctggcaagccctggggagcaacttgggacagacaccagaagcaccaccttcctgggtcaccatgggcccactcctgcaatgaccactccccaagtggagtgatttgaaaaagattccataacagctctcacaatccatatctcagtctctcttctttcactgtgaaggttctgctgctgcagtttcttagaaaggcaggaagggtccctgcttgctccttggagtacctactatttcccttggagaatctgctgctttcacagctgtccctgggcaaatccagtctggtgattaccattatcagactattctcacagcacctataaaacttcattatacttatgtacctgtccatctttctattagactcctggtagacaaggatcgtatgtatttctcttggtactgaagtgtccaatataatgccccagtagttgctcaaagaattatctgtggaacacatcaacatccttatttaatataccggccctggagttagaaaaacaactaattataaccccagtcttgcgtcttactagctataacacctcagacaactttctcagagcctcagctttctcatcagtaaaatggggttaaaaacagtacctacctcatgaggttgttttgaagatgacgtgaaatcatcgaagcaaaatacttggcacagtgcctggcacactgcaaattgcaattgcttaataacggtagtaattatttatcacaaccacaactaacccctgatggtaagaaggttaatgttattaaccatgatttacaggaaaagaaactgcggcaaagaaagacgaaaacgattggcacagacacagggaactctcgtggggaggggcccggcaggaccccaggtgtccggcctcaggggtctttgctctgtccctcagcctgtgatctaccctgtccgtaccgtgaccgcacggtgaggaggggtcccgcaccctttttctgaggcgaaggttccgcttttggatggtcctattccctcggcgttggactggggtccatgggcccacccgaaccgaagggctgcctggccccagcctccgtgataagaccagttgtcccggccagtgaggagtagggtcggctaagggggtcacaaaccgtccacacccctcaaacttcggggcggggctggggaactgggggcggggcttcaggacgcgaggagtcatgggaaattaaagggggattggaccggcactgtgcctggatggggaagtcctcacctgaaaagaccagactaaatgttttgacctcgccaggacggcccctggactcgtctttccgtaggggtcgggaaaagggctggcaatctgcgattctgttcagggtccggtctcttccggcttctcccggaagctgttataccagggacaggaagtcccgcctccgcgccttgcactgatgacgcgaagctgcgtaagacgggctgacgtaaaaggtattctttaaataaaagggacaggtttctcagcggaaggaggggtggagtcattgttggcgggattgcggccctcccagagcggggccacgcctggtgggcggggccttaggcaatccagggtgagaggcggggccaggggggaggagttagcgcggaggtacttgggaaaggggcgtggcttcgcgactgcggaaggttgcccgggctggcgccgctgggcagagccggtgcgacgtttccctttccagctttgttcttccggccctgctgtctgcctccccggctgattggattcgttactgctttgcaacgcgcacctaactccaggttagcggggattagtaagaactcagctctgggccagtcgggaagacagataaggagaccagttagtcagcatccagtgcttgaagagtgcggccccaggtagtgtgggacccggagaaagaaggcgggaaagcatttcaaagaaggcacagattcggcgcaggcttaggacacaaaaagggggaaaagtccagctttcaagaacttatccagatttttgcagttaaaattttttcttttttgagacgggagttccgctcttgttgcccaggctggagtgcaatggcgcgatctcggctcactgcaacctccgcccccccgggttcaagcgattcttttgcctcagcctgccgagtagctgggattacaggcatgcgccaccacgccccgctaattttgtattttagtagagacagggtttctccatgttggtcaggctggtctcgaactcccgacctcaggtgatccgcccccgtctcggcctcccaaagtgctggcattacaggcgtgagctaccgcgctcggccgcaattaaaattttttctaaaaacttactgtggccggggggagtggcttactcttgtaatcccaccgctttgggaggcagaggtgggaggatcgcttgagctcaggagttcgaggctgcagtgagctatgatctgagccactgcattgcacccgacagggaggccttgtctccaaaaaaaaaaaaaaaagcgctggagtttggggttttggagaactactgattaaaggataaataatccagacaggggcaaacataagcaaaaagctcggtggcttctaccaactgaacactggcagaagtagcacttagatcaagaaatagataattaggactggcgcggtggctcacgcctgtaatcccaacacgttaggaggctaaggcaggcggatcacaaggtcaggagttcaagaccagcctgggtaacatggtgaaatcccgtctctactaaaaatacaaaaattagccgggcgtggtggcgcacgcctgtaatcctggctactcagaaggctgaggcaggagaatggcttgaacctgggaggcggaggttgcagtgagctgagatggagccactgcacgccagctggggtgacagagcgagactctgtctcaggaaaaaaaaaaaaaagaaagaattaccccagaatctcccccttcatgtcttcttctagccattaacctccaaagagtaatcactattctgacgtctgtcaccatacattagtttttcctgtttttgtacttgctataaatggaatccaactgtgtatcctcttcggtgtctagcttcttttttgtaagtcctttcattgtggtaaaataaacatagctaggcacagtggcatgcacctgtagtcccagctactctgaaggctgactcagcagtgtcacttgagcccaggagttaaaggccagcctgggcaacacagggagacctctatctctaaagataaatatatacatatacgtaacataaaacttaaaaccattttaactatttttaagtttgcaattcagtggcattaagtacattcacaaagccgggcacagtgg

SEQ ID NO: 1244910 - DNA, 4001 bp, Homo sapiens
ctgctgacacaatagcgcccaggagctggttgctaccgctgtctgctacgtaggtagagagccaagctaggaccaaggctagaatcagcaccaccacacctgccaccaccatcacctcattacccacaccctcaatgagggtgacatcagagagctccatggcctggctgctggcagggtccacgctgcaggaacaaagggggacagcatcagcagagcctgaggggttgcaaccaggtctctagtttgtttaggttctaactgacccagccctgaaaaaaaaaaaaaaggagttcagtgttgtgtagaagggggcacaaaccttcctaattccggcaccccaacctaaacctaaagacctaccctaccctttgcctctattgtgaaactcttgctttcacgttctgtgaccttcctctctcaaactccaacttcccaatgagtgtggatcagcaggaaaagcccacagccttgctgctgctgctactgttgttgcttttttggtgaatgaggaaaaatctttgctgaggcctgagtttctctaggatttctatcgcttggtcaagcaaatatgcctcctaagcagcctccaaagtggcttcagagagacccaaaagcctggaatattttactgtggggcccccctggaagcactgtttagccatccctgccagattgtctcatttgagcctatttcattcctggtcacagatccaggctgccagatgtcaagagccaaagaaaactgacctaccatcaaaagcagagtcagacaaatctaaaacgataactctgtagggaccgcgggcagatactatgcagcagacattatgtgccgcctctgaaacttctggcaagccctggggagcaacttgggacagacaccagaagcaccaccttcctgggtcaccatgggcccactcctgcaatgaccactccccaagtggagtgatttgaaaaagattccataacagctctcacaatccatatctcagtctctcttctttcactgtgaaggttctgctgctgcagtttcttagaaaggcaggaagggtccctgcttgctccttggagtacctactatttcccttggagaatctgctgctttcacagctgtccctgggcaaatccagtctggtgattaccattatcagactattctcacagcacctataaaacttcattatacttatgtacctgtccatctttctattagactcctggtagacaaggatcgtatgtatttctcttggtactgaagtgtccaatataatgccccagtagttgctcaaagaattatctgtggaacacatcaacatccttatttaatataccggccctggagttagaaaaacaactaattataaccccagtcttgcgtcttactagctataacacctcagacaactttctcagagcctcagctttctcatcagtaaaatggggttaaaaacagtacctacctcatgaggttgttttgaagatgacgtgaaatcatcgaagcaaaatacttggcacagtgcctggcacactgcaaattgcaattgcttaataacggtagtaattatttatcacaaccacaactaacccctgatggtaagaaggttaatgttattaaccatgatttacaggaaaagaaactgcggcaaagaaagacgaaaacgattggcacagacacagggaactctcgtggggaggggcccggcaggaccccaggtgtccggcctcaggggtctttgctctgtccctcagcctgtgatctaccctgtccgtaccgtgaccgcacggtgaggaggggtcccgcaccctttttctgaggcgaaggttccgcttttggatggtcctattccctcggcgttggactggggtccatgggcccacccgaaccgaagggctgcctggccccagcctccgtgataagaccagttgtcccggccagtgaggagtagggtcggctaagggggtcacaaaccgtccacacccctcaaacttcggggcggggctggggaactgggggcggggcttcaggacgcgaggagtcatgggaaattaaagggggattggaccggcactgtgcctggatggggaagtcctcacctgaaaagaccagactaaatgttttgacctcgccaggacggcccctggactcgtctttccgtaggggtcgggaaaagggctggcaatctgcgattctgttcagggtccggtctcttccggcttctcccggaagctgttataccagggacaggaagtcccgcctccgcgccttgcactgatgacgcgaagctgcgtaagacgggctgacgtaaaaggtattctttaaataaaagggacaggtttctcagcggaaggaggggtggagtcattgttggcgggattgcggccctcccagagcggggccacgcctggtgggcggggccttaggcaatccagggtgagaggcggggccaggggggaggagttagcgcggaggtacttgggaaaggggcgtggcttcgcgactgcggaaggttgcccgggctggcgccgctgggcagagccggtgcgacgtttccctttccagctttgttcttccggccctgctgtctgcctccccggctgattggattcgttactgctttgcaacgcgcacctaactccaggttagcggggattagtaagaactcagctctgggccagtcgggaagacagataaggagaccagttagtcagcatccagtgcttgaagagtgcggccccaggtagtgtgggacccggagaaagaaggcgggaaagcatttcaaagaaggcacagattcggcgcaggcttaggacacaaaaagggggaaaagtccagctttcaagaacttatccagatttttgcagttaaaattttttcttttttgagacgggagttccgctcttgttgcccaggctggagtgcaatggcgcgatctcggctcactgcaacctccgcccccccgggttcaagcgattcttttgcctcagcctgccgagtagctgggattacaggcatgcgccaccacgccccgctaattttgtattttagtagagacagggtttctccatgttggtcaggctggtctcgaactcccgacctcaggtgatccgcccccgtctcggcctcccaaagtgctggcattacaggcgtgagctaccgcgctcggccgcaattaaaattttttctaaaaacttactgtggccggggggagtggcttactcttgtaatcccaccgctttgggaggcagaggtgggaggatcgcttgagctcaggagttcgaggctgcagtgagctatgatctgagccactgcattgcacccgacagggaggccttgtctccaaaaaaaaaaaaaaaagcgctggagtttggggttttggagaactactgattaaaggataaataatccagacaggggcaaacataagcaaaaagctcggtggcttctaccaactgaacactggcagaagtagcacttagatcaagaaatagataattaggactggcgcggtggctcacgcctgtaatcccaacacgttaggaggctaaggcaggcggatcacaaggtcaggagttcaagaccagcctgggtaacatggtgaaatcccgtctctactaaaaatacaaaaattagccgggcgtggtggcgcacgcctgtaatcctggctactcagaaggctgaggcaggagaatggcttgaacctgggaggcggaggttgcagtgagctgagatggagccactgcacgccagctggggtgacagagcgagactctgtctcaggaaaaaaaaaaaaaagaaagaattaccccagaatctcccccttcatgtcttcttctagccattaacctccaaagagtaatcactattctgacgtctgtcaccatacattagtttttcctgtttttgtacttgctataaatggaatccaactgtgtatcctcttcggtgtctagcttcttttttgtaagtcctttcattgtggtaaaataaacatagctag

SEQ ID NO: 1244911 - DNA, 4001 bp, Homo sapiens
gtggctcatgcctgtggtcccagctgctcgggaggctgaggtgggatgactgcttgagcctgggaaagtcagcctgggtgacatagggaaatctcatctcaacaatgacaaaattaaaacaagtttgaggatcagaaatacggtcataatggctggtgcacagacagtagggggaagttggtttgatgtcaagtcagggaaggcaggcgttagatgataacaaaggtggatttcatactaattgctatatagtatatgaatcaattggagggttgcaagcaggggagtgatatgatctgacttgcttgtagtgtattttgaaaagataacttgctgctgggtagagaatgaattgtaaaggtgcaagagagaaagtgggaagaccagaggaagcagtagtctaggcaagaagagatgatggcagcctggaccacattggtaataatggagacagaaaaaaagtggaatgatttcaccgaatgctcatcacatgcaggagtttacagttgctcatgccttgtaagtgcaacccagaagcagggcactggtttcccaagtttaccgctgtgttcccctaatggtgctcagcacaatgccatgcacattttaagtatttaacatacgtcagtttgttagactgaaattgtccctgaaaagatttaggtaagtccctgggaagaatgtccaaggaagtggacagccagcgtgggtgctgtgtgaagcagtgaattcctttggcggcttgtctgggagactctttcatttgccacaggggttgggtatgggaggtgagccctcaccaggaggttgccaatgactaagaaacactagaatggtatgagatcaccttcccttttcccgcccacctcaaaggaataaatccacctctctaacaggtattagcaagttccctgtgtattttgtgtctagtcctagttttcccaggatcagagaaagcacacatacatgttctgccaatgcaaaggagctcaaaggataggcctgccaagagaggtcggcggatccagagctaatctcttcctttcctacaaagcaattgctttgagcccctggatgacgtcaatcacattccgcccagaccaatgggttccaggaattctgtggcaggtgacgccccagaaagtaattccagtgagaatgaagtttccactgatagccacagtgctcttccttccgcactttgtgtgtggatatttggggatgcccggggctaagggcggatccgtggctcacgcaacgaagctaatgggaacccaagcacaacaaagggcaaacagccgcggaggtggaaagaggaggggtctaaaaggaagaaggacccagaaatccgtcagacacggaggacggcgggaggaaagctgagggctagagtggcggatctagcagaaaccctaggtgtaaaggttaagcgtcacccaaaaagtcctgggaaatgtggccggtgtgggctcttctctagcccggaccactcctcactaccgagaaacccacaccggttctcacgcccaccctccgtgggagatcggagctctccatctcccctacgccgcccgcgccttttcccccaggacccggccgggctcgctctactccagcaggggccgtccatcccttccccgagggcatcggcgggcccggctctcaccgtccccgggggcgcctctcctctcagctgggtggccagcggactccgagccgcccctagcctgcagccgcctgcccctcagcagtcccaagctgtgagctcacatcctgcgctcgtcgactccgcccggagtgctgcccagcccagccggctggggagcctgagactacaagtccctgcatgcatagcgctctatccgggaaagggtggaggcggaatcccccgagggtcttcgcggagagagcagagctacttctggccgccttgccggcgctaaggcttctgggtcttgtaggccgggcctcccctcgggcctctgtttcccagcaggctctgtggaatgggggctgtaagtgcttccggagtcaggaaggtagtgacgtcataggtaaacaggctctgtatccgtggcagcggccgtggcaggctggctgggtaccggctgtcgctgacccaggagaagctgcctgtctacatcagcctgggctgcagcgcgctgccgccgcggggccggcaggtaggctgacctcgggtcgggggacgcgggcggaccaggggcgagaggagcctgacaggcccgcgtcctgaggaaaggcagtaccgggcggggagagacgtgggaattccgccccactctcaggggggcgctttcacacccagcttaggcctggagtttgatgcgttgatgcttgccacgatcttacgaggaaactgcggctcggataagttcggggagtttacatagtaaagagtcggctcgcagtgcctcgcatgcatctgggagagccggggcgcagaaagtatgccaccgcctcatgctcagggagcttagtcccagctcttgggccaggtgttgctcagatgctcagacacgcgtgtgatgggagttggtagataatctgtgaactctttccctgcacctcttcttccatcttacctatctctttaagccagcccttccaatcagataggtgggccaagccagattcatgggagtcatgcctgacttgtttttctcttatccccaaacccccacattcagtcagtccattgctaagccccatcacctcgacttacaaaacatctcaactcggaacacttgtgttcggctgccagccttggttactgcaatagtctcctgtttccacggtcattcattccacaaacatttactgagtgccagttatgtgtgggcaccatgctaggtgctagggttagagtgatgaacaagaaggtacttggggctttgccctctcttgttccctccaatcggttctctcaggctgagcaagagtgatctttctaagtctgattttgttggtctgctgagaacccgctggctgtcccattacccttctgataaaatccaagctcatgactgcgtctttcagagccttcggtgatccagctgttgtctccctgtctagcctcattctgttcccttctcttgctcagtctctgttctcggaatgcatcaaatttcctgttgcctcaggatcttcacatacgtgtttccttctgcctgcaatgccttgcttcccctttcacttgacatacttttggacagtctttaggtctgtttaagtgtcatttttttcagaaggcctctgttggccctcccctccaagtccgccccccatgaactgtgtcctcctgcagcacttcacacagcaccatgtacttttccttatagtaatatcacgatttgtgattatttctttaccatctgtccagaggcattgttttcactagtctgtccccagagcagggactgagtggatgtttctgaataaatgcatgctctcagggaagggggtggaagttgaagcagatatttgctccctcatgttacttcaatctttctggagcagctggtcagattaatgacctgtagctgcgaaagacagattttttggttttttttttgagacagggtctcactctgttgcccaggctggagtgcagtggtgtgaacacggctcactgcagcctccacctcctgggcttaagcgatcctcccagcttaccctcccaagtagctgggactacaggcacctgtcaccaggtctggctatcttagaaatcttttgtagagacggtattttgccacattgcccaggctggtttcagactcctgtgcccaagtgatcctcccacctcagtctcccaaagtgctgggattacaggcatgagctactgcactggccagatctttttaaaaagccctattttaaggaagctacagatgaacaaaatgcttcaaaaggatgatgctagctcacttacatcagtggattccagtgaggccaaaggccagagtcgtctacagacagct

SEQ ID NO: 1244912 - DNA, 4001 bp, Homo sapiens
agctgaccagagggcctgtccccgccccctcctctaccaccatgtggacctacataaaatcccagaaccatcatcaagtgccaaaggagggcaggaaaaccccatgactgacaccagccaggcagaatagaagcttgagagagaagcttcgttgatggaaagggaagaaagggaacacctctctgacactagctgtgtgggctgggctcagactctgggccgccacaaatttggatgcaggatggagactctctcctgcaccccgagaccagagagcagccaaggagggtgattctcagagccctctgcttgtgcctcctcacgggcttggccggttaacaggtgctgcaccaagaaagagctctgtggtcggattagtttgaaaaacactgggttaaagaaagtcaaggcagttttttaaccgcagggcttctcagagcctttcctcatgactccccaagagggggtctggtagtttcatcaaagcacttttgtgtgtttgagggatgtctggtaggaaagacagtcttcttcattttacactgaggggaagcggctcagccaaggtcccagagtgggccagtggacaaccggccagggctgattcggcagcaccagacagcttctgccactgccaggtcacagttctagctgggtcctgactcgtggccccagagcactgggcaatttcatcctgtgttaaggcagcctctggtcactgccttgtccaagtctctcagaaactttacatatttgagcccctggctgtgtagattctggggacttggtggctggacacaaaaaaggactgaagaacaaatttgctccctgcctgaggtgtgggacagagcagcaggcagaggctgtgaatctaggctgtgccccgggtccatctggccatgggttctgtctgcactaaaggacctggggccctttcataaaaccttagaaacccaccctgatgaaaatgctatacgggccgggtgccgtggctcatgcctgtaatcccaatactttgggaggctgaggcaggtggatcacctgaggtcaggagtttgagatcagcctggccaacgtggcgaaagcctatctctactaaaaatacaaaaaattagccgggcgtggtggtgggcacctataatctcagccactcgggaggctgaggcaggagaatggcttgaacccgggaggcggaggttgcagaaagccgagatcatgccattgcactccaacctgggtgacagagcaagactctgtctcaaaaaacaaaaacaaaaacaaaacaacaaaacaaaaaaaaagaaagctataggataaatataaatataaatatataacagaaaaaatgggtggaaactgttatagattaaaacatagccaaaagtctaatgtgggacaggctgatttgaacaagtcaactgagaaagacattggtgagacagttggtacagtttgaaccctggcgggctatgtgatgatgttcaggaattgttgtttcagcaggggtgaaggtatgatgcttagttttttgttttgtttttagggtttgtgttcttaaggaataaatcctgtggtctccacaactcaaacaatctggtatttgagattagcattaaaatggtccagcgggcatgtaagggggaaaatgggggctgtgcaggggccatggtgacaaagggaattcctgccggtgtggccaaccctgcaacctcagtggcttctgtcacggaaggcaagccccacatcccagaggcatccagactcggggctctccatgtgcaggagcttggggaggctgggactgccccagtgtgtggatctgctgtgggctttgcacctgctggaccttgcaacccccacggcactcaggcccaaccctcctcacacctcccacctgccctcctgccctcctgcccggctactcacagcgctcctcctggtccacacggctccggccacctcgcctgctccggcccaggccactcattactcaggatgcttattactagtcttagatttgattagtgcttgggctgcacttcctgggttttcccctcaacctgttggatgtaaatcagccacacccactcccgcccccatgcctgtgcattgggtctcaggagcccaggtgggtggctgcggcccaggctcctggcgtcccatggggtacacacagagcagtggaaggcctgccgggccttgcgatgaggtattgactatgggatggcccaggctcttctagatctggccttggccatcccttggtcctcatctcctgcccgccggcacacaccccaagccaggccagctctccaccctcccagcatcactcaggcctttccctcttcctgggtatacttattctattcattgcctggtcggctcctcctgctcttccttcaaggctccattgaggtgtcacctcctccaggaagccatccctgactgtcccagcctgtcaggtggtactcattctctgtatctccttgaccctctccaacacctagcagagcactggagaggctgaaccccaggaccggacagcctgcgtttgaatcttgactctgctgcatactagcagaaggccttggtggcaatttatggaactcttctgtgcctccatgttctctgtgtaaaacaaggatgaggtcgggcatggtggctcacgcctgtaatcctagcactttgggaggccgaggcaggtggattgtctgagctcaggagttcgagaccatcctgggcaacacggtgaaaccccatctctactaaaaaaaaatacaaaaaattagccgggtgtggtggcgcgtgcctgtagtcccatctatttgggaggctgtggcaggagaatgaacctgggagtcagaggttgtagtgagccgagatcgtgccattgcactccagcctgggcaacagagatgccatctcaaaaaaaaaaaaaaaaaaaaggatgagaacattgcccgcctcacaggcggttatgagcatgaaatgagggagggagcacagttacattcttagagcaggttcttggcacacagtaagtcctcaataaaggccgtggaggaggaacattacagcccgtattgcactgcatggcgactgcactcctgtgtcttccccatcgtctgaaacctcccaggggatgggaggcccagcaacagccaaaggcggagtgagaggaacgtaaaagccaaagaaagcccatgggcccttaggaagaaactgaaggacgaggaggacatggagaggtggagaggaaggagggaggctgcaggaagcagctggagcagggtgatggtgcacagagcaggagaggagatgcagacggtcagcaaacacaggaaaatgtccagtctcccaaaaatcagaaaaacaactgaacaatgaaaaactaactttcagccatcaggttgcaaagttttaaagttggtaacatcaagggcaggggggtgatctacagaagcatgaactcagggcccactggagggagggagctggcagcagcgttctggagagtaaccagccagggtcagttaaatgcacaacacacacctaacccaccccccagaaattctcctcctccgtgagcctcctcatgacagcgagaaacgggaaacaatgtaaatgtccatgcagcagaggatgcctgaataagcagggtgcacaggccagagccaggaatctattgcacagttaaaagaatgagaaatctcgaagctttcaggacagacgctgagtaaataaaagtagcttatagcatgagccttacagcatgatgccttttagtaaaacaaaaccaaaagcaaacaacatgcacacacacacacacacagtacagcgctgtgttgtctgtgatcacgcacacatgactgtgaagcataagaagtctgcaaagacatgcatgacgaaactggctctcgccgggtggggcaagagggaaccaggactgggggtgaccgtcaaaggggactttagccctatttgtagggctaaacatttta

SEQ ID NO: 1244913 - DNA, 4001 bp, Homo sapiens
gggaagggagtgggaggtcaaaggttttcaagggcccttttcccaggaggccagtgctgtgtcgggggatggggtctcacctgcctgcgctccgtcctgtccaggtcgtggatgaactgtaaagtacaggaaaaggctggtgagacctgccctgaccctctgccacctgcccctctcctcctgggtatggctcacccatcacccaccttcataatgggctgcgatcgctcttcgagcccgtgttttccggcctttaggtgctgaggatcaaggaaagacagatgagcaaagcgggccctagtgggggtcccagagcaactctcccagccccattcccctctcaggaaccctggcatccttattcttgtccagactcctggccttagaatctcaggcctcatcttcctcagtaagtagagtgactataatttgtcatccacactgggatactgctgagagcaaaacgggaagctgctattaatcacaccgagataacaggtgggggccaggacaactgcatgccgacttggacacgtggtcatccggccaccccatcatcccattcctaagtctctttgcctaccggggcccaggcctctgactgccaggcctagtctccatcaggatcccagtagttcttctaactcatggccaccctgccttcctgtttggggtagggtctgaaggagcacatccatatgacagaaggagcttcagaggagggcgagaatccctaggtttgagtcttggctggttagctgcatgactctgaactcctttcaccctccgtgcctcagtttctccctgtggataatggtttttgctctgcccgcttcctgaggttgggatagagggatgctcaccacttctgcgaggccgaactagtcggttcaggaaaggcgcaggatcctggctttcttctgtctggggattcagttcctaggggaattagggcagggttcaaccacagactcccagagatataaagtgagacatacggggcctgtcaggagagccaccagccagcaatagacacagaagtcagggacagattaagcccctcagccaactacagctggggccccgggcaaaggtgaagctgggagtcaggccccagtcctcaccctttcctctagaccagctacactttcccacccacacacacaaccaacgcagaccctgcattcaattggcacattgcacacatgcccgcacccagtcaccacgcacagaggatacacaccctgtacacaaccgcacccctcttccacgcagactcacatatcttatacaaccacgtcacccccagccaataaacacctcagactcaggtggcacaaccccagcacaaacccctcacacagagttgtcaccacgcacacacacccctgcagacacgcacccatgcacgcactgtgttcacacacaccctgcacacacctcgagtacggctggcacagctgcacacacctgcagcctcggctgtgcacacttcccatgccccagcagcctgcagaccgcgcccacgcccactcaccgacgggtcctggtcctcctctgccaccagctcctcctgggcaggctcctgctgggaaggagggagcgtcaccctgtgccgctccacctgacatctcaccctccacccatcctcccttccccttgccttcagcccacgcggcccccagcggcccctctgcagtctcagctcctgatgtgcccaagaaggggtgcgcagcggggcctcacctgggcggacagcgatgcccggctccccaaactgaccacggccagcaggaggccgaggcaggccagcgccaggcccaggcccagcgcgagcgggaccagcagggcggtgcccggctccccccggcgccccctccgcctctggctccgacgggcggccatgggggcggggggctgtgcctgcctcaccgcccccccatcccgggacccgagggatcgggggagggggagccggcgggcggatcgggccggggagagggaggggcaagggaaacggggcgggagggggcgctggggacaggaagccggacgctgtgtgtgatcaaactccgagcctctcgccgggcgctgtgcgcgcagcgaacggagtgggcgcccacccgacctctgagcgcccagcccgggcgtgcaccaccagggcgaggtccgttgcgtgcggccgcgggagcgacggggctatgcgtgtgcgggcacctcctgcggggaggtggggaactcaggaaggcctgttggttcagattcttctgtgtccctgtgtcttcagagataaggaccctcctttcccccaggtgcagggagggcgcctctcgcaggaggctgttatttgcttcttcaggaaaagggcagggagttccaggttgtatgacctggttcagggaagaagggcaggagaaggtaagaaagatccttcggcttctgcggttttctcaaattccttcagcttaaaacactcactgtgccggtagcacgttctgaagcccatcattaccaatgattgccaagcatctgaggaggaccagcagcatgcaaaagaaacaccaaaattggtccggcaggtggcttacgcctgtaatcccagaaggccaaggctgggggccaggagttcaagatcagcctgggcaagagcaagaccccatctctacagaaaagttttaaaaaattagcccacgcctgtagtcccagctactcaggaggccgaggtaggaggattgtttgagcccaggagtttgaggctgcagtgagctgtgattgcaccactacactccagcctgggcaacagaccttgtctcaaaaagaaagaaagaaaggaagaaagaaagaaaggagggagggagggagggagggaaggagggaaggaaggaaggaaggaaggaaggaaggaaggaaggaaggaaggaccaaaattggctgggcgcgatggttcacgcctgtaatcgcagcactttgggaggctgaggcgggtggatcacgaggtcaggagatcgagacctgcctggccaagatggtgaaaccctgtctctaataaaaatacaaaaaaattagccggacgtggtggcaggcgcctgtagttcccagctactcgggaagctgaggcagagaattgcttgaacccaggagacagaggttgcagagagctgagatcacgccaccacactccagcctgggcaacacagcaagaccctatctcaaaaaaaaaaaaaaagaaagaaagaccaaaattaacaaacaaaatttgacattggaggaaacagagataattcaggatacaaagagtactacctaatatacttaaagagagtcaagaaaaagcatccatagagctgggcatggtggtgcatgcctgtagtcccagctactcaggaggttgagatgggaggatcacctgagcctgggaggttgaggctgcagtgagctgtgatcacaccactgcattccaacacgagcaacagagtaagaccctgtcaaaaaaaaaaaaaaaaaaaagagtatgcaaagaaagaaaagcagttagaatctccagaaaattttcaaaactgaaatcacaatgtaaataagaaacagctggggccagttgtggtggctcacgcctgtaatcccagcactttgggaggccaaggtcggtggatcacaaggtcaggagttcaagactagcctggccaagatggtgaaaccctgtctctactaaaaaaacaaaaattagctgggcacggtggcgggcacctgtaatctcagctactcgggaggctgaggcagagaattgcttgaacccgggaggtggaggttgcaatgagccgagatcgcatgactgcactccagcctgggcgacagagcaagactccatctcaaaaaaaaaaaaaaaaaaaaaaaaaaaagcaacaaaacaggctgggcatcatggtgtgcacctgtagtcccagctactggggaaactgaggcaggaggatcgcttgagcccaggaattccaggttgccatgag

SEQ ID NO: 1244914 - DNA, 4001 bp, Homo sapiens; identical to SEQ ID NO: 1244913

SEQ ID NO: 1244915 - DNA, 4001 bp, Homo sapiens
cctcaggagcgctaacgagggaagaaagaagggtctgctgggtttggtatgaatagaggggtcaggaaccctcagtagggggccaaagaggccctctgtgaagctcagagtgtggctggggttacctggctatacagcagataaactccagcatcctggattcggacaccatatccttgggcctgtaggcctctcccacgcctaagagctggttgccacatcacctctgtcacatcggagtcatctggaggtgagagtgtgtcggtcaggacttcttggcactctcaggtgctttttggttctttccctttcacctataaggaccccttgagcccaagtgccagcccgagttcctggttattgcccctccccaaagccattatttaaaatagtgctcacccttggaggtggcgttaatgggaaccaggtgcaggacagagtgctgctctgaggagagaaggagggaatctcagccgcatccactttcccccgttgtgctgttggcagcctccaccctcaccctgactcgggcttacaatccccacgctgcttgatcacctcccacccctgctgcaccctggaagcctcactcttctgtttttgggtgagcactgctctccttttccgggatctctccccattctcccaggcttccagggcatcggaactctgctcatggaaagagggtcaaggttaggttaagatgcgagggtcccagccagcctgccttcccagccctcccctgcccccgagatgcctcagatctctcacgcaccttttcccagcaccctgagtgttggtgctggctgccctccaggatttgttaggtatgagaagcattaacctttaacagtttcctttcctggaatggccgcgcccctgacttccaaaccggagaccctctcttgcacccccttgaaactttgcagaccaggaggcccagagaccccccatgctaaccatcctctcccagacaccctcctcccctcactcacctgctccgggagactctgccagggatacccttccccattctgggaggggcctcctgtcccctgcagccggctcacctctctcctgaggctctgcagctctgtttgttgggtcagcagagccatggcacaagccacggcccccagagctgccccccaactcaaccagagggcaactgagagtgccggctctctgactgggccccccatgttgcctggaggccctttgggggctagcaagaaaggagatgaggctggcatgagctggggaccctgccaacagctgtggtttcaagagtggggtagcaaggaggtggcggggcgggtaagggtacgggcagtggtgcagaagggaagaaggttgttacgcaaggagaaataaaaaggaacttgaaaataaaaaggagggaggaggaaagcaagctaagggtactgttagtgctcctggcactccgtcgtggggccagcgttgccttgagaccctccaccctccctcagcctcaggagaattaggttccagtccctctaggaaggacagggctgccagtgacacccaggaggaacaggcagtgcgcaggaaccctggggcggccccagggttgggggagggaaggttggctggctagagggcattgtgccaggagcaggatggggggccaagctgggcagtgtccagggtcagggcgagggtggaagaccctcggggtcaagcacagcagagatcgctggggcagttcactaggggtgactgaaggtgggaaaggaggggtgggctcgatggggaggagaaccaggggcacggaagcaagaaactggctgagttctggggttaaggctgggccgggtgtgttggaataaggcctgcactactccctgtgctgaaattggcaagcaggacttcctgtttcccgagaaaagctcttacataaggctctggacgaagagacaaagcagcggcctcaagccccccggccactgcgggattcctccccagcacacagggttccgggttcccgtgtgcctgctgactctcagcccctcctccaggctggctcctgcccgccccacctcccagccagggcctgtgccagcacctgctgaatgtccgaggccaccaagaggaagggcccctgctcctcccagccaggaagggatttccccgcaggaggaagtctgcctcctaggccaaggaggccgcttctgctgtaccttgggcggaggattgatttttttcctgggcagtgtgccttcctacctctgctcccacctgggggctggaggcatggaggtccccgcccccaagcctgaacatcatcccggagttccagctgtgccgctccgcaacgccccccttcacgtggcccccagctaccctgagagtgtcccctgagccccaataaagagagagactatgacttattctatttaatatccatttatcaacattttgtcacaataataataaaaataatatctgttttaaaaatccacagggaattctcaagggaggagcttgtcttgtttctcgcccctcacatttgggaactcctggcctaggcccagtctctttggcttcctgccgccaggtccagcccctcttagtgcctgaagtggggtcttctggacccatccttgcccacagagtacagtgaacacaatgccctgggggtctgtggccaggggggagtcgagatcactgggggcctcaaagggtcagggattggggagctagtgaggtggagagtgggcggtgggggagttgtaagataagagtgggaatactgtatttatgtgggatggaaaacacgtgaacaggcccaggcagcctctagagggaggggcaggtctggagcaaagagcggctgagggtggggcagaggggaccgggtgcccagagagctgtcgaggggagccggcagcctgggacgactgcggggagaccagggcccctcagtgaacctggaagagtccgaagtaggtgaggaagggggcagccttgagatgggcccaggggagggtgcggatccgcagggaggaccctggccgcagggccaacagcccagacacctggcagaggcggagctggggcccgagggaactcgccgcagtggctgagaattcctccaggcagcgcagggccagcacaccatccaccagcaagtccagcttcaggtagacagccttcccctcatcaaagtgcacctggggtggggacaacaggccgagtccaggcctctgcctgccctcgcctcaatttccaatttcctcagcgacgcaggcatcccatcccacccaaaccccaactcaccctcccagccctgtagcttgtcccccactctcctggcaaacccttcgccactctcttactgcgttacccatgcagccagatggggcttacctgacagtacaggtagtagagcccagcccgggtgactataaactccccgatctggcggttgtagcgcagagggctggagctgttgattctggcttcctcccagccactcactgtcccgtccacacctgaacacggatgctcagagataaggaaacgtctctctacaggactcccccacactccccagggatccattgagcatatgaacattcggcgcccactttacccagaagacacatagatcaccccgggcaagggaggacccatcccctatgatgcccatagttgactaggaagttatgtgaaaaaatctaatgtatatggccagagacattcagggcagattgtcacctgcagtcacttctggggagaagagtagaactgaaggagaagcgtgaggggatttaatgttttacttcatggatatctatattatttgcttcttttatatggaggatgtaaacatacattatctgaattagtacaactaaaaataataaaatgaaacccaattgtccatcaacaaaatgtctatccatataatggaatattatttggccataaaaagagtgaagtactgatacacactatggcacagatgtgccttgaaa

SEQ ID NO: 1244916 - DNA, 4001 bp, Homo sapiens
gtcccggagcagcttcagtagccacagggagccagcctcaggaagcatgtctggagaaggagttcctaaggatgatggcactctccttcagatggtgagctcagggtaggccctagagagaccaggtctccagctccacctgcaagtcattagaaacactcaggtacagaggcagggacacagcagagacagccaggatccctgccactcacgcacacaaatcccagatagaatgttccccgtgcccaggcatccgggtactctgtcccttcaccgctgagtaacctgccctgctcacacctgcaattttagcatactgcctgctcctactacagactccaggtatgttaccatcctgactctgaaatatcacggcacatcacacacccggacacccagaaacactgcccttttagacctgagctacgcagtggcacaaactcactcatacacacctgagacgacatctcccttcctccaacatgagacatctcccttcctccaacatgagacatgtttgcctaccacacacactggagatgctcagatatgacaaccacaccatacctcagacatgtaggtagagcacgcacacacacgaaggtacactgcctcccacatgctgccacacacacacactgagacctacagatatactgcaaaacatggccgagactcccaaatacatgtcctctttttttttttttttgagacggagtctcgctctgtcatctaggctggaatgcagtggcgtgatctcagctcgctgcaacctccgcctcccgggttcaagcaattcttctgcctcagcctcccaagtagctgggactacaggcgcgtgccaccatgcccggctattttttgtatttttagtagagatggggtttcaccatattggccaggctggtcttgaactcctgacctcgtgatccgcccgcctcggccacccaaagtgctgggattacaggcgtgagccactgcgcccggccgatatatgtcgtcttaacgctgagacatttcagcatgcggccacaaaacgcccaggctcatctgtgtccttccatgagatgttccttgtacatacgtgtcacatccatgggacatggcagttcactgcctccaaacacctagatacactgccccacacggctaagacacaaaggtccacatgaacacaacacacagacatcgaggtacagtgtgcacacagcatacctgagctatgggggcatagggacccctcaagccaaaagaggtccacagtcattgcctctcctccaccggaggcagcaacatttgaaatcaaatcaggcacttgtgatggccgctaggcttaggtgctgcctatggagccactgaggctgtcaggtacacagtcccacacctacctgagctcagccccaggcacagatgcctgctggcagcctgagtcactcggtctaacttggcttcaaggcaactccaccaacctttgttaaataaggctctgggcctctgggtactggcagcctgctcacactttccctagcacactcctggacccgtcccttcccctacattataagcaaggaggaagaagaggatcgaggctgggcctagttggaaacgcgcaggtggactcagaaccgggcgcgaacagggttgggttgggaaggagaaagcccaggaccctgggggacccggccctgcgcgctcggtgggaagcggggagcgcagaagggagacaggaggaagcgcggctgcgggagggaaggacgcaggagaagaggacaggcccagcgccccccggacgcgcccccagcgacggctgctccgccggctctccccagcccgggccccctgctcggtccggaccctcacctggtcaaggcggaagcggcgactgcggaacctcccaggctgcctgggctaaatccgaggaggcgggacaggagtaaatcccgcggagggcggggacctggccgctggcccggggccggcgagggccgcaccccgagttccctagtgggacaaggtgacggtccccagggcgactggcggcccctccctcctccagaccagatcgccccgactgtgagaagcccccttcccttctcctctgctcgtcttccttcacgtctttccagccttctccgaatagcttcccagccctccccagacttcactcctctgtctctgtcccccatgccctctcgccaaatccttcacctctcagccaggaccctacctcttacatgaataagcgcccgatagagctatcctgtccacgcacagggaatataaggctaaataggacacagttcctgccccatggcagggggttcagagcttcctagcaggctttacttaatgaaccctggaatggggccagggcagagagatgttgatgctggtacggagagttggccctggcctagacagagtctacagttgaagctgttgttgatcaccggcagcattccatgcctcagggcacgcttccccattactgacactcctgggcttccttccagcgtaacgcctgctctccatgcaagctctgcagaactcagggccctgcacactgctacctagcctgtggccactgggactaagtccaggaccttgaagaaggccctgaggaggaccatttgtctccgcttctctcaggggtcccagagaggaagctgccagtcttaggacatctagtctgtcccctgtcccaaggaaggacgcgtgaacatagcagctgctgtcccaagggtcccttggagggaaaagccctcctggtcttggtaaacatgtaggatgtttgatcccaactgccacctccacgtttcccagcctcgggtcctcttcttcctccttgcttataatgtggggtaagggaggggtccagatgtctgtaagggaaagtgtgagcaggcagccagtacccagagacccagagccttatttaataaaggctggtggagttgccttgaaaccaagttagaccgagtgactctcaggctgccagcaaggatctgtgcttgggggccagtccctgtgtggatcctacgtgggataggaaaatcttcataatgctgttctatggtattgttttcttgccgattcttttgccctccaaccaggatcgctcatcacactataattgttactgcacatctgcgatccctgttagaggttctgtagctccacagggtaggggctgggcctggcttgttcatacttgtgttctaagtacctaggacagtgtgggcatataataggcctgatacatgttggttgtaaagaagtctcctcagtctaatcctcattgttgtgtagatgatctctttttactccctgcttttaagatatcattggtgttttgtagttttgtcacaatgtatctagatgtttatttattctatttattctgctcaatatgttgtacttcctgtatgtatgaattcacatcttttatcgtattttatcatattggaaagttctcagaaaccatccagatattatttttcctctgtcctctgtgctctctcctttgccaactctgattaggagtgttctagaccttttcattctgtactctgtgtcttttaacctgtctcctgtatctttcatctctttgtgtcttggtgatacattcaggtaatctcttccagtctgtcttccagttcactaattctctctttggttacatctgatgtgctgtttaatccttacatggaagggttttttaattttattttttggttgttgttatactcatatgaaaattactctacttggccaggcacagtggctcacacctgtaatcctagcactttgggaggctgaggcgggtggatcacgaggtcaggagatggagaccatcctggctaacacggtgaaaaccccgtctctactaaaaatacacacacacaaaaaaattagccgggcctggtggcaggcgcctgtagtcccagctactcgggaggctgaggcaggagaatagcgtgaacccaggaggtggagcttgc

SEQ ID NO: 1244917 - DNA, 4001 bp, Homo sapiens
tctagtctagaggttcagagacctggactccctcaagtcttgcctttaccattaactggttcttaaccaagaaccagcctcttaattcacactaggagattatctgtaaacgaattcctttcctgttcagctatgaagttcaaatgagataatacacataaccttaactttgaaaattataaaatgtctcacaaaagcatagtattagctgtgagagtgcatgtgtctacatgtacagttgtgtacatgtgatggtccagtggaaaaaaacttcagaataacagttatagtaaacctttactgagcaccaattatatgctagatactgagtcattttcctgcatgatctcaattagtcttttttttttacattttattttgaattgacaaataatcgtattaagtctttgtaacagctttatgaggtaggaaccattcactacctttctcattttaaatatgagatactgaagcctaaagaagtgaagtaacttgtcccaaattaaacagagctagtttatgtgactcctgagtgggtgctcttaaccactgggaaataactaaacatacaggtataaaaggaagaggcttggagtatggctttcagtttgttcattctgaatctccagcacatcataggagttcctgagtaacagtgagaaatgcgtgtgtttccaccaacaccttttatgataaccagcaaattctggacttggaggataaaaagagaaatcttttacatatcaataagcaaagagggaatccagaaagaatatatcttttttattataaaggatagttggcaatgagaaattggaaccttaaaaaaatgcagatatcctttggttgttcttattcaaactgaatcaactttatcagttcgatcctgtttggtggaaatcaaaagaaaatttaaaagcattgtttggaaagctaatataacattcttcagacatttttagattaaccaaataccaatgagatgcagatgtaaaaccagtgataaatgaggaatttcacaatgaataataaaaaatagtttcaaaggcaggcttagattctcgttttttaaccatcaatttaaaaaaaaaagtcatcctggtcataaaaattttggtaccgccataaatgtacccccctaaatataaataaacttacctttggttttttgatcagcagcctgaaaaaaaaaaaagagagagaaagaaagaaagaaactctttaggaataatgtgtagaatgtacacatctatgaaagtttataagcaaacttttagtattgaaaattttaaaaatgagtttttgcccagttaatttattacaatttattagtgggaaaaatgtgtacatgccattgattatataccaatgttaatctaaaggcaaaaaattctatctggagctcatttaaactctataattttaacaggctctaataggtatactgtttaaactacaagatacattaaactaggtaagaacaaagacaaatggcataacttggtattttaaatgccataaaattcaagcttgactatgaagtttacagtagggcttttatttttaatctttactaataggattcgtaaaagaacatttgccaaagctgcaaaaaaaaaatatttctagcttttctaataagatcagttgaatggcccttcttcatttattagacatggttgttcaggacagttcattttaagtagaacaacatggacacacttcaccaccagcaactaaaacacagcttccttaaaacacagctctaacacttccagttccaagttagacatttacggctgtcacctgtatttatttcaccagtaggatatctattattcgctaattatagacttggcatattgatttaaaaagtaacagaatgaaaccttgtcatataatggctatgatgatgcaaatgagacacacaatgatacaaagacaatgaagcaggaacttcagccaaacctttttctgagcaccttccttctttttcttttcttcctgctttttctttttcttttcttccatcaaacgttcctcttcttgtgtttcttgctctttctccctattaaatacaaagaaaactagtataagtttgatgatcatgttaagtcaaacaatgaaaaagcactagctgctccaaatcttaagtcagaatttcgcatatggtatacaggaggaccctctgagaaggtgctagaaagggacacttccctaacagcactgcaggttgccctgacttcttcagtagccggctgtctcattcattcagtccacattgttgaacaccaacccatcatcaggcattgctggggataagggtatgatatggagtaagatacagctcctacagtccagcccctagtctggtctcgaatacctgggctcaagcgatctcctgccctggcctcccaaagtgctgggattaccagtgtgacgcaccaagcctggccatgctttattttttccacttgatctctagggttctgaaatttcagggtgatgtatcttttctcccccattatttgtgcttggcatttggctgatgctttcagctcatacctttcagttctctattttcttgaaaacaccttccttctgtttctaaataacaacatattgaatctcttggattgatcacctgtaacttgttgtttctcttatgttttctactcttttattggtgcttctattttgagggtgcttgattcaacttgatcttctaatccttctactgagttttttattgtgatgtttaaaattgttaaccttcttgtgctcttgaatgctccttttccacaacaccctgttcttgttttaggtatgcaaaatcatctctattcttttctctgaaaatcttctaagttttctgcatatcttttttccttctctggatgcctcttcccttagatactctctgatctgaaagcctttcctcaactctgtagtaacccttggttgtctgttcaggcactgaaataccaattaggggctttgtatgtatgggatggatttccttcgcagtgggttttgctttagggatattaggtagggaactggctgttttaccagtccaacctcaaatgccaaaacatgtagtttcccccacctgatcaccagggtgctttatctatagtattagctactagaccctaaccacccagaattgcaccactgctgaaattttagatgccactatcccgcattctgaccataacttcctattcttatcactatttacatggcacctgttcttgatcctcactgaatcttcccatttcctgactcttcctttttcttctaagctattttaatcacttcttttcctagagagtctacacctcaagtccatctcatatgttcactaattcaatcactgaagaactatacaactaacatgtgctatttattgtagtaagcaccagggacaaaaacaaggatggagggaggtggggactgattcatttaataagtattttctgaagaaaagctttgtttatttttgtaaacagagatggcgtgctatgttgtccaggctagtctcgaactcctggcctcaagtgatcctcccacctcagcctcccaaagtgctgggattacaggtgtgggccaccacacccagcctgaacaatagctttataagtgctctgggattatagcaggaagcaagataagaatacatatactttcaaagatatttacaaaaatcagtaaaacaaattatcgctattacaacagcaacaagtataaaatgcagtgagaatttgacaagatgaacatctgcatctgcctgggcgctggcctcctgcaaaggctatttttctgttacagtcgggagccacatgtcctggctttaaatgagattatgagcttcctctgtcctctggactataagtgccttggtaggaggactctttctctgcggccctgagaagaatctgttactcttcagggcatttctggtaccaatttctggtatataatctcagctgaaattt

SEQ ID NO: 1244918 - DNA, 4001 bp, Homo sapiens
tgatgccagacttttccttggccaggtcctgcagggggcggggcatcccgggcacgggaagctttctataaatggaagtggaagggagccggcctctgcgctcccgccctcccgggacagctgaggacacagagccggaaccacggctttttccacacaggctccaagtggactgggtttgttgggacaggatctgggcgctccctgcagggttttctggctgtgtcctgcagaggaggctggggctgctgactttgcagagctcaaggagggctgggtgtcccctcgcaaccaggacccagtatacctgcttactaatttggacacagcttttgtgccacgctgggcaagcgtcctttcctctctgggcagacctcagttgtcccatctgtgtgatggggatgtgataataacagacactgaacaccttgcattttctcaacagctctctgaggagggtgctattgctgcagggctggagaggttgaggaatttgcccaaggtcatacaaccccaactgtgaattggggtttaaacccaggtggtcttgctccacggtcccacacttttagcctctgctgctgcttcacatatttaagaaccctgtccaccgctgccccttctgggattctggaaccaagagggacagacctggagctgagcaaagggcaggcagcccctacgctcctcttcagcctcccctcacttttaaggctctgcgtcgcccttggatgtaccaaggcagggctccatcttactcctgtattcctgaatgctgcccccttcgcggccccgcacactcctctaacttgctctttcttgctgtaagtggtggggagagtccctgggcccggggctctgtgtggttgggaggcacggggcgggggcaaggagggctccagccacctctgctctatttgtaggtgccccctacccgctcccacttctgattctgactcagatctctttctttgttcccaaggactctggggagtcctggtgccttggcaaatcccctcttccgtgtcattgccaacctcttctcctgacttactctctcccaatgagcccaggtcagtgaagggagagggtggggcaagggtaaagcctgagtctcccccaaagcactttgcctcattagcccaatctccactgcaccccctatttttgaaaactggctcccgatcttcccatccctcccacccagacccggtgacgcaggacgtggacctcaggcagggacccataggaccagtgaaggccagccgccccatctcccagtcctgtctacctctgaagtgcccagagggctcccagagcgctgggaggcgagaggcctgggttctgtgtccagtccctttccatgacctcaggcaagcctcttctctgtggccctcagctctctcatctatttgccgaggggcacaggtttagttcccttgaactgctgaactccgcggtctgtgatcctgagaccatctctgtctcatccacatcctccaccccatttctccccaccttcactctgagccctgagaaatggagaagctgaagacaaaaggttaaatgaggctgggctcacgcctgtaattccagcactttgggaggctaaggtgggaggatcacctgaggtcaggagtttgagaccagcctggccaacatggtgaaaccgcgtctctactaaacataagaaaattagccgggcatggtggcaaacatctgtaatccctgttacttgggaggctgaggcaggagaatcgcttgaaccctggaggcagacgttggcagtgagccgagatcgcgccactgcactccagcttgggtgacagagcaagactccatctcaaaaaaaaaaaaaaaaatgtttaaatgaatcagggccagcaaaggtgctccgtgttcctctcttcttaaagaataaaggcacctacctggtgtccacaggtgggcagactgttgccttcactactggctcctgggaccaagacgactcagagtccaggtgaagagtcaggagaggcgccagttcacctccagacctgccttaaaagcagcttgcccgccttctctcctcccctccgggcgggccctgcacgtggccctgacagcagtaggccccacccctgctggatccagtgagctcaggtggggctggcacaggcagcaggaagggaagcactgggtggtgggttttgggtctgggtgtgtgtgaggggctcccaagttcctgcttgggcttctcgtggcaccacatggccagggagtccttgcttggacagggcatagctagaatcaaggtgtgcagtgggcactcctcaggtgctggctggggcagaggccatgggttggcagagctggcagagagtgagggccttgacaaagcaggatgccagtgggcaggagaccctctgcagtccccctttgtgctgggtcacactgggacaggcacagggtaagggcccactggaagtaaggctaggcacgagcttgtcttttcttctttctctccttttacagtaatgactctagcttgggatggggcctctaactcaaggaaaggaggctgaagtgtctggagggctttgagaaggggcttatagctgttccttcactcatgggctatctctgtccctcgtctggtctgtgccccagggtggaagttccctgaggggaggacattggagggtgagatcaggaagcccagaagtctggtctggtagctccttctccatggttccaactctctccctgttctagaggggcaggggtcctagaatgttgtaaggaggtgttcagacatggtgaggggagggtgctgatggcagagcctggtctgggagcggtctgaagtgagggagctggcgaagtctccagcccagggactcatggtgatcccagtaggctaatctcaggggtgggttgccccatgcccccattatgcccagtggaagggcttctggccttacagtttttgatgccctggggtttcactgaggcatggtgaactagtgcatgggaggccggtgagcaaagctatggaaagttatataaggtgccccttcctgatggtgacataaaaggtgtccctaggtgtccatgcagccttgttggcacatggcttgatgagcaattatgtctttggatgaaaaatgtggtgctcctgccctggagtggatgtcactgcacatggcggcttcccccatgaggctgtggctcatgattgtgggagagtgggaggggcgactcgtgagtttcttgagtggaaggggcaggttacagtagggcgaagtgttgggcagagactgtggcaactccggggtaaccctggccatctcccctggggctggtatggatagcctctgcagtggttcttcagggccagggggtcctccagccttacagacccatacctgggggttatggtctttcttggcagattggctcttttgtttcacacccagctgcttcctttagcttaagatggtctcagaacagtgatttcagccccagctgcctcacaaaccctgcccaacaccacatcactgccctttgccgtgatcatcaagggatggatggagtggcatttctttatacatctatagatatgacattttttctttagcctatggatgtgatagattacattaatttacttttgaattttgaaccctccttgcatacctgggatgaaccccctggtcatggtatataattctttttttttttgtgatggggtcttgctatgttgcccaggctggtctcaacctcccggactcaagtgatcttcccacttcagactttggagtagctgggattacagacatgtaccactatgcctgggtctgtataattcttctaatacattgttgggttcaatttgctaacattttgtggaggatttttgcatctatgttcatgagtgatattggtgtctagttttcttttgtatctctggtttcagcaatgctggcctcataaaatgagttgggaagtgttccttc

SEQ ID NO: 1244919 - DNA, 4001 bp, Homo sapiens
gctgcagcccctcctccgccgcctgggcccggggctcccgtctcctcgccgaccccgcccggcgccccgagatacttacgggctgcttcggggcggcttggaccacagacccgcggctgggcggggagcagcgcggcagggcgggggcgcgggagggtcgggagcggcgagctcgccgagtgcaagacgttgccgctgcggggctgaggacagaggacagaggcctcgggcaggccttgggagatcgccgttagtggctcggggtggcgggcacgggggtcagacgagcgcgctcacttctccacacagcccggtgcccggcccagcgtccccgtagtgcgcccgctacacgccgggccagagcttcgctccttctgccgcggcgcgcgccccgcctctcgttttatggcctcctccccgcccccatcccctccgtcggggtgcgcgcgcccgctccgcgtcacacagctccggcggcgcagccattccccgcgctccccgcccggcaccccggtcccccgccggccggctccgcccctgccctgccccccgacgccattggccaagtcccgcctgcccctgtccggacgcgcggcggacgcaggggtggggaagccgcaccctccgggctccaggagggccaatgaaccgacgatcggagcactggggacggaatgaagagaacgtctggaaagggactgtgggggcagacgtgccaatgagagagaaaggggtggggtagggcggctgacgcccggtttaggcggagagcgccgggcagagggggagggggacgaagctggtggcgaagcggctcaggagaaccggggctggaggagcggcaagagtacccagaaagtgccctctccgcgggggtctgcggccaaggaggatcctgctcgtggaatagctaccaaatcggcctccagcccaccccaggggcggggtagagaaagggcaaactgtgaccgggacttgtgcacccgattaattgaatattaatcaccccaaggcctaggccaaccgccacccagagagtggcagctgcagaacccaaagacgtggagccgggctgggggtggggaagggaggccgccacagctcccgccccgccggcagtttaactgcttccgcagcctcaggcctcccggtgcgaccccggctgcgactcggatccgtttattccaaatgtcccagcccacgccgtgcccagagtgtggcgacacgaggccaaactgcgtatgtatctgtgtccatgtctacacacacacgcatgcgtgcatttctagggcttgctggatcgcaggtgcacagaataaacgcggtgcctgcttgtaaagcgcgtttaagatcattcttggctgaaatatgtgcgggtacctagggagtggggtaagagagggactcgtggtggggggcgggtaagtgcctttttcacaacctgccccagagaaatacacgaaattacatcgggagtggaatcgagcgtccctctcagctaaaaatattactcacaggtagcaacgacgcctgattggctgcgctggtcccttcgcaacgaggcgattggctgcctggtatccaggagaccgacgtcaaactcggactgggaaaaggggaaagtctggggggagcgaaggaggggacggggagaaagaagcaatgaatgaaacgcccatcgcctggccttcccctttcccctttcccctctcctctccattcttggagcacttcctggaaaaacaccagttggggcgccgccttcccctccaaacgttggggcctgcactctcaacctgctataaggaagttaaaccgcagctcaccgaggagtagggtgtctacggggcgggcccgtgtagaccagctgtgctcctcgggcacaaacccgccgtacatgccaggcctagaagcttttggctttgtggacgcaaaatctggttggagccgccttctccaccctgactctcccgcctctcctttttagaaggaaccgcactgagaaagggtatttctgaaggctcaatgcgtaggagaaggggtgggaagatgggtttgtggaatgggctgagggtggggagtggtcaggtgactgatttcatgtttattgtacagattcctaaaacatagttttactaagtgactccttaaattctgattaatgtgatttttttttttttttgagtgtttgggttttttagttgcaaacaggagtggaattgaaatgtgaaagtatggcaaaactgtgaaagcatttaaattaaaatgtcccttcctctgcattgaaatgtcatcaaagcgtcaaatataaatgatttgttcagttttctttttttatttgtttgtttttggttttctgtaatgacaagtccatctgtaataaaagtgagttatttttagttttctaattaagcacagaaatttcaagaaactagacaggatatccttggaatgccttaccaaaagaaacacttcatttttcacgtgttctagaagcacaacttcttttaccattaggcaaataatggtactgtaccaaacatctagaactgcgggaccatgtgtcttgattagtaattttatattgggggggcatattaggcatggctgagactaaaatgtctaaagatagatgaattgtaattttgtcaaacttatctgtacttttcaataattctctaaagagaagggacaagttctcttttctgaatgtcttcaatctgtaattccagatttgaaatatgagagcagtcatctgataggtactgattaaatatcagtagcattaaaagcatttttaagtcagaaatgtagatgtcaaaaatttatgagttattgctgcttggcctaggagtgtaagaagatgtctgaccaaatataaacacacacacacacaccacacaaacaacacacacggaggccccatggcatactggaaaaagcaatgaagggtgggtactgggaggtctgagtttcacaccagtttcaataaacttttagttttctcacctataaaaagggttgaattagatcatatctaatgtctccttcaattaaaaaaaaattccacacttggctgggagcagtggcttacgcctgtaatcccagcactttgggaggctgaggcaggcagattacctgagctcaggaatttgagaccagcctggccaacacggtgaaaccccgtctctactgaaaatacaaaaattagccgggtgtagtggcacacgcctgtaatcccagctacttgggaggctgaggcaggagaattgcttgagcctgggagatggaggttgcagtgcgccgcgatcgtgccactgcactcctgctggccgacagagcgagactctctctcaaaaaaataaataaataaaatattccgcccttaaaactcaatgttcctaacatatatactgcagctgttcttcaaatacagattgcaagtcagggcgcggtggctctcgcctgtaatcccagtactttgggaggccaaggtgggtggatcatctgaggtcgggagctcgagatcagcttgaccaacatggagaaaccctgtctctactaaaaatacaaaattagcctggcatggtggcgcatgcctgtaatcccagctactcgggaggctgaggcaggagaatcacttgaacccgggaggcggaggttgcggtgagctgggatcgcgccattgcactccagcctaggcaacaggagcaaaacttcgtttcaaaaaagaaaaaaaatacatatatatggattgcaaataaaagggaaaactgattcacatctctgaacattgccagtcacgaggtataaaatgttctttatccaagttctgcatatggcttattattatctaacatttactttggaattgtgcaggggagtggagggctaactgctaattgtgcagggaattagacttatggaggaaaaaagaatttgatattaggctccaagtgtatcacaatcaagaggtattcctctctctgagcaaataacag

SEQ ID NO: 1244920 - DNA, 4001 bp, Homo sapiens
aatagaaaatcgtttattaaagtttaaaatgacacaggaaaatgtagatttacaaatgaaataatgcttttaaaaacctgtttctgaatagagttctaagaagaaaaatctctagaacatgcattcttctctcctcagttctcacaagaatatttattgtactcagcatcctccccccacccccatatatatagatgccacttttaggtagtaatttttattgttattcaccaacttagaagtgaatccatgttttagtttactttggatatatactgtttaaatctgctctgtcactgacatttaaaaatttggttacgttaggaagatcattttaatttccatagtacatgatgctaaaattaaagacactgagtactaaatgaacttcatcctagtaaataattatgaaccaaattattctatatagtttcggccttaagtatactaagagcatacaatataataaaatccagcttctctgggccttttgttttcaatgtgtatttttctaaatctgaaaatacctattcggcagcaagtataacaaaagcaaagacacaaattaaaactattgattattctgtttaaggccagggtttctgagttttagtctgattttaaaaaacctccgtctgtccctctctccctccctccctctcacggtaacagccggagaggcaagtatggtaaggtcgacctttaaacgtttgctggatcagcactgggtggggataagaaaagatcaagggcaaacagaagatatttgcgaaagggatctatttgcacactgaagttgatttaaaagtacgtttaaaaatcaagttggtcttaattcgtctgttctattttccatattcgtggtgacaaagggaaaaagaatctctggctgcccccaaactacaaacactttccaagtcaaaagcctgagtgccggcagaggcagctgattaagcccaattgcttgaaggtgcagccgagcgaaattcaggctcggtggaaggtagttacaaagcaacgccttaagacaggcaggagtgtgaagaattacataaacagccagttagatctcattagatttctgctcacagccctcggagcccaagcgctacagcagcagcaacagcaagaggaggtggaggtggaggaggaagagagtacgagcctcctcggagaaggaggaggaaggcccgggaaatggaagagcaacctctcccggctgggcacccagcaccgagcaggtcggggcgccgggtcagccgctcccctcccccgccgtaacccgacccgctgctccccgccccgtggcccccgccccgggctcctgggagccggccagagcctgggggagcaccggttcctcggcaccattttcagcctcgcggccaccggcccctcgaaccccagcgttccaccgcgagctcgtcgctcctccgggcaccccaaccccccaattcccgtcagctcgccccgggccgcccgtccccggccaactgcccaggacgagcccgacgcgccggcggcccctcggagccgctcccctcgggtcctggcgctgccccctcggcgcccagggccgcgaccccgccgtccccgagctcccgagggcccagggctcgacgccgctgcagcccctcctccgccgcctgggcccggggctcccgtctcctcgccgaccccgcccggcgccccgagatacttacgggctgcttcggggcggcttggaccacagacccgcggctgggcggggagcagcgcggcagggcgggggcgcgggagggtcgggagcggcgagctcgccgagtgcaagacgttgccgctgcggggctgaggacagaggacagaggcctcgggcaggccttgggagatcgccgttagtggctcggggtggcgggcacgggggtcagacgagcgcgctcacttctccacacagcccggtgcccggcccagcgtccccgtagtgcgcccgctacacgccgggccagagcttcgctccttctgccgcggcgcgcgccccgcctctcgttttatggcctcctccccgcccccatcccctccgtcggggtgcgcgcgcccgctccgcgtcacacagctccggcggcgcagccattccccgcgctccccgcccggcaccccggtcccccgccggccggctccgcccctgccctgccccccgacgccattggccaagtcccgcctgcccctgtccggacgcgcggcggacgcaggggtggggaagccgcaccctccgggctccaggagggccaatgaaccgacgatcggagcactggggacggaatgaagagaacgtctggaaagggactgtgggggcagacgtgccaatgagagagaaaggggtggggtagggcggctgacgcccggtttaggcggagagcgccgggcagagggggagggggacgaagctggtggcgaagcggctcaggagaaccggggctggaggagcggcaagagtacccagaaagtgccctctccgcgggggtctgcggccaaggaggatcctgctcgtggaatagctaccaaatcggcctccagcccaccccaggggcggggtagagaaagggcaaactgtgaccgggacttgtgcacccgattaattgaatattaatcaccccaaggcctaggccaaccgccacccagagagtggcagctgcagaacccaaagacgtggagccgggctgggggtggggaagggaggccgccacagctcccgccccgccggcagtttaactgcttccgcagcctcaggcctcccggtgcgaccccggctgcgactcggatccgtttattccaaatgtcccagcccacgccgtgcccagagtgtggcgacacgaggccaaactgcgtatgtatctgtgtccatgtctacacacacacgcatgcgtgcatttctagggcttgctggatcgcaggtgcacagaataaacgcggtgcctgcttgtaaagcgcgtttaagatcattcttggctgaaatatgtgcgggtacctagggagtggggtaagagagggactcgtggtggggggcgggtaagtgcctttttcacaacctgccccagagaaatacacgaaattacatcgggagtggaatcgagcgtccctctcagctaaaaatattactcacaggtagcaacgacgcctgattggctgcgctggtcccttcgcaacgaggcgattggctgcctggtatccaggagaccgacgtcaaactcggactgggaaaaggggaaagtctggggggagcgaaggaggggacggggagaaagaagcaatgaatgaaacgcccatcgcctggccttcccctttcccctttcccctctcctctccattcttggagcacttcctggaaaaacaccagttggggcgccgccttcccctccaaacgttggggcctgcactctcaacctgctataaggaagttaaaccgcagctcaccgaggagtagggtgtctacggggcgggcccgtgtagaccagctgtgctcctcgggcacaaacccgccgtacatgccaggcctagaagcttttggctttgtggacgcaaaatctggttggagccgccttctccaccctgactctcccgcctctcctttttagaaggaaccgcactgagaaagggtatttctgaaggctcaatgcgtaggagaaggggtgggaagatgggtttgtggaatgggctgagggtggggagtggtcaggtgactgatttcatgtttattgtacagattcctaaaacatagttttactaagtgactccttaaattctgattaatgtgatttttttttttttttgagtgtttgggttttttagttgcaaacaggagtggaattgaaatgtgaaagtatggcaaaactgtgaaagcatttaaattaaaatgtcccttcctctgcattgaaatgtcatcaaagcgtcaaatataaatgatttgttcagttttctttttttatttgtttgtttttggttttctgtaatgacaagtccatctg

SEQ ID NO: 1244921 - DNA, 4001 bp, Homo sapiens
ggagaaaaaaacaaaaaagatagagaaggggaagaataaggacttgcttgggggaaccccaaagtttagcttgctttcaatccaggaaaagaaccacttgaggcggggcccggtggctcccgcctgtaatcccaatcactttgggaggccgaggtgggtagatcacctgaggtcaggaggtcgagaccagcctggccagcatggtgaaactccatctctactaaaaatacaaaaattagcctggcgtggtggcatgtgcctgtagtcccagctactcgggaggctgaggaaggagaagtgcttgaacccggtaggcggaggttgcagtgtgccgagagctactgcactccagcctgggtgtcactccccgtctcaaaacaaaaacaaaaacaaaaacaaaacaacaacaacaaaaaacttgaatctggcaccgaatggacaaagcttacctccctagaaaagaaaactcctattcacccttcaaaagccacgcagaattcatttctcccttctcctaagttttgtgtgttttgcattttcttgcattgcaaaggtgccacacaaaactgtgcccgtcttctctacaagaaagtgagttccctcaggtttgagaccacgtctcaccttggcctcaccagtgcctgatccaggtccaggcacatagctgacagttagtccatgtttacagaattaaaaaattaagcagaagaactgctgaagtttcgtttgcctatgaagacacagtctgaatccatttctgcttggggttcattctaatatccaaaaaagcacagccattaagggaaagcatctcctcaatggtagctactctgaccatcttataaggatgtgtaaactaaggttctgtttaagtggtgtgttcggtgtcacagcagttagtagagctgtgatctaaattttccaaatctgggcctctttactacaactactaggttctcacgatttcatcaccccactaagttcctgacatcatcacactttgcctggcattaatatgcactcgtgccacacccaattcccaagggaggaatcagggaaaagaaggagcagtgagctggtgctggtaggagtccaatcactggcttctacatacatcatgcaaggtacatccggaggagagagaaatcatttaggtggatgctggtgtagtccctagtggcctgcgagagacctccgtggccccagatggctcctatgttcccctcctcttcactccaatgccaagcattttcattctctttgtttacccagaaaagtaatccaggttgtataagcttggcactagagaaaactggtttggggagacctgcccctcacagtaaggccacatcacttagtctcccagagcctcctcttctgatctgtaaaacgggcataacaataccgtgccctggagaatgtgcctttaggaataacttcccctaccgagaagtttctggtgtctcctcgtggaggcccaaacactccatgcctgactcccgcggttcacctgtttggttccactccccaggcggcatcgaaaggaaggtacatttttgaggactgaggttctacagtgagttggccaagaaggaaacgacgaaagggggccgggtggaatgcgggtgccttgggaaagttgcggggggaggggaataattttttcaagttggactaactccgtcctctgcaggccgagaatggatcaagcaggaaaggatcccacggtcccctgcctgcctgggcgtctctccccgcgcctccttacctatgaggtggcccacggaggtcgcgtagggatcccggtgactcttgccaaacgccatggtagcgccagagggccgggcccaggaaatccgcctccaccgctctccggctcccgactccacccgctcggtacccttggctcctcctcttcgcccgagcgcttcccgggctctggcagaggcggtgcgttctgcgctgccgctgcggggcgcgggcaccgagcgtgaggagctgggcgcggggcagggacgcgagggcggggcttcgggacgcccagcgcacctgcagcgcgccctgcgggacccgcgaggaggctgcgctgccggctgcaggtggtacaggcgggtagtggcgggtgtatggagcctgcgagagtggcgcggccgcccgctcggatcccaggtgggcttttcgccccgtgcaggaggagcaggcagcccagaatctccagcctgggaattagagacccaggctttgatcctgccgcttgctgggcaccttgtcattcttctctgcgcctctttggctgccctgggtagaccaaagataatagggggttaataacacaaacctcagaattatgagaattaagggaaggacgtaaccgattatgtcggtgtctggtacccacaaaataaatagttagccactgaatatactgaataactagaaatatttaccctcgacctgcctttgtcctagagatccgggaggggaggtgtgcgccctgccctttaaagttgtggtcatgtctaggaggaaggattggcttcgaatttagggcttcccaggagcaggccctctttgtctctctactatttcctcgagggaccacagggcgccgcctcgcaagctcttgttttctaaccccaccttctgggagccgtgttttccagcctgattctaaaaacgggagaggggctttccgtttcttctggcaaggagtatgcttggctttaggcctgctttgtaatgtaggttggaatctgagaagcccaacacctttccagctgccccttcagaaccagaatttatttcctattcctttgcattcaattaacatctgattggcgatgttaacaatctccagccagcaggagcctgccagagagtgaggtgtccccaggcgatgtcagatagccatagatgagctcctggtgcttgtagatcctgtttcctgtagtctaactgccacccatttcaagtctgttttttagccctggagatggtgactagggagacgaaggggacctgttttgacttatgtccgtggtcttgtgaattttaatatagaggtcaaaaccaattgccatgcactccaggaggctaacatttaattatctgtaactcaattatttataatttttcttgaccaaagtgagccaaaacctgggattctaaaatctagaatgaaatattcttgttgtgatgatatgtctcataatgggatttgtcccacgtgtaactaatattctccacctgcctattcagggcgagtagctatttcagatgttgccgtttatcaacttccttactcatcactatagcctctgctgacactgttgaaaacctcttttgtgacatcaccaacctaatctgtattccatgcctctagcaaaatattttgccttttctgcaacctagaatcaacctacaatctctgaaaaagaaaaccaattttagcttaggccaatgttggtgtcagtggccttctatcagttaatgagaacgagaaaggaaccgagcatccagagagatagatttttaacatacttctatgtgggaggtttttcttttcgtcttcttcttcttctttttttttttttgtttttttctcctatgtctgatttccttacatgacaggactgaggcaccgagaaagaggagaaacagtagcaaggagtgtcttctggacttgatgcttgggtgaacagaaccaaggttgatgagtgctacctgtgttctatctcagcaatgcctggcagaagtttttctctctccctgtgccctccagggtgttgtggtggttgttgcagccttctcttcctgtactctgttccgttctgcatgatccctcttctctccaggcatgaaaatcaacgtggttaatgttagtaaagtctagcagcggggacaatagaattcacagctaagttgaggtcagagaaggagcagaatcccacaggggtaaaatgacaccaggagtaaaatcttaccacaatttcaattccaag

SEQ ID NO: 1244922 - DNA, 4001 bp, Homo sapiens
tcgcaagttttctggctccctccattaactggctggaaattagtttttggagtgtggctgccatgcaagagcacctgaagagagtggaaaaggacatggggaagaagtaaggaagtgagaatccagagactctccagtgggcagcaagagacaagatgtcaaaaaggtgggaaaacactcttttggggtccctcatgcattataaaagatactacgccagaaagtaaagaaaggctcctaaatgctaattagccaacaggagagacctcaataagtttataggctccactaaaggctggaaagtaagctaaaatttcataagcaaagcagaaaataaacaaatcactactgctgaaatcaggcccataagaacaccaaagatcctggctcataaaagacgttttaccagtccttcaaccaaccaggaggaatccagttttcaaacaaactaatcagcattcttgactgatcaagtggcataagccactgccttgggtaaaaaggcaagttgctttcttagtaaggaagtcccatatggtggccatttcagtattcctttacctacactttgggctttccttatccatgattctggccatctctggtgtccccaggtgtccacatcccccctataggattaacagataatgctgagtaccattctctctacattgccaacaaaagatttcagctttggtaaacttaatatgaggtgggggaggaagcaacagtcaatgtgcagagtactacaaagaatatcaaaacttgagaactttaagggatctatcacatctcatctccaaacactttgacagacaggggaacttcaaaccagaaagggcacaaggtcatatggagtcactgacaaaaccactgctagagtccaggcttccatgattcccagtccagggctcttatcattaaataacacagcctcccttctttcctgggaggcactgcaggcatgccatccccctgccaagataatcaccctccaagagcccctcctcctatcccagtccctcctacagcacagctgagttgcagctcaaattagcaagtcccggagcagggggcatttctgggagggtgcccagtctgagggttgctggtaccgaagaggagggacaaagatggagaagaaggtgacatcccacaaagggtttgggagaactgggtccttggggcagtggcagtgagcctgctgggctggataaagacacatgcagtggcatctcccaaagcgcattggggaagcagaccagcagttggcaccacctctagcagcaaaaggaagggctgagccttgatgggcagggaagcctggggcatctccgagtccaagttgggcctcaggggtgcctcctggcagagtggcactggcgcgcccgtgaggtggcaccagtgcccgggaggaggcccgaggacacagatgccctgcctgcccgtgggatagcaccggcacccggcgaaggcccagcccccccgggaggtggcaccggcgcccggcgaacgcccgacgaccaggatgcccaacccgcccgtgaggtggcaccgacgcccagtgaaggccagacgaccaggatgcccagcccgcccgtgaggtggcacaagcgcccggcaaaggcccgacgaccaggatgcccagcccgctcgtggagtggcacccgcggctggcggaggcccagcccgctcgtgaagtggcaccggcgcccggcggaggcccgcggtcctcaccagccggatcagcggccgccgttgcccagcctcctgccccacacgcggccttaccgaggcactgccccactggtgtgctgaacgggttccccaggaggaactccatcttgggtggacaacacgcagcggcccgggccccctgtctgccacctaggcctccgctgtaacccgccggactcccgtcctgactgacacttgccccctccccactctctggaacgccgagcttagggcctttggccccgcccccttgccgcgtctctattgggggacacctacgaagcccgcctcctattggtcgttacacctctgtcagcaaagcccccacccaccccgcagcgtccgattgggcggaggagcgagctaggtcaccggagtccctgtcagccgtggcggcacctcccctggcccgcccccaaaggggaagctgcgcattttgattcctctgtatattggtcaatctaaaggattcttactattattggacaaaagacgagtcaatcacgcaaatggacggaacagaggtgaatctaggaatatccccgcccatagaaagtactgattggagaaacatttgttttctctacggctggttggtgtaaggagtgtttcaccacacggagatgtggtcacgtgacttgtcaactttcacccaggatgtctcccttctgacttccccttagcaaccaagtcgcggcgcttggttccccagcaaccgggagacgcgtctgctgcgtggaaccgccgagttcccagcgcttgagaaggtgagacctgggagctgaggctcccggaggacttgcagggacagatagtgcccgacgtaactctttcctgtgacctttttctcggagaacgccggcccggcccttctcatttataaaatgagcacgtaggtcctctcccagccactttacagtcgtgtgagacagccaagacactttagtcctgggcttgtcaagcttttgaataaaaaaaaaaaaaaatactaaggaagcatttcccgagggagcagggccagaatggatttttaaggggttccgtcttccagcctcctttcatagaaagagaggtacccggtccactgataacttttcccagaatttagccatcataactgacctcataactatcaaatgatttcatcttggtactgtatataccgctttggatgtgaatacggctactcaagttctgtatccgtctctgtcagtaactcattgtacgactttggacaagttcctttacctccctggagcctcaggttccctagctgggaaataagggcattaggactccctttttatggcctccggagcttacatgtacttaaataatgcatgtgcactgagcacacagtaagcattcagtaagtgattgattttattcttttttaagaaaaattttgttcattatttatttatttatttattttttatttttaaaaatggagacagggtcttcctatgttgcccgggctggtcttgaactcctgaactcaagcagtccttccacctcggcctcccaaagagctgggattacaggtgtaagccatctcgcccaaccaattttctccttattaattcatggccaatagggactatagttttcagatcctgttgacttcaggttatcatttcccaggaaaattctggatctgttatctgtgaggaggccactccgttgacagttgtgtaaaactctgctgctttccccagctccaacctctctggtcttcaacaacactatcatcaggcaagtcaaaggggacccaggttgggtggtaaactataagatccccatagaagaggactgtttgggccttggccctgaacccaggacaactgtgagaaacactgtgagctgtggcaatgatagtccccagtaccctggatacagttgagtcatgattaggaaaatgaactctgccacgtgctaagtgtatgaagttgggcatgttaattaacctttttaactagcttctgttttcttatctggatattggtgagtattagccctacatgtaaattaagtttctagaaatttctcccatctacatcttgctaacaccctggtcatctctcacctcagtacttttgcaattctcagtactgttgctagagtgagcttcttaaaaactaagatctgatcacattgcttcccttattttttttattttttgagatggagtttcgctcttgttgcccaggctggagtgcaatggcacgatctcggctcaccgcaacctccgcctcccggtttca

SEQ ID NO: 1244923 - DNA, 4001 bp, Homo sapiens
atgcagctaacaatagcaacgagctacataacaaaaactaagcaaaagacgtacggatcaattgtgactctaatacaagacatttttgggtccctttgtttgttgtccgcagcattaactgaaagaaaataaaatatacatttgtaagaaattagtgttttaagaaacattctgtaactctaagtaagatatagaaaaaaaagttcccaaacagcacaggagtggcattaacaaggtgttaatttagcaatttttgtccatagtactgtttctacgagaagctcaacctcctgggctccaggaaaccagctcacctttatcaactgattgaaatgacaggagccctggctacagcaggtttggtagaaatgatactttttgtttttacttttatcttttttaaatttttatttggaatgatacttcttatgaaagatttgaccagatctttatattaaaggatttactcacctagaatctcatcaaagattttgtacaaaccaggaacaaaagtgacttccctatagttaatgccaacatcttcatcgtaaacccacatttgctagaaataaggcaaagaaatactgttatttttattctatattcattgttctgttatcatgattaccataaagtgttcatattaagtattaccatatttaggccagttccagtgacactcagtacatgagagatacagaaaggtcacactcagtacatgaaaggtacagaaagaagagtatccatttcaactactaggttaactgcctttgatgagcttgattttacctgggtcactaattccacagaaccaatgtaggtgtctgggcggagcaaaatatgttccaattgtgttttcttttgatagattctttcaacagacagtcttttcttagcatcttcatttttctttattttgttgacttgcatattttcatttacaggctagcaattaaaaaaaaagagagaaagaagggaatttttaatcataagtttaccctaaactaggaacaaaatgcctaccatagtgagatgtcaacatgcattgcaatctgttagtaggcagtggtggagttgccagttttgtacaaataggacaatttaaattcgctgcggccaggtccccaggtgtcaggttaaacagacacatattatctcaccaagtgggtctgtctggaaacctcttttcttgagcaacatggtagatgtcatcaataaaatacacccacttctttcagttcctgcatacattatttaccgagtgcctattattataaattatttacggtgtcccgagcacacgacaccgtaaataattctagttcggcagcagcagtttgggcggctatccgttcaatcccttggccacctgagcgttgtgaactcaggaagggggcgcttttgtaagctggccagctgctccagagaaacactgtgctaggctctgccctttccaagatcggggacattcaagaccgttttcaagcagcgggcaggaggggaaagcatctgtacgcgcgactcaataacgtcgcacccgggccgctgtaacatggatccactacgggaccaacggactcctgcccctagaaacagggcaacaacgcacgacaccctggaagccgggtcatacttcactactagcaccagaaggggcttccgcctctccacgatcaccccggaaccgggaatggagaatatgggctcccaagccggtcgccggcctgaccgcagccccagagcttcacccgtcacgggcggccagagagatgcccgggccgcgcggaggctccaccgccagtcccccccgcgagccgtacctgcaatggtgacacttccatggtgacggtcgtgaaggggctcaagaaccctgaaagcgactaaacaggcaggaccccacgagaccacccccgaccaagccgcttctccacagacgcgcgtcggttaggagagctccacttgaaccttcctttagcccgcccgaagcagaccagccaatccctgactcgctctcaccgtctccgtccagaagaaccaatcgtagcttgccttttatatccacctatgaacggctgagttggccggggtttgtttgaataaaccaatcaggttagggaggcgggactagagaggcttcaaaaggcaccactcggcgtcatagcggagagattgacagggaatctggccaatgagaagggctcacttgttttctcgtgcggaaagcttggaagagatgggctttggaagcgggaaggggtggcctgaggcaaaagtgtgcaggagaaaagcaaaggatgtttattctccaggaactgccaatctatttaagatccctgaaatctaaaaactgtcctctgttctgacgttgttagcgaggggaatgggagccttagcttcgttttcctgaggaaactgagtgccggctttctggacaggcagcctggctgcttggttgaagcgaacagattctggcatctgcctcaaccccgccccctttaccctcgaattcatttttcaaagaaataaaagtaggctgtgtgcggtggctggagtctgtattcgcagcacattgggaggccgaggcgggaggatcgctggagcctaggagttggagaccagcctgggcaacatagcgagaccccgtctctacccaaaaaggaaaaaaaatagccaggcgaggcatcgcacacctgtaactccagctccggaggctgaggagggaggatcgcttgagccccggggatcggagatcgaggcgccttgaaccgtgattgctccactgcactccagcctgagtgacagagcgaggccacctcaagagataaatacataaataaataaataataaaaataattaaaataaaagtgccacagttgtggtttgggggttccatatagtggaaggatgtagaaaggctttgcaaaatggagggcagcattcaggtccccagtagagcagcgctggactgcaactggtaaatcgaaagggataacttgtggtggtagcctcttgagctgagggtgggctcagccgtccggggctgaaaccttttccgcagccagctggccagataccctccgactggctacttttgctcacctccgtgaaccctgcagtccagaacagctgttccaatttgacaaggaaatgccaagactgaagcttttttgtttgcttgtttttttgttgctttttttttttttgagatggaatctcactctgtcgcccaggctggagtgcaatggcgcgatctaggctcactgcaaccttcacctcgcgggttcaagcgattctcctgcctcagcctcccgtgtagctagaattacaggcgcctgccaccacgcctggctaatttttgtatttttttagtagagacagggttttgccatgttgaccaggttggtttcaaacttctgacctcaagtgatctgcccgcctcagcctctcaaagtgctgggattacaggtgtgagtcactgtgcccggcgaagactgaagttttaaaattactcttacatataaatgtttgagtggattaaacaaagttattacccttacaagaagccagaaaaaaaaaaactgcacaatttgagtgcctactaattccagctgagccacctctttccattcattgcttccttcctctacctgggtttcagtcccaactcagcaatttgccattcgtgtcatttcgatggaggaagcctctcggtgcttccgtttcctctcctaaaaagaataattaactatgatctcagagtagtgtgagggttacatgagagaagtgtaaggtaaacagtgggctgacagtattaggtagcaggaattttccttaggctggtgtgacaattgtggatgtaattttttttttcttcttctaaaagaaaccagaggtcaaccattgttacataaccacagtgtgtcaagggagggccaatggggagccgtatgatgtggcaggaagccaaggatggaagttgcccatgggctaggggcactcg

SEQ ID NO: 1244924 - DNA, 4001 bp, Homo sapiens
gctgaggcaggagaatcgcttgaacccgggaggcggaggttgcagtgagctgagatcacaccattgcactccaggctgggcaacaagagcaaagctccatctcaaaacaaacaaacaaaacaaaacaaaaatatggagtttctctggccacagacaccagaatctacaatgaaggtgatattgaggacttcgtgagaatgcatactgttcaaaagggaatgacccacaaatgttacatggcagaactggaaaagtctatgttacccagcatgctgttggcactgctgcgaacaagggctagattcttgcccaaagaattaatgtttctattgagcatattaagcactctaagaaccaagatctttcctgaaatgtgtgaaggaaaatgatcaaaaaagaagcaagtcaaagagaaagggttcacctgaagtgccagcctgttccattgagggaagtacactttgtgagaaccaatggaaaagagcctgagccgctggaacctattccctatggattcatggtatgatagggtaaaaatagataaatacaagacctctggattgcttaaaaaaaaaaaaaaaaaagggagagagagagaatgaattcagcagagccttgaaggataagaagttaggcgtaggagaaccatttttcaatgtctacttcattgtctagaagtagacaaaccttggggctggtcaccaggacttctagcactggaaacaggtaaagctgtcagccagcattcacacaaccctggctccactcccactatccttgatctggaaacaggtcttaggaccctgggaactaaagaaaaatgagcagggaacttccacccatgctcttagaaaagttctccagaaaaccatttcaggatctacttttgttatctgagatattttcctggacagctctttatgtctcccgtggcacctcctttatgaaactttttcttatcctcccttgcgtttgtgcctcccgtgtgtgtagaacacattcttaccacttacctctctcagaatcagttcattcgggtaggaacagggctgacttcaaatctaatccccaaaccttaccgtgttgctgtaagtgtgcactgtgaggctggaaagtcacaagggctgtagaatgcagtggctgtggcacaggatggggagggctaggttggctggggaacgatcgggcagggcttgaatgccaagttaagggaatctggtcagtagttcccaaatgaatttctgaatctctagggaaaaacagtaaaatacacacttccccagcctcacacaagacccgaagggcagccagcgcccgaggcgattccgagaatcagacaagtttgggaacctgctaagcgcaagcaaaacaaaaggtttccacgcaaatgagtgagatgtatcaactacgttttaaaatgcactccagtccgagagcagacaggaggccactgcaataatccagacgaggggcagtgaggcctgagaaatgggagataatcgccttcatctcgattcttggcgcccaccacgctgtcccgctcggtgggcctcccttaaggcacgcagctgatcggaacgcgctttcttacccgcctcatgcgaccgtttgacagcaggtcggcgatccccttggccgcgtcgtttttttcggccacacagaggactttccgcacgcctcggagggccatctccatggcggcgcgggaaaaggcacggtcttcgggccgtcgcagccaccggagcgcgtagcgggcgacaggaaagatcatcctcagacctcgcgcccggagccgctccccggctgccggcgcatcctggggaagccagagatgaggctcaaatggcgcccaccgaaagggaaccagagcctcgcttcggtcacgtccccaccagcctgctggcctttggagcttcagtcactgagcctttcccgtgccgcagccgccgcctcagcaccgaatccagtatcttggcgtggaacttccgcccgccttctccagctacttccgccaggcgcgcgccccacagcgacctggaactacaactcccagactgtcccgcgcccctcgtccaagcacgttcccctctgccaccttcccgccgcccccgtctcactccgcccctctttcccctccttcccggcagtggttggttaatcggactccttcttgcggggagccgccagacactcccatccaaggcctctttctcatgactttttaatctcctgctcggaagtctacgaggacgcttccgggtcacgcggcgcggacaccaggagtcatgtgatgtcaagatggcggcgccgcggtagcaggatccgggttgtggcgtcctaggagccgcgacggtttctgccctcgggcagtgaggggcagcagcgcttggctgacccctgcggcgtcccgtagcctcgcgttaagccttgttcagagcgggggcttttgctgtcgcagtgggttccggagagtgcaggtgatttcgcagcaggtttcttgtgctggccgcgctcgccggacgaagaagagaagggcagttgggcctgcggccttggcgttcatgaggcctcagagagctccggaggagctacaactgtgagggggctgctagagttcttctcctcgggtgtgtgagaagcagcctaggaccccgggttcggggagtcgcaaagaaggccgtaagggcttcacttccttctccggaggcctgccttctgcgcgtcgattaacaccgcattctttcccacttcctctcaatgttttcttcatatatctggaaatatgatcagcgcccctgacgtagtggccttcaccaaagaggaagagtatgaagaagagccttacaatgagccggccctgcctgaggagtactcggtgccgctcttccccttcgccagtcagggtgctaacccctggtcaaaactgtccggggccaagttttcgagggacttcattcttatttccgagttctctgagcaggtgggaccccaacccttactgaccatccccaatgacaccaaagtttttggcacttttgatctcaattacttctccctgcgtatcatgtctgtggattaccaggcttccttcgtgggccatcctcctggatctgcctaccccaagctgaacttcgtggaggactccaaggtggtgctgggagattctaaggagggcgcctttgcatacgtgcaccaccttaccctatacgacctggaggcccgtggcttcgtgaggccgttttgcatggcttatatctctgcagaccagcataaaatcatgcagcagttccaggagctttcagccgaattttccagagcttctgagtgcttgaagactggcaacaggaaggcatttgctggggaacttgaaaaaaagctgaaagacttggattacaccaggacagtgctacacacagaaacggagatccagaagaaagccaacgacaaaggcttttactcatctcaggcaattgagaaagccaatgaactggccagtgtggagaagtccatcattgaacatcaagacctgctgaagcagatccgctcataccctcatcggaagttgaaggggcatgatttgtgtcctggtgagatggagcacatccaggatcaggccagccaggcatccactacctctaaccctgatgagtctgccgacacagacctttacacctgcagaccagcctacaccccaaaacttatcaaagcaaagtccaccaagtgttttgacaagaagttgaagaccttggaggagctctgtgacactgaatatttcacccagaccctggctcagctcagccacattgaacacatgttcagaggagacctgtgttacctcctgaccagtcagattgatagagcacttctaaaacaacagcatataacaaactttctctttgaagactttgtggaggtcgatgacaggatggtggagaaacaagaaagcataccctctaagcccagtcaagacaggccgccttccagttctctagaagaatgcc

SEQ ID NO: 1244925 - DNA, 4001 bp, Homo sapiens
gattctcctgcctcaccctcccgaatagctgggattacaggcacccaccacgcccagctaatttttgtattttttagtagagacggggattcaccacgttggccacgctggtctggaactcctatcctcaagtaatccgcccgcctcggcctcccaaagtgcaggcgtgagccacagcgcccagcctgattccattctatatgaagttctccaacaggcaaaatggttatggagatcaaaataaaggtggggtcgggaatcgactgggaagagacgtgatgaaacgtttctgggacgatgaaaagggtctgtgacttggtaggcatcacggagcggttaggggccaaaactcatcttcctgtgcacttgctgtgtgcactggcgctgtgtgtaaatgccacctcgatttaggaaaaagatgacgtaagtacggcacaaagtggccggtacgcggcaggtgcatgggaagaaactgcggaatgaaacaaccgcgagctaagagatggggcagcgggagaaatgaattcgagttccgcctcctaccaggaagaaccggctcgggccggagggctgcacggaggaccacacggacgcctgcgggcccgccccttccgcttcacgacgttcagcctgcgtctggaactggaatggcctagcccaaagctagataacaggtagattgtttttccgacaaattatcaaacgacccatcattgcactctttcaaaatttgattctcagacgtacccattctttttttttttcctccgggaagatgagatatactcattcttgaaaatacctccgggcttgccttctgcacacttctttccctccctgtctcacgccatggtagcgtccgcctaggttgcaggcgacccgcggggtggggcacaccattcaaagaaggggagggattgaggtttgcatcaaaacaaatacccctgcctttgcaaaggccataactaagtaatccagaaaaagaaatgcaggcggagaatagcagcctccctctgccaagtaagaggaaccggcctaaaggacattttctctctctctcctcccctctcatcgggtgaatagtgagctgctccggcaaaaagaaaccggaaatgctgctgcaagaggcagaaatgtaaatgtggagccaaacaataacagggctgccgggcctctcagattgcgacggtcctcctcggcctggcgggcaaacccctggtttagcacttctcacttccacgactgacagccttcaattggattttctccatctagcggagccgggggctgcctggaaagatcgctccaggaaggacaaaggtccggaagttgtgggaccttagcagcttgggctccccggatcacccccaaatgatcatttcggaatggagccccagttttcactaggatgccatgggctctaaaatatacagctatgagttctcaatgtttcgagatccaaaagtctcagacctcaatgctttgtgcatcttttatttcagggattccctacgcccagcaccgggtggatgtgcaaagaagtacgctttaggccggctcaaggttccccaaagctccactcctctgcctaggcgttcaactttgagttcggatggtcctaacatccccatcatctacacccaggtctcccaacaatgcaactcctatgatgatccctctagccaagcttccatcccactcacccccaaactcgctaagtccccactgccccacccccagccccagcgattttcccgagctgaaaatacacggagccgagagcccgtgactcagagaggactcatcaagttcagtcaggagcttacccaatccagggaagcgtgtcaccgtcgtggaaagcacgctcccagcccgaacgcaaagtgtccccggagcccagcagctacctgctccctggacggtggctctagacttttgagaagctcaaaacttttagcgccagtcttgagcacatgggaggggaaaaccccaatcccatcaacccctgcgaggctcctggcacaaagctggacagtcgccatgacaagtaagggcaagtaatccgcctgccggaggaagcaaaggaaatggagttggggaggagggtgcagagtcaggattctcgccgacctggtgccgtagatactaacattttggggtggaaaattctgcaagccagagctgtgagggcagaattggtggaaatcattttggaggaatcctgcattgtgtcaaatatgaagggtggaaggaagaaagcttttgcgtttgctctcagctggatcctttcttctcatcagttaaaatgtcattttttaggaaggctttccgtaatatcacaccctaacgttttctcccagatactttatatcacaccatcttatttaatctccttcacaacccttatcactctgataagatttatttgttcattgctttcagtacatggaaacgtaagccttatgaggatatagaatttttctactatcttattcattgttgtattcctgagtgcctatatcagtgctgggtagcaagtaagagctcgataataaatattttttgaatgagggagacaggtctgaagcctggagaatgagatgcagaagaggtgcaagacctgctgcgccctctgcaggcggcgggggggcggtgcaggtgctttaagaattaccgcgggactcggtagggggagcgtaggcgcttctcgccaagatagaagcgttcagactacaactcccagcagccacgaggagccctagggcttgatgggaacgggaaaccttctaacctttcacgtcccggctccgcgggttccgtgggtcgcccgcgaaatctgatccgggatgcggcggcccaatcggaaggtggaccgaaatcccgcgacagcaagaggcccgtagcgacccgcggtgctaaggaacacagtgctttcaaaagaattggcgtccgctgttcgcctctcctcccgggagtcttctgcctactcccagaagaggagggaagcacaggtgggtttctttagctctgcgtcggatccctgagaacttcgaagccatcctggctgaggctaatctccgctgtgcttcctctgcagtatgaagactttggagactcaaccgttagctccggactgctgtccttcagaccaggacccagctccagcccatccttctccccacgcttccccgatgaataaaaatgcggactctgaactgatgccaccgcctcccgaaaggggggatccgccccggttgtccccagatcctgtggctggctcagctgtgtcccaggagctacgggagggggacccagtttctctctccactcccctggaaacagagtttggttcccctagtgagttgagtcctcgaatcgaggagcaagaactttctgaaaatacaagccttcctgcagaagaagcaaacgggagcctttctgaagaagaagcgaacgggccagagttggggtctggaaaagccatggaagatacctctggggaacccgctgcagaggacgagggagacacgtaagtggtgatggcagtggagtgtggagtctggggagatgaagtgtgaggtcgatctgtcctctggtcctgagacccacttctccaggcctctgccccctttgcttggcgacccaggtttattgtcccccatcttcctttcagcgcttggaactacagcttctcccagctgcctcgatttctcagtggttcctggtcagagttcagcacccaacctgagaacttcttgaaaggctgtaagtggtaaggataacaacggggcagggagctgaccacccccgagattttcactgtaaaacagtccagttttctaggagagggatgccccagagctgggagaagcggcacgtagcccttttagactgagcttacattttatctagcagtttgtgtcttctacttccctcaaggattcaggggggcttacctaccccagaggcaggctcagccctagccctacacttgaaaagca

SEQ ID NO: 1244926 - DNA, 4001 bp, Homo sapiens
tggaaactttccacttgataagaggtcccaagacttagtacctgaagggtgaaatattctccatccagtggtttcttctttggctggggagaggagctggtgttgttgggcagtgctaggaaagaggcaaggaaaggtgataaaagtgaatctgaggcataactgcacccttggtctcctccaccgcttcttgtcctgcttgcttacctcgcttagtgctccctgggggcagctcgtggtgaggctcccctttcttgcggagattctcttcctctgtgcgccggtctctcccaggacaggcacaaacacgcacctcaaagctgttccgtcccagtagattaccactactcaggataggaaaagagaagcaagaggcagtaaggaaatcaggtcctacctgtcccatttaaaaaaccaggctccatctactcccaaccacccttgtcctttctggagcctaagctccagctccaggtaggtggaggagaagccacaggttaagaggtcccaaagccagagaaaagaaaactgagtgggagcagtaaggagattccccgccggggatgtgatgagaggtggatgggtagtagtatggaagaaatcggtaagaggtgggcccaggggtcagaggcaagcagaggctggggcacagcaggccagtgtgcagggtggcaagtggctcctgacctggagtcttccagtgtgatgatggtgaggatgggcctccggttcatgccgcccatgcaggaactgttacacatgtagttgtagtggatggtggtacagtcagagccaacctaggagataacacaggcccaagatgaggccagtgcgccttggggagacctgtggcaagcaggggaggccttttttttttttttttgagatggaatctcgctctgtcgcccaggctggagtgcagtggcgtgatctcagctcactgcaagctccaccgcccaggttcacgccattctccttcctcagcctcccgagtagctgggactacaggtgcccagcaccacgcccggctaatttttttttgtatttttcagtagagacggggtttcaccgttagccaggatggtctcgatctcccaacctcgtgatccgcctgccttggcctcccaaagtgctgggattacaggcatgagccactgcgcccagccaagcaggggaggcccttagcctctgtaagcttcagttttttcaactgtgcaatagttaaacccatttactttgcacatctcatggggttatagggaggtcaaataagcagcaggagaaagcccccctactgctcacctggagggccactgacaaccacccttaacccctcctcccagagaccccagttgcaaaccagacctcaggcggctcatagggcaccaccacactatgtcgaaaagtgtttctgtcatccaaatactccacacgcaaatttccttccactcggataagatgctgaggaggggccagacctaagagcaatcagtgaggaatcagaggcctggggaccctgggcaaccagccctgtcgtctctccagccccagctgctcaccatcgctatctgagcagcgctcatggtgggggcagcgcctcacaacctccgtcatgtgctgtgactgcttgtagatggccatggcgcggacgcgggtgccgggcgggggtgtggaatcaacccacagctgcacagggcaggtcttggccagttggcaaaacatcttgttgagggcaggggagtactgtaggaagaggaaggagacagagttgaaagtcagggcacaagtgaacagataaagcaactggaagacggcagcaaagaaacaaacatgcgtaagcacctcctgcaacccactagcgagctagagagagttggcgtctacacctcaggagcttttcttttttttttttttttttgagatagggtcttgctctgtcactcaggctggagcacagtggtgtgatcacagctcactgcagcctccatctcctggcctcaagtgatcttcccacctcagcctcctaagtggctgggactataggtgtgcaccaccatgcctggctaattttttgtatttttttgtagagacgaggtttcatcatgttacccaggctggtcttgaactcctgggctcaggtgatctgcctgccttggcctctttgagagtgctgggattgcaggtgtgagccaccaagcctggtcaggagcttattttcaaaagccaaggaatacacgtggatgaagaaaaagaaaagttctgcatccccaggagagatgctgagggtgtgatgggatggataaaagcccaaattcaaggggggaatattcaactttgggacaggagtcagagatcacacattaagtgggtaaactataaaaaaacactgacaggaagccaaagggtgaagaggaatcccaaagttccaaacaaaagaaatgcagggggatacggccaggcattgaagtctcatggaagccagcccctcagggcaactgaccgtgcaagtcacagacttggctgtcccagaatgcaagaagcccagacggaaaccgtagctgccctggtaggttttctgggaagggacagaagatgacaggggccaggagggggctggtgcaggggccgccggtgtaggagctgctggtgcaggggccacggggggagcagcctctggcattctgggagcttcatctggacctgggtcttcagtgaaccattgttcaatatcgtccggggacagcatcaaatcatccattgcttgggacggcaagggggactgtagatgggtgaaaagagcagtcagaggaccaggtcctcagccccccagccccccagccctccaggtccccagccctccaggtccccagcccaacccttgtccttaccagaacgttgttttcaggaagtctgaaagacaagagcagaaagtcagtcccatggaattttcgcttcccacaggtctctgctagggggctggggttggggtgggggtggtgggcctgcccttccaatggatccactcacagtttccataggtctgaaaatgtttcctgactcagagggggctcgacgctaggatctgactgcggctcctccatggcagtgacccggaaggcagtctggctgctgcaagaggaaaagtggggatccagcatgagacacttccaaccctgggtcacctgggcctgcagagaaggaaccccctcccccaacaccatgccagtgtctgagacagctcggcttcctgtggagcaggaaaagaatggctgcttcacattctctcttccaatgtttcaccacaacccaagcactcctgccccacccctcaccagccatgcacttctttgaggaaaagacaatcagagagggacttccaaccttcccaccactaaatccccaagacttcctaaatgtgcaccctattcccaactcccttcctgtattttttttttttttttgagatggagtctctctctgtcacctaggctggagcacagtggcatgatctcagctcactgcaacctctaccttccgggttcaagccattctcctgcctcagtctcccgagtagctgggattacaggcgagtaccaccacacccagctaatttttgtatttttagtagagacagggctttgcatgttggccaggctggtctcgaactccttacttcaggtgatcggcccgcctcagcctcctaaagtgccaagattacaggtgtgagctaccgtgccctgctcccacctcctgttaacaaggatatagtcattctcagcctgcaatctctgtatggggaaggacacccccttggcccccacccttccccacctgatacacggctccatttctttgattcctttcactgcaaagcttctggaagaacaactgtctcaccgctcacctgcccattctcttcggacactcctcagccctgcattacaaacccctcacgaatggcccgtctcggcttctttaatctcatctcttaacaaccactc

SEQ ID NO: 1244927 - DNA, 4001 bp, Homo sapiens
aggatgtggagaggtcagacgaagcttacttaagtaaggcctgaaaagccaggccggagaatatggccacgataaggtgggaaataaggagccattgacagtttgtgaacagaggaatgacttcatgaaagggctgtttgaggaaaggaatctgataggtggcgtgaggcaacaactcttggcctggagctattacagagaatttttttttttttttgagacagtctcgctctgtcgccaggctggagtgcagtggcatggtctcggctcactgcaacctctgcctcctgggctcaagcaattctcctgcctcagcctcccaagtagctgggattacaggggtgtgccaccacgcccagctaatttttgtatttttagtagagacagggtttcaccatgttggccaagctggtcttgaactcctgacctcaggtgttccacccgcctcagcctcctaaagtactgggattacaggtgtgagccaccatgcctggccaatttaagttaggtatttcaggccaggcatggtggctcacacctgtaatcccagcacttgggaggctgaggcaggcagatcacttgaggtcaggagctcaagaccagcgtgggcaacatggtgaaacctcgtctctactaaaaatacaaaattagctaagctaggtggcacacgcctgtaatcccagctgctcgggaggctgtggcataagaattgcttgaacctggaggcagaggttgcagtgagtgccactgcactccagcctgggcaacagagtgagattccatttcaaataataataataataagtatttcaaaggaaaattcagaggagctggcgatgaagatggagatgctaccacgcaagctgagcccgcagtgtggagcctggcaactggaggcacactccttgcacgatgcagctctgtactgtacacggtgctggcacataccctccctcgctgctcacaggtagagacagaattaataccctctcctacagaaagctggggcccacaaagtcaggagacttcccgctgtctcctcagggagctggagcctgggttttttccagctactctcagagagagttccactcacagccacttgtccacagagccagctacccaacagcatcctgacacagcattgcagatgacaggcctatggctcactgtctttgagccatctgtcctggggctgatctgtcctgggcttggaggtggggcagagaactagaaccctgcctctgcctgagggaagtggtaaggaatggggccgatcagcagaacaggcagcgaagcctgctaggagcgcctgtctccaggcgtggacaccaagggtggtgggcccctgcttgtactcacctgccctgggctcactcgtgtgtaggtcactcttggtgacacctatacatggggaaagaacagagcttagggcagttgggggactccgtgtgtgtgtggtggggaggggacggcaggccccaagcgccaggctgggatggagaagttggctactgaggactgaggaaccggcagaggtcctcagatggtgactgtggagggtgcggcgagaacagagcgggactgggctagcctttcacatccctctctccctgggccctccagggctcctacctgcggaggcagaggccacaggctctcgggacaatgggctcccgcctcctccgccggtccagccatcacctgtgggtccaaagcgaagagttggggcgctggacgcggcgaggccctgccctctctctccccaggcccagcccgccagcggaagaactccgcgtccccctcggcgcgccactccttccaggacgaacttttggcaaagcgctttgagctcgcgggccgaggccttcccaggagcgggtcaccttacctcgctgggacccaggagcctcgcgagggctgccaggagaagcagttggggcgaaggcggaggaggcgccattccaagcggccccgggcccggcccgccgcccagccgctccgccagcgagggagcgcgcgcgccccgcccctccagccccagcgcccccgcgccgcccgcgccgcccgcgcgtccgttggccctgggctcgcgcgcgcccctccccagacagtgggcccccggtatcgccccgccccaatgcccgcccacagcagcggagtgtgcgcgcacgcgtcttaaacccgaagccggaaaagttaagtgtaggaaccgggtcagcgcgcaaggctcagtagggcaggcggggggcccctttcctcgtccggggattcgtctcagcaggtccctgcagtctgtagagcagctgcacagctgcagcgcctggatgagatcgtggagcggagtgtaaggccggaaatggaatccctgtggaccgggtggcccaggctggggagacgggtacactcccctggcaaacccgcttcagatttgtcggtgtgacctgcaatgagaagaggggcagaatcatgaagtcaggaagagctgctgaagggagagggtcccacctctggagcttcgccgtcggcccaccccgctcccgccctcgcaaatagggtccaacgcggaggagcctcgggaggtgtctccgctccccaaactctccaaacccagaagccccgggaggccggagctagccgagaggctgctgtcttccccacctccgccgtcgcccagcggtggcaggcgcgcgtctagaaagagattggtcgccgcgagatggggacgccacaggcctcacccccaggaggtgcgctggccggcccgccccgcagcggggcgctggttctggttccctctccaggatttgggggggaaacgtgggtagagagcgagggtcgagatgcctatcccaaagcttggaaacagcgagaacgtgttatttccgtggtctcccatgcaccccggtttacgaggcgttccttgtaggtcggacgggcatccctgtcgcagggcgcctgagtgtgtccttttctccgactgactctcggaggcttggggctgctgtttctggggaagccactcccgggctgaggatttccttgatgtggagccccgagctcgcggggacgggggcgaggagtccacgggacccgcactgatgcaggcggggaagcagcagcctcccgccagcggctcaagacgccgcgctcgacctctctagcccagtgccggaccccgcccagccaagttattgcggggttgcggggccgggcgggggagagcagggccgcccgagggcagagcgcgcgcgcggccgccgccccacggggtcccgggagccggcgcccggagctgcgacttactcacctctcccttctgcttcttttcatcggcctctgagggcgcagcgcccagggtctggcggaagaccctgatgacagtcgggtccccaagcctcggcctccagtctccccacgtctccatggccaacaccgctctccccggctcgtgccctccccactcccttccggctgccggcgcgccctccctccctggtggccccggctcctctcaccctctgctcccacttgttgcaattgctgtacaaagggccggggcgggggtggggggcgggcgagggcagccgggcccgaactggctgcctctgcccggccacggccaatccagagcgcgcccgcgcgggagggccctgggcagccgccgccggcgggcggagccgcgggcaaagcgcggagctcgccgagtagacggccccgccgcccgctgcccgccggggctctccagcttcgccatgccgccgtggggcgccgccctcgcgctcatcttggccgtgctcgcccttctcggcctgctcggcccgcggctccggggaccctgggggcgcgccgtcggagagaggaccctgccgggggcccaagaccgagacgacggggaggaggcggacggcggaggcccggcggaccagttcagcgacgggcgcgagccactgccgggagggtgcagccttgtttgcaagccgtcggccctggcccagtgc

SEQ ID NO: 1244928 - DNA, 4001 bp, Homo sapiens
ctgcccacagggcaaccagccttcctgggccaacctaacagctcaggcaggagtggggaaagaggggtgggcccagggggagggggtccacttggctgcttcaggaatgtgctgactgagtggttttggagaaagggaggggacagaggcaagtccctaggcttcaggcagaagcttagcctgcagcttggggcccagccagggctgtggacaccctcacttgtgcttgtaccgtggcgggtgaggagcagggaccacccaaccacctctctccccttcagaagcctcagcagcacagctcaggcactgggggatgggggacaggcagggcagaggctgctccaggctgtgcagtggaggccaaggcccagggaagaagacaggatggggggagggggtgtgggagtgggagaggaagaggggatttccgggagggggagtggcagagaggggggccaagaaggtggtggaaggaatccggcctgacggccccctcccccgctcctttcccgaggcagtcagggtgggtcagctgtgggggggtcggggggctcagctggcctcatctggaacccagagggccggggaagagcagtggcggagacaatggggctgtgtctgtaggagagtaaatgtgtacactgccgagggggagggggcagtcctgcagcttgtgccggagcatatgtgagggcaggagccggcccaggctgtggggaacagaaaacaaagggcctgctgagatttccgccagtaggagctacggaggaccgagcgagggagggaggcacggcgggagggagcaccggaggcaggcgtctcagaggtactatccctgccaggccctcgatcccctcgtcccagcaaacagccaggcagtggccgactcggccttcccctgcgctctgggggcatgacctccgaagagtcggggctccttcaccctgcttcccacacccgggcctgaggggttccctgcgtgagcaggagattcaagacatacagggcgcccagaaacttgatggatgcccaagagccaagggctaacctgcgtcctgagagggcagcgggagttcagtaacaacacgagtgcgacccccttcttcatgacttatggaccacccgccttactccagcccccgggagagaggggagccgcctagaggggtccttcttcgggggaggattcagtccttcctccattgtgtgatcataagcagtccgggtttaaatcctagttaagcctttaagtaactatgtgaccctgggcaagtcgcagcctttctttgaatctcgtttcatgatctgtgaaatgggagaacaatagctaccgttctctgaacgttcgaagaatcagaagaggttagatgggggaaagctccggaggctcaaactgccacgcgggagcgggttttgtcctcttcccccaggattcaaagttcaaggctgaggccgcgccggctctcaggtgacggggaagggcctcttcccctcctgaccccacgagaaggcgccgaggtcttccgccccgggccgggcagttgggacccgcccggacccctcggattcctgcggggggggcctccctcggggcttgacgtcatccctccccgtgacgtcacggggcgcccctgaggtcacagggtcgcagcgcagacaaaggcccgccttgccccgggcccgagaccctccccaggcggcgccccccgccccgccccgcccccgctgtcccctgctccccggccagcacctgaggaactcctgcaggcaggtatcgcagaaacggtggccgcaggtggaaacctgcacaggctcgcgcatgggcttcccgcacagtgggcacagcagccgtcgcttgggcttctccaggaacttgtagtcgaagccaggcatggcgggcgagcggccggcacgggcgagcggggccaggcacgcggcggccccacagcccgcgcctcgctggagcggcgctcccggctccgggcggcgccgactggcggtcgcggccagggctcggctgtgaagcccgccctccggaagagagggcggaccgcggccgcgcggtcctaatgcgcgccctcgcggccccgcccacccccgagtgcatggtttttgggtctggtgaccgccagtctcgcccacccacgggatcatgggcttttctttcccctgggggacagagatcgtggctccgcttctccccagagcccgcgggccccggggaagtgcgggtcggaaaaggggacgggccgcgccacaaaggttttcttctccagaggcaacagctcggcctccggggccgtgagcagcccaggaaccgtggccccagcttccaggtgctaggcagccgaagcctggcaaccagctccggggagcccagctggggcggggaggctggactgggcgctgggccagaggaacctcggccccagcctccggctgcgcccacattcctcccttggccgcagccctgccaccgaggtcgggcccagcccagtcctggggtgcctggtcgccacccccacccttgaagacaccacactccaggcaggcagctgatatttttattggccttcctgtcctctgggaaaccggtctggtcccaccagctacccattctctcaactgtttctggggaaaggcatgggggggacgggcaatctccagcgcggatcttttctgcagcacttagtgactcctgccctcctgctggggaagagaggcaagccgacgtctagcaaatcctgcctcaggatgaaagtgtaggggaggtggcagcactcccggggaccgcccagccccgggctatgcagaagctaggcaggcctaatggccagtccaggcaggccctggcttgccctgctccaaagtatggagatagagtcccggtaagcaccaaatacttttttttttttttttttttttttttttttgagagggagacttgctctgtcatccaggctggagtgcagtggtgcgatctcggctcactgcaaacttcacctcccgggttcaagggattctcttgccttagcctccagagtagctgggattacaggcgcccgtcaccatgcctggttaatttttgtatttttagtagagacggggtttcaccatgttggccaggctggcctcagtctactgacctcaagtgatccgcccgccttggcctcccaaagtgctggaattacaggcgtgagccaccgcacccagccttattttcttctttttttttttttttggtggagacagcggtctcgctatggtccccaggctggtctcccaactcctggccacaagggatcaagggatcctcctggccaaagcactgcctatgcaggtgtgagccaccgccgccggcccagacttattttctaactgggctaggggaaagggtagggtctgtgtggagctacagctgccttcagccttttttgttttttttttttttttgagacggagtctggttctgtcgcccaggctggaggggtttacgccattctcctgcctcagcctcctgagcagctgggactacaggcgcgtgccaccacgcccagctaatttttttgtatttttagtagagatggggtttcaccacgttagccaggatggtctcgatctcctgacctcgtgatccgcccgcctcagcctcccaaagtgctgggattacaggcgtgagccactgcgcccggctgccttcagcctttttatggcaaggctctggaggccaccctgcttccaaaggctaggtctgccttctaactctagccaggctggaccctggggacactgactgaagggaggaaggggtaggaagggcaaagaggtggtaggagaacaaagtggttgaggtttccatatccaaggccaaaagcagagcaggggttttgccagccctgataccccatgatgacacaatccaggagacagctgcaagtcatgccttgggcacctgcacttttcagagcattcagaggagaagcaatatcagggtggtccag

SEQ ID NO: 1244929 - DNA, 4001 bp, Homo sapiens
caccctctgggacccaagggctgtcaggcttcccccggcccagtgattctcaatcgggagggaatgtatctcccagcgtactttcggcaaggtttggagatatttttgatttcatgcctgtgctatcagcatctagtgggtggtggccagggatgctaaaatcctacaaagcacaggacggtccccacaataaagaattatccagctcaaagcatcaatattcccacggttgagaaacccatccgcaaagccacttcgtggccctccagggggtgtggctgccctactttccaccttcatgcgtggggcaggactgagagggccctcaaaccaacacgctcaggccgcagagagtgacaaaaagtttattctgtgcttctcgcagcattaggcaggggataaaactggagagagggcctggtgtggaggtggagggactctgtgggcttcactctggtaggaggagagcatcagggcaggcctttaggctgttgctctgggcagggggtgggggtgcgggggcttacagtgggggcccttagttggcacaggttcggaagggccccaggcagacatgaattctcctgagacttgaggtaggttgcttcagccagcccgggcggagaagaagggcagagagcgaacataggagtccagtcgggagcgaaagagctcactttgcacagtttggcccagcgggcacaggggattcttcaccaccagctccacatacagctatggaaagggaagatgttagagccaggctttggatacttctggtttttagccccaaaccttgtataacctcaggggtgtgtgaatgcacaaggaataagggctggaaggcaagccctctctgaggagaaagtggtggtgggagttaagaacctaagggcccctgagaaaactcttgagttgagcaaacatatagtaggattggggcaggggagatgagggagtcttggggttctgaagagctctgggggatgggtccctggggctggcactgaccgcactgtagatgtggtgcagcacatctcggatgggtcccacgcccaagtcagtattcatgacaactttgatcccagtgggcgtctcgtagtaatggagtttgtaacggctagtttggaaggccaggaagccatccttcctgcagagatgaggagggtgttaaagaatgggagcagaatctctcccaaagagacacttctgatccccgcaaacatcgactccctctttatctaaacatatcctttgtagaagcctggttgagtaaagacatcgcccatcgtcacccctcaatttagcccccaccaacttctctactttcagaccctccccacccccactcctgccagctccagcactctcgctccggactcagcctctcttaagtaccctttcccccctctggaggccaatgctccttccacttcagaaagtttcccccatccccaaattcccaaggctagccctcctcccaacatcttctctgactccgcgtacatgtctagcggggacatcttgctgacaaacgagcggatagagaagagcatcccgtacatcagcttatactcctggagggagaggggcagagttagctctcggttgatgcgggagatggggtggggggtgggaacgagctggggtttggagaggaggggctgggttgggactataggtgtttggagatgagaggtcgcccgggctgcaccggggccctctcgtcacctcctccttgggaatccctgcttgcttcttgcggtgccattcgctgtagtgcagacacactccattccggtcaaacaggtacaggttgtggacagtcatctgcagggcagggagtgtgagcctcgctccggggccgcccccactccttgggctcgggttcccggacccacagccttccaaccaggtggggaccccacccacggactcaccggaactgctccgagtgcccgtcaagagttacttccggtttccacggagctccgccccttaggggggttctcgctcggccgcggctgggcattaactccgctccagtgctgcttgtcagactccgcctccctccctcagccaatctgtggccaccggagccgcgcacgcgcggccaggcgctcgggatacagaagtgatgtgagtgtctgcgagcgtggtctcgcgggcgggtgacgtcatcgaggcgagagaggcggagccgtggacagtgggcgggaggctgccaacggttttgagcgtagggggaggcgtgagagggggatctcaggggaggaggtcaatcgcttgccccccactttggcaaattggggactgaggactggaagggtggagagtaggcggaaccaggtggtcgtcggggcagaggatctcgggctaggcttgagggcggcgtgcttcttagggacgacttagggcgtgactgagggttcacaaggtttcttttggggtggtcgggagggagagattctagggaacaaggaagctcgctatggctttcttgccaggaggggtcgaagggaaagtacaagggagctggagctgaccctgggtagaacgggtgaagggatgggggagcgtgaggttccgccctctcttgagactggaaccaattgagggactagtagggcagggggacagaaattgggctcctagtggatttgggtccgtttccgttgggacgttttgggtgtgagaacttaagagctcagttgaccggggatagcctgtgccggagttgatctgcagcttccagcactcgtagtcgggaagaggagcttcagcagcgctgttgtcccacagtaggtcttctgtccgcacccgctctgcgctgcaccctcttaacgctgttcccaggagctggggaaagggatgcttttgcccactcccatggcccctggaactggtggaaacctttcctctaaccagaaagcctcgatatccttaattcaccaaggatccttggcgtggagtcttcctcccttctcccaagtctttctccgtgaacttttcctcctggactttgctaaagcagaacctcccagctctttgctgtctccggttgtctcttccctgtattcatggcaacatcagctgacagccccagttcacccctcggggcggaggatctcctgagtgattcatcagaaccccctgggctcaaccaagtgtcgtctgaagtgacctcccagctctatgcttctttgcgcctcagccggcaggcggaggccacggcccgagcccagctgtatttaccctccacctccccgcctcatgaagggttagacggcttcgcccaagaattgagtcgaagcttgtcagtcggattggaaaagaacttgaagaaaaaggtgagggaagtgtgtcttggagaccactgtggcactagacaccagagagtcttgggattggggttggtaaaaataaaaagctttgatgagatttgaactcttcctgttggatttcatattccttttaactgcataggcagccatgcttataagggagggagtgacctgggacaccataatttgaaaattatgaaacttcccagtgtttttttgtgagagacatctctgctccgagtagatagagcaaacctatggggtaggttggtgagctatttcccgtgcactgggaatgggtaaggtttcttgatcccaagagggagctagggacttaggatagcagctccgatccttccagctcaacactatgttgatagtatggttccaactttggcatgtacatcattaagacatagcttagtcaactacaacatgttacagagaagatagttattagtattgtatagaaaaggtgtcagagtcaatttgcagactggttaggtcttccagagtttgaaaatgatagccataagccatacagtccttacatttgttcttgaatcggcaagaatctccgcaactcttgtcttatacctcctcgattattttatttacactctctttctggcttctgtagtatttgaatttctgatt

SEQ ID NO: 1244930 - DNA, 4001 bp, Homo sapiens
gctctgcagcttgaatattttctgagcggaattggggaggatggctcctgcaccctctgggacccaagggctgtcaggcttcccccggcccagtgattctcaatcgggagggaatgtatctcccagcgtactttcggcaaggtttggagatatttttgatttcatgcctgtgctatcagcatctagtgggtggtggccagggatgctaaaatcctacaaagcacaggacggtccccacaataaagaattatccagctcaaagcatcaatattcccacggttgagaaacccatccgcaaagccacttcgtggccctccagggggtgtggctgccctactttccaccttcatgcgtggggcaggactgagagggccctcaaaccaacacgctcaggccgcagagagtgacaaaaagtttattctgtgcttctcgcagcattaggcaggggataaaactggagagagggcctggtgtggaggtggagggactctgtgggcttcactctggtaggaggagagcatcagggcaggcctttaggctgttgctctgggcagggggtgggggtgcgggggcttacagtgggggcccttagttggcacaggttcggaagggccccaggcagacatgaattctcctgagacttgaggtaggttgcttcagccagcccgggcggagaagaagggcagagagcgaacataggagtccagtcgggagcgaaagagctcactttgcacagtttggcccagcgggcacaggggattcttcaccaccagctccacatacagctatggaaagggaagatgttagagccaggctttggatacttctggtttttagccccaaaccttgtataacctcaggggtgtgtgaatgcacaaggaataagggctggaaggcaagccctctctgaggagaaagtggtggtgggagttaagaacctaagggcccctgagaaaactcttgagttgagcaaacatatagtaggattggggcaggggagatgagggagtcttggggttctgaagagctctgggggatgggtccctggggctggcactgaccgcactgtagatgtggtgcagcacatctcggatgggtcccacgcccaagtcagtattcatgacaactttgatcccagtgggcgtctcgtagtaatggagtttgtaacggctagtttggaaggccaggaagccatccttcctgcagagatgaggagggtgttaaagaatgggagcagaatctctcccaaagagacacttctgatccccgcaaacatcgactccctctttatctaaacatatcctttgtagaagcctggttgagtaaagacatcgcccatcgtcacccctcaatttagcccccaccaacttctctactttcagaccctccccacccccactcctgccagctccagcactctcgctccggactcagcctctcttaagtaccctttcccccctctggaggccaatgctccttccacttcagaaagtttcccccatccccaaattcccaaggctagccctcctcccaacatcttctctgactccgcgtacatgtctagcggggacatcttgctgacaaacgagcggatagagaagagcatcccgtacatcagcttatactcctggagggagaggggcagagttagctctcggttgatgcgggagatggggtggggggtgggaacgagctggggtttggagaggaggggctgggttgggactataggtgtttggagatgagaggtcgcccgggctgcaccggggccctctcgtcacctcctccttgggaatccctgcttgcttcttgcggtgccattcgctgtagtgcagacacactccattccggtcaaacaggtacaggttgtggacagtcatctgcagggcagggagtgtgagcctcgctccggggccgcccccactccttgggctcgggttcccggacccacagccttccaaccaggtggggaccccacccacggactcaccggaactgctccgagtgcccgtcaagagttacttccggtttccacggagctccgccccttaggggggttctcgctcggccgcggctgggcattaactccgctccagtgctgcttgtcagactccgcctccctccctcagccaatctgtggccaccggagccgcgcacgcgcggccaggcgctcgggatacagaagtgatgtgagtgtctgcgagcgtggtctcgcgggcgggtgacgtcatcgaggcgagagaggcggagccgtggacagtgggcgggaggctgccaacggttttgagcgtagggggaggcgtgagagggggatctcaggggaggaggtcaatcgcttgccccccactttggcaaattggggactgaggactggaagggtggagagtaggcggaaccaggtggtcgtcggggcagaggatctcgggctaggcttgagggcggcgtgcttcttagggacgacttagggcgtgactgagggttcacaaggtttcttttggggtggtcgggagggagagattctagggaacaaggaagctcgctatggctttcttgccaggaggggtcgaagggaaagtacaagggagctggagctgaccctgggtagaacgggtgaagggatgggggagcgtgaggttccgccctctcttgagactggaaccaattgagggactagtagggcagggggacagaaattgggctcctagtggatttgggtccgtttccgttgggacgttttgggtgtgagaacttaagagctcagttgaccggggatagcctgtgccggagttgatctgcagcttccagcactcgtagtcgggaagaggagcttcagcagcgctgttgtcccacagtaggtcttctgtccgcacccgctctgcgctgcaccctcttaacgctgttcccaggagctggggaaagggatgcttttgcccactcccatggcccctggaactggtggaaacctttcctctaaccagaaagcctcgatatccttaattcaccaaggatccttggcgtggagtcttcctcccttctcccaagtctttctccgtgaacttttcctcctggactttgctaaagcagaacctcccagctctttgctgtctccggttgtctcttccctgtattcatggcaacatcagctgacagccccagttcacccctcggggcggaggatctcctgagtgattcatcagaaccccctgggctcaaccaagtgtcgtctgaagtgacctcccagctctatgcttctttgcgcctcagccggcaggcggaggccacggcccgagcccagctgtatttaccctccacctccccgcctcatgaagggttagacggcttcgcccaagaattgagtcgaagcttgtcagtcggattggaaaagaacttgaagaaaaaggtgagggaagtgtgtcttggagaccactgtggcactagacaccagagagtcttgggattggggttggtaaaaataaaaagctttgatgagatttgaactcttcctgttggatttcatattccttttaactgcataggcagccatgcttataagggagggagtgacctgggacaccataatttgaaaattatgaaacttcccagtgtttttttgtgagagacatctctgctccgagtagatagagcaaacctatggggtaggttggtgagctatttcccgtgcactgggaatgggtaaggtttcttgatcccaagagggagctagggacttaggatagcagctccgatccttccagctcaacactatgttgatagtatggttccaactttggcatgtacatcattaagacatagcttagtcaactacaacatgttacagagaagatagttattagtattgtatagaaaaggtgtcagagtcaatttgcagactggttaggtcttccagagtttgaaaatgatagccataagccatacagtccttacatttgttcttgaatcggcaagaatctccgcaactcttgtcttatacctcctcgatt

SEQ ID NO: 1244931 - DNA, 4001 bp, Homo sapiens
ccggcaaagagcagccatattttccttcttaagataccccttttgggaaagggcagggtcctcagagggcagaactggaaggaaattgacataaaggaacctggtttatctttatgtatctcaaacctatgaatttagaaacagccacttatgagaaaatgtgcctctgaccttggctgtccatagcttgaaggattttacagacatctatgtaatgagacttcaaagataatctcagaggatagaatgaacataaactcagggaaaggtatgaccattaactgggctcaggatctgcgtgagccactgctctgaaaacgaggttccctgggaccaaaaaaccctaaaacaaaacaagaagtgcaatgttacagttggagaggtgcttaaagacctccaggctcaactcctttattcgcaaatggagaaagtgaccaattttgtagaacaagaaaaagggagtcacagcagcaaaagacagcagtgcccaccccagcagtcatggtcacagacacctttagccaccccatcgtgagtattccaggcccacggtgagtctgtggccatctcaggcctgttaacaccacacacgctccactaaattgtatgtgtcgtatcattcaccactgcatcctaagcactgagcacggtgtacttggcagacagcagtccctaagtattgtgaatgaattaatgaatgagccctaaattcccttggtctgaattctatgcccaacaagcaaccttctgctcataatttacttctccattttgatttttttgcctgtagggagagaactgctgatgctattacctttgagcatttctttgcgcttatctctaggtagtagggttacatgctatttatcttattctacatatcattctatattttcctaatattttacagtttattatttcttcaatcctctctccacccatctccaaaaagcagtacttaaacctccttgtggatttgtttgggggaagaagtagttcttttaggcctcagttattaccaagtacagggtttcacaattttgtagaattcatgcctcctgtaatcctttgtcattggaactctggctctggagtctgcctgcctactgcctttacatcctggcactgtgtaaccatagccaagtttcttctgggcttcatttcctaattttacaaaagagaataataatggtacctacgttgctacaatgtgtgttaatgcacataaacggcccaaaccagtacctggtacagaataagcactcaggaaaggtcatttaatcatcagttaattattattctcaatattttctgcatatcaacattaaccaagactttatggcgctttctttctatactttgttttacgaggaaaaaaaggtatgatcaatatgtttggtcatactcccaaatcccaacttccccacaagatgcctgtcccctccctgtactggacactgacaatcagtcggggctaaggtagagttaggaactcctaagttccaggacttccagaaatcagagggcctgagggcaggatattataggaaagtcaaacagactagagatagactatggaagtcccttctaatttgggggatccctttgtatctccttaagacaaagcgctttttaagagaaaactgaaagagaaccaaggagcagtctctaattctgccagaaatgagcagcagggccatggaccctggggacgcaggccccagctctagccctgagctcatagaggttcaagggactagggctctcccatgtgctataatgccaaatcaaatcatcagcctctccatacctatttctttcttctcttccaaggagtccgacttatccccccttatccttcagaaaggcaggtggtataatggaaagagtacggaagtaaggtatcttcttttttcagagtttcaaattaaaagggaatattagtaaaatcaccaccattcttcgcacactcaccacgcaccaggtgctttccataaatcagtattcacagatgaggaaactgttaacttgcccaagttctctgtgctgcccacacacattttacaaggttgctgtaaagaaaaactaaaatgaggttgtgtgtgcatactgcagattcttggctaatggcaggaccctttatttctatttcttacctctgttctggagtttgcaggtccaatcctccataatcatagcctttgcttcactatttgggtgtagcaacctttccgttctccacgtatcttcctggaaattgccagcattctaccagaaactgtggtaagaggttctggattgaagttttcccctttttcattgtatttcttttttcattctctgagactctactcagaacgcagagtctgacgcagtatcttttgagctaaagctaaactcaagaacttcggcagccatttaatcttcaggaagccctgaacacaggcaagtctcagtacctttataccactagggccctgcagagtcagacactgggaacatagacagttacagacaacagtaaggatactgtgcctgatgaatacaaaagtgcagggtggtggaaagtgccctgctgggagtgcctggattctaatttccactatgtgctagttggctgggtgacctacaacaagctacttttcattcttgggtgtttccttcttacgtgcaaatgggcagatggatgcctactattaataaaagcaacaactgattgatcccttacttggtgtctggccctgtgtcaactgttgcatgtcaaaattccatttaatcctcacaaccaccacttaatagtaggtacaacaaacctcaaattacaggtaaagaacacgagacacagagagtaacctgcctacgctcacatcagagcaataccactctctgaaaatgtggataaacagatctctgatatccatcccctcctacgttcacacttcagtctatgaaacggttccaccacactgcaggctgcagagacataagggacgcgttggtgcctaacctggccctggtacaggagccttgggcgctacctgcctcactttgcaaccaaatgctccagggtatgcgggccctcagccggtttccaagcaaacgacccagaggtgtctcggataagaaacacacatacaccccactcccacacacacaaaacccaaagacacgctccaggggcagagggggcgcgtcaaggtggccgaaccctagctccagcagaaggaattacagtcagatcagcgggcccggggagagacccaaaagggagcagccgggaccccaagtctgacaatccactgctgaacacacacaccctgtccagcgtctgctcctccccggtccagacacagagagggtgtctgctctgggggacagggaggacacagactcgccacgcgcggagatcctccagagaaaggggccggaaacggaagtgcgcgccgaggctcctgggaaatgtagtccggagcggcccgggcgacagagcgagattctctctcaaaacaaaaacaaaacagaaaaactaaacaatgttaaaagtgaagttatagagcggaaatttttttttctttgagaccgagtctcgctctgtcgtcagactggagtgcagtggcgcgatctcggctcactgcaacctccgcctcccgggttcaagcgattctcctcctcagactcccgagtagctgggattacaggcgcccgccaccatgcccaactaatttttttaataattttagtagagaccagggtttcaccatattggctaggctgacctcgaactcctgacctcaggtgatccactcaccttggcctcccaaagtgctgggattacaggcgtcagccaccacgcctggcccaaaaattgtttcttatgcttgatctagtctgttgttagagtcttgattgtatttttcatttaattcattggattcttcagttctaagttttctgtgtggttcttttttatatctctgttaaattcctcattcaaattatga

SEQ ID NO: 1244932 - DNA, 4001 bp, Homo sapiens
atgacctgtaagttcctcatagaagcacgatagcatgaggctaagaggcatgagactaaagacaaactccggatccaaatcctcacccccggccccaactgaggccatcctgagaaaggatagtggaagggaggtgtcagatgatattggtggattgaggttgacttctgctgtggcctggccctcattcctaaaccctcccattgagaaacacttctttcttgcatgtaaatgtaatgtgcaaagggcattacttaccacgaaaatgatgacaagcagaaatagtacagagaggagaggcctcaatacattcaaggagcctgcaggtaatggtttaaagatttgagggtggtgtacatgcctatcaatatactgagtcattcttaggtcaagggagcaacaactctaggttctcacattccaccaatctagatggccctagacaagtattgtcatctctccatgtcttcatgccccttgtgcatggtagctattgtaataaccaactcccctggtcatcatgtacttatgagaactgaggagggatcaaagtgtctgaaaattaaagagctgggaaacacaagaccctccatgtggttctacaggttatcttgagcctggaaatccattatctctgaaggtttataagactttaaagggataattctctttcttcctttaataagatattgtgggtaagaaagaggtgtttcatccttcagtagctagttggttgtaaacacccaggaggtgaaaattaagttgaaatgaatacatgcattaggggtagatgaatggatggatggatgatggatggaatcatttattctcaggatataaagatgacaatgctgattcacttccatagggtaggtgttttgcattctctctttttttgaaacagagtcttactctgttacccagggtggagtacaatggtgcaaactcagctcactgcagcctccacctcctgagttcaagcaattctcctgcctcagcctcctgagtaactgggactacaggtgtgcaccaccatgcctggctaatttttgtattttttagtagagtcggggtttcaccgtgttggccagactggtctcaaactcctgacctcaagtgatccacccacttcagcctctcaaagtgttgggattacaggtgtgagccactgtgcccggcctgttttgcattctcttctgagtggtggttactggcttgccactgacgagaggcatttgtagaactcctcagaatccacttggagaccatttactgcctacttagcctggcacaccatggccttctcaaataccatcactaatcctgagttctcaactccttttttccagctgccaggtcataggactggtgagactcacatgcagaacgccctcttataatggaagaagccaagattacgtatagtttttggacctctgactaaactcccagccccccacacacatacaccctgtcaagacagcataagcaaatgtagaaataagaatgttgttattacaggattagtcttggttctaatttatattattaaaaagcaaatcacttgccaggtttaaaacttaaactaatttcataacaaatcctgacatcaaggtgaggctaccccacggtgtagtcaactgtacctacaattctcatttgtggagaaaccccaaggaacctacaggaatggaggctaggcatgcagtaccacgtcccacaccctcacaggcctggctgacccaggctggtcttaccagaacagacttttggttagcctggagcctggagatggcattttcattcaacttgagtttccgctccaagtctaactgggtgcactggagttcagcctaaaagtggaaagcagagaattaaggaggaaggagcccaatgcacacagaaggacacgggcactctccagccctgacatccccgcccttcttccctggaaagaagtttaacttctgtggctgatctcagaaaccagccgggaggcacgaagggttggcggtgagcccgtgccctcctggggctgcagtcagcatgagtcagcgaaaatacagtgagcacggatgccgtgctgctcaccatttcaagcattttgtggattaccccacaccatccttgccatacccatactagctgtaaaccagaaataaaatcctaagccccccaacaatctgaatggatccctcctctcagcaaagggcattccaaagttaacctgaaaaaccagttcaggccatgatgggaagggaggtcagacatggctcattataacttcctcccttttggaattactgatacagcagactctttcagtctgattagaaacatttacaatctgttctctccaaaacctcctccctggaggctttacccacatgataaaaccttggtttccaccacctcttatcttaacccagacattcctaagtctttagacaataacttgactctttcaaccaactgccaatcagaaaatctttgaatctacctatgacctggaagccctggtttccagttgtcccacctttccagaccaaaccaaattacatcttacatgtatttgattgatgtctcatgtctccctaaaatgtatactaggctgtaccccaaccaccttgggcacatgttctcagggtctcctgagagctgtgtcacagaccattggtcactcatatttggctcaggatgaatatcttcaaatatgttacagagtttgactccttttgtcaacataggtaaacatgattattatttcaaatgtacaggtgataaaatcatgcttccaagttcatcaatggagttgagcctaggctgaccccacaagagccaaacagggagtgtagggttggagccagatggccaagtgggaagtctacattttttttacttagcagttgagactttggccaaatttacttatgaataggaaaaacaaactttctttgtcttatagtcacacaacacagaacactttcataactaaaacgtgtgggtttttttccacatgaagccattctccaacaacagctgggtgtcctaagatgtaactcaattctgacactccctacttggagatggaagagatgcacggggcaagggatgtgggagggaagtgacacctctcttccctctccagtgcagggtgcacaccctccacggacttccaccccttcagcaatccagaagctcccggaagcccagccttttgggtttgtgtctttgtttattttgagatggagtctcgctctgtctcccaggctggagtgcagtggcgcgatctcgactcactgcaacctctgtctcctgggttcaagcaattctcctgcttcagcctcccgaggagctgggactacaggtatgtgccaccacacctggctaatttttttgtatttttagtagagacagggttttaccatgttggtcaggctggtcttgaactcctgacctcaaatgatctgcctccacctcggcctcccaaaatgctgggattataggtgtgaatcaccgcgcctgatgccttttgggtttatgtggaggcttcatgatgtaggcatgattgattacatcactggccattggtgatcctctcaaccttcagcctcacttccctccctggaggagatcagggagatggggctgaaagtcaaaccctttcatcatagggttggctcctttggcaactagcccccatcctgaggctctcgggacccccctcagccacccagtcatctcactggcattcagacacttaccacttcagagagtctgggggttctaagagctgtcgggtgccaggaaatgggggcagagaccaaatctaagtttttgttgttgttgttgttcttcttctttgtttgttttttgagatggagtctcacactgtcgtccaggctggagtgcaatggtgcaatcttggctcactacaacctccacctcccgggttcatgcgattctcctgcctcagcctcctgagtagctgggattacaga

SEQ ID NO: 1244933 - DNA, 4001 bp, Homo sapiens
aaaaaaagccaagtttatatgctacacaaagctggatgcagacccccaactctgaccttgctcaggctactgtctcctctgacaacacgaagacgggtcttgttctccctgaaggtgctgtgagaatgaaatgaaatcaggccatgctttggatcttaggctgatgtaacaaaaggtggtttgatttcagcctctgctttgaggccacaaggggaaggtatgatccccaaaccacctaaaaacattgcagacctgaaaggcccttaggaatccacctagtcccacagcctcactatactggtgaggacccaggtccaggggccaaaccccatgctcaaagtcacacggccaggacggaggacactatggtgcaagagtgttggctctccctgtggctctgatccagtgattactgggacgctgcccaccctccctcttaggcctctaataacaacccttcctgatcacaggaactctccggcccaccaaaggcttttgcttacatgacctcaagcttcctggactgtttggtgctccggactctacggacctggatacgaggctggtccatgggaagaaatgcaaactatgaaatcgaaccaacccgggtcacaatgcctgcgtggctatttactgcattaggtcaggctaagttcatttctctggacctcagtatcctcaacagtaaaatgaaactaaatcatatccacctcctgggtgccaccaggacttcgtgagggaacagaggtaacctccaacgttcatagttgacattcaaaaccctctactaaacaccatcagatggtggggcgcagtggtgcacgcctttaaagacctcctagcactttaggaggtcgaggtgggcagatcgcttgagctcaggaattcgagaccagcctgggcaacatggcgaaacctcatctctacaaaaaattagcgagcctgtggtcccagctacttgggaggctgtggtcccagctactcttgaggctgaggtaggaggatcccttaagcccgggaagtcgaggctgcagtgagctgtgattccgccactgcactccagcttgggtgagagggacgagaccctgtctcaaaaaaataaaaataaacaccatcagacaatgacaggattatggcaagcaacctaacctgtcttcatggatgatgggaagggactatataatctcccatcccctttctactctgacattggagatgccccggcctcgaattcaggcccatctccccagggcgtccagagtgtggcagagaggcccccggtggcccctctgcaccacccatcaggccaggctgccctctgcacccagcaggccgttccctacctccaggtcggcgctggcctggctcagggacgcgggagagcaggtcttatgctccaccaggcagatgtggcagatgcactcgctgtgctcggggcagaaaaattcccgcagccgattgtgctgggaacatttgcggcgcaacaggtcgcgaacgggcggctgcagcgggtggtcctggaaggcggggctgtcgaagtgcggctgcaggtgctcctgacagaaggaggccatgcacaccaagcacgtcttcacggcggcctccttcaggcagtggtcgcaggccacctgggcattcgggctgggtgcagaggcgcgggcgggcggcgtccagacgtcggcgggtggctcccgggccaggtcggcctgcaggaactgctccaccacgttgcacagcaccgtgttcttgtgcagctgcggtcgcgcctggtagacggcgcggcactgcgggcacaggtatggcgagccctggactgcccacgtctcattcaggcacgacccgcagaagttgtggccgcacggagtggtgaccggctccttgaagggctccaggcagatggagcacgacagctcctcggccagggggcacagctctgccatggcgctcccaggggtcgggacacaactgctgcacccgcgctccgaggccgccgaggaaacgaaacctagctcgagaggagcagtccctgaagccgtcaggaagtcacgtggggtgcgggggggcgggcggcgaggactgggcgggcctcgcgaggtactcccgggagcctgcgggcaccgcagtcccagtcgcccatgagctggcgaaggtcggccgcgctccgatccccaagagctcccgcgggctgggcgcgggacgccgggctcggccttagcccccgggatttagagcatcctcgcgaccacccggaggcttctgggggccactctgcggatgaggaagctgacgcctgggtgcagaaccccggacccccggattcagagcccaggtccagccgcgcttccgcacaaacttgcgctcggagcaagtcccctccttcccagcactcatctgagaccagaggtgtccccaccgtccccgctagcagcgctggttatattgtgggccaacctttaaaaaaataaaaaggaactgttaaaccacagtgctttttttcttcttcttttttcttttttttaatccttcctctttcctcttcccggactcggacatgcggacatacaatcccggaagactggaggccgtagtcacacactcaaatttaaacctggtgatttctttccattctactgatgtatcatgcttttataaaaattcccatttctactttcctgggatttggagttacccagtttaacaaaggctttctctctccttctctctctgtctctctccctcgctcgctcgctctctttctctctgtcgcgcgcgcgcacactcacacacacaatattggaacttaaatatttttctcaaagttattgatttaaacttacttcctttaatattttcttttgctctgttttccctcctctggcttgactgcaggacatatgggtggacaggagagtagaagtgttcaaaagaggggggatggtggcaaagagaaggatggtgttttggaaggagttagttggagtttgctttggggacagagtgagtagcaaaatgaggaaaaggtaaatgtcttagattaccttgtaatagctactatttatgggggggtaccttttgtgtgctagataagtcacatggttatctcttataatccttataaacccctgcaagactgccagtccattttaggaatgagagtctcaatttatgcaaagcaggactgggactgtagctcaggatcgctgacctccccattgtcactcactcctggtccccctaattcttgttctgcagactccttttcccctaaaaccttttaccatttaccttttatgtattccctttctttcttttcttttctcttctcttttctttttttttctttctttctttttcttgacaaggttttgctctgttgtctagggtgcggcactcctcccaagtagctgggaatacaagcacgtgccaccacacccagctaatttttgaaaacattgttttgtagagacaaggtctctgtacgttgcctgggctcattttgaacttctgacctcaagcaaccctcccacctcagcctctcaaagtgccaaaattacaggcatgagccaccatgggcctgtcccacatcttgtttgcacagagaggaggaagacagaagaatgaggggataggaaatgaaagctatgcatagaatctcatttcaccaaaaaaaaaaaaaaattacagatgagaaaactgaggcttagagaaactaaatagtgtgtctaagaatggacattggcacacagcccatctgctttccaaagccaggagtttcctaccataaaatgctgcctccaaagggaggagtggagcagtttccaggaaacactgtgaaatcccctctgacctatttatcatgggtgaggtggcctagtgattcatgccagaatgtggaattcactttccaggctggttggtttagaagggcttgttagaccaatgaggatgaataggagggccatactttatcaaattccatgcagtagatatttactaagacc

SEQ ID NO: 1244934 - DNA, 4001 bp, Homo sapiens
aaatggttaaaccccgtctctactaaaaatacaaaaattagccaggcgtggtggtgtgcacctgtaatcccagctacacaggaggctaaggcagaagaattgcttgaacctaggaggcggaggttgcagtgagccaagagggtgccactgcactctagcctgggtgacagagtgagattctgtctcaaaaaaaaaaaaaaagaaaaaaggaaaaaaggcagactatatgactgaatacacaacatgaacttttaactttttctgcaatttccccaaaaggtataaactgattttataatttagaggaaaaagaagtttaaaaagacacatcctaaaggcagtgtactgtgacccagaaaaaaatgaattcagaatccagaaatctgaattgctgccctgatgttacaacagactagctacttatttgaacctgagattctgccccaattgaaaatgttgacggtagttcaaagcgatcttgggaacaacaacaacaaaaatatgtaaatacaagaaacagtattatgtttgcaagcctcaatttaatcaatttaggaagtaactgaaaagtttttaacaagaaaaaggatacaattaaacgtatacttattgtattgtatactttgtttttatattactgacatttactttcactccattctagaattaaaccctcctaaaaccaagataagtttacaaaacctttataatactttatatgaggaattaaggagaaaattactcattaatctcatcatgactctgtagggccagaaagaacctgggagatgcagattctgtaacctgcaacggggtggacaataagactactgaatgactagtttcaagtggaatatccataacatagttaccccttactaaaaagcaaggatttcctatttcagtatctgaaaggttcaaaatttgataatgattacacaattatgttcaataaacaatcttttaaaatatattcctagcctttacttacatatcctacatatcccaactattttaactcacagcttacaagaatcagttataaaaagaagagtttgttctggaaactacacatgagataatatatgctgattcaatctaggaaggaagggcagaagcctgcaaaatgtgccactgagagggaaagatgactatccatttggaaggagatttagatcagctcaagaactcgcaaggactggtggcgagtggcagggtacatccatctgatgaatctgcagttttggtcggaaaaggatgctgtttgcaaacacccggtggggatgagtacctgtgccaagacatccttgaaaactccaggatacgcaccacctgactgcggaacagtgagcacaagacacccggagcgctgcagaatgggcacggcatccttggtaccgggccagccctctccacagcggcaggggcggggtaggggtgccctactggagggaggacatgggcacgactccccgaataaaaaccgctcatcgggtgggggcggggactaaccaccaccctcacaaccccctcacctccacgctctgttcatccattgcctccggctctcggcggggccgctggcgacccgcaggctccgcagtctgacctcttaggcgccggcccgaggtcgccagatcaaatcgccgataaaagcccggcgcccacgtcagggggctctgacaaccgccccacctgcgcgccccatctcttcaggtccagcgccgcctacccccatttcgccatttttaccggcgcgcccgccccgaggcgcagaagtagggcgaacggtggccgcagctcctttctcccggctcagccgccggccagcagccgcgccggaacctcggcccacgtgacgcgggcgcgcgcctatggaactgacggtggagttcagcgaagaaggtgccgcagagaattcgcaaacaccaaccgtaaccagagcagctgggggcgcggcggcgagagaagctgcgaagcgcatgcgcgcaggacgctgtgggaggggaaaggaggggaggagcgtggagcgatcgcctagttcccgcgttgcggggcgcatacgagacttggcgactcgctgcctcagggttgcgtgcctccggccctagcctgcgcaggcggcctgagcttggggctctgctacgccacccacgcccaccttggcggagggcggggccccacggctctcaaacttgcgcgccaaagacggagccacctggcgtactggtggaaagcgcagacttcagagccacacccgtagttaagtattcggactctgagattccagggtggggcccaggccatccgcgttttcacccagcatcgtgtgattcggcagcaggtggtctgtggcccgcactttgagaaaccctggtgcagaaggttcatggttagtggttctctctggaaggaacagtctaaggtttgtaggacttgcgttccacctaccaaagctaatcgagttagaaggctccaaactgaggtgtcatttctcattacggtggtgagaggacgggaccacacactgtgaagtcttcgttcccacatcccacacttcattcttgccgcctaagttgtcgccgtgggactattgaaagggtatcagcgatattcatctttcctataaatgggatctgctttctacagtttcctgccagatgtgtaaagattgcaagaattgaaggtttgtgagacaaagagggcatatcaaattcgtaatttgaatttaatttttcctgtatttattgcaaacaactaattatacttaaccgacctagagtgcacatgtagagaatcactaataatctagaaataagttcttgaatatcaggcatttaggcttataggtggtgggtagcaacaattttttttaactacttgggtcatgaacaagatataatttagaaagattaatctgagactgaaaaattctttcagtaagaattatttgtggtctttgacctacatggagctatttttacgaaaatggcctcagttgtacatttttaaatggttgatggttaatattatgagaattttacttaaaagaattatttatagaatgcagtgctaggcctggcgtggtggctcacacctgtaatcccagcactttgggaggccgaggctggcgaatcacctgaggtcgggagttcgagaccagcctgaccaacatggagaaaccccgtctctactaaaaatacaaaattagccgggcgtggtggcgcatgcctgtaatcccagctactggggaggctgaggcagaagaatcgctcgaacccaggaggcggaggttgcggtgagccgagatcgcgccattgcactccaacctgggcaacaagagtgaaactccgtctcaaaaaaaaaaaaaaaaaaaatgcaatgctgtacttgggattcagagtaatgagaagtggcccttgctctcaaggagcagtacagaagacaaataagacaaattgcaatacttacatgataaatagttaagattcttgtatgtttgccgaagaacctaagaatgtcgaaggacttattgcaccaattcataatagcgaacaattagaaacctgtacagctgattagaggccgttggttgcaagcaaaaaggataacttgagcaaaataaataatttagttggcaagatgctaaactcacatcgtttgccaagccctggggtttgagagccaacggtctgctccatcagaatcccttaaaggctgaccttgctgccctccccacaagaaaaatctcctaacttcatacatatccttaaataacttgctgttatacaacttacttgttatattatttgtataacttgctgttatagagcttaaatgtctatcactaaggaactgataaaaatgactatatatctagctgggcatggtggtgcacacctgtggtcccagctactctggaggctgagatggaaggatcacttgagcccaggaatttgaggctgcagtgatccaagatcacaccactgcactccagcctg

SEQ ID NO: 1244935 - DNA, 4001 bp, Homo sapiens
ccaccggccctcttgaggggacagaggggccagactgagcctgtcctggatctgggccaggtcaggggacacttgtgctcagtaggtatgggcatggtttgtttggagtggattgttccatgctgagggaggggtgtttgaccttgatgagggccactgtgcgcctggactgtgcaatgccagcacccagctcgtccatgcggtcctccacggcgctcaggactttggactgctcagcctgtggacaacaccctccatgagtgtgaggtctggcagaggccacagccctacactcgggtcccaggccttgccaggggagagaagggggtgactggggagtggtatctgtgcatcaggtgggactggagtggccacgatgtcccataatatgccagaggtgcctgcagcccaggctggtgcctttcctgaacgcctggggggcgtgcaggctgactgggtgtctgcctcgggtctctgacaggaggcctagtacagggccgtccgctggtctcagtgttgctcagatgaatttgagaacttcctccggcggggaagaggcagagagtaagccagttaggttgggaggtgggcggcggaggggtgactgcacaaggaggcattaagctgtcctgaggatcactgttcccaaagagcctgcatccacagtccaggcctggaaaaaaggggattccgggcaaatcccctaggtcttatgagtcactgctccaggcaggagaaacggaaaatcccttggccagaggcgccaagaccgggctggaggccaaaggaaactgggggcgggaggtagaggccgcggctcacatgctcccaccactggcccccggaacagctggacagagaatctgtgtgcccggtcgccctctgccgccctcctgccgcctgccacacccatcgaaagctgctgcctcagcccagggcaaatctgagctgagaccggcgtgaccctccgggcgggagcagcagccacgctaccggaaccccgcgggcctaacccggctccctcccgcctacacccccatagaccccggcccggcttcaggtcccctgcccgctcttcgcgtccttgtcctgttctcacgtccctccttcctcccttcccatctccatcaccgccagcagatgaccttgtcaaggctggaagggaccgcaaagatcctcaggttagaggaggagattaagacccaacccgggaagactggggggtccaaggtcctcggcccgctcgcgcgcggtcggtcaccagccccggctcacccgagtgtgcccccggagcccacctcctgaagcgcgcgctcctgctccagcggcaccagctcgtggccgcggtgctcctgtgcggcgcaggcctcgcacagacacacgcgctccgcgcggcagtagcgctcgagcggccgtaggtggcgcgggcacaggctctcctctagccggcgcagcggcggcaccaggcggtgtccgcggagggcggggctgcgctcgtgcgggcccaggtgcgcggggcaaaaggaggcgaggcaggagaggcaggacagcgcggcgggcagggccgcgccctcggggcacgcgtcgcagcgcactggctcttcgcccgcgggccacggctcgggagcgcagggggccgacggctccgggacactgggcagcgcgctgggtgccgagggctccggggccagggcaggggccgggccggggccggacccggggcccgagccctggcggagctgcagcagctcggacagcgtgtggttcttgcggagctgaaggccgtcggggaagggctcctggcacagcgggcagcgggccgcgcctccgggtccgccggctccactcgcgccacgatgcggccagagcgcgcccaggcaggcgagacagaagttgtggccgcagggcagcgtcaccggctcccggagtggctctaggcagatggggcagctgaagggtccactgccgtccatgactccgcggccgcccagggcgccgccgattgtgctccggcctgggagggacccgggccgttcgcgccgcggcacctccccctgggacctaggccagggctccggcccccgcccgcccccagctcggcccgccccgcagcaccgcccgcctgcgggcccgcggactcccagtccccgcccagacaacgcagggaggcctccgagcccgcgcgacccccaggggagtccgcgtggtcctaaggaagggcgctgctgaaagggtgtgaaactgagtgagcgcgggcggagaacgcgagaggtacagtggaaggaatgggaaggactcagcctccatccctctggtccttctgggccaggccagcgctccgcaggggctgggcgcgtctagctgtgtcatgcctgcacctttgcgctcgacccctccctggcacccttagcaaagttcctgagctgctgactgcagagaaaaataactgctgatgtacatatgtttttgccccttagcgactctttttttttttttttttgagacagagttcctctcttgtcgcccaggctggagtgcaggggcgctatctcggctcactgcaacctccgcctcccggattcaagtgattctcctgccttagcctcccaagtagctggaattataggcgcttgccaccacaccaggcaaatttttgtatttttttgtagagacggagtttcaccttgtccaggctggtcttgaactcgtgacctcaggtgatccacctgcctcggcctcccaaagtgctgggattacaggcgtgagccacagcgcccagctcctttagcgactctttaccccaagtagggaacttggacttttctagacctgaaatgggaagttgacgtcattccctaagtcccttgtctgaggaatgtagttctggcccctggacactggggacacctgtggtggggttgggggttccccaactggaagtatttaaagctcatctaattatgcacttaaagtggtgcgttttattgtatgagttatatctcaataatgttaagttaaaacactacaccagaatgacaacaaaataagtaaagtagcactgattataacccaaagtgtaaaataaacatctatgagtccatgccgatataaataaataataaattaacaagctggggagaacagacatatttcgcattgaaaattccaaataatgtttttttatttttatttttttagatggagtttcgctcttgtcgcccaggctggagtgcagtggcgcaatctcagctcactgcaacctctgtctcctgggttcaagcgattctccctcctcggactcttgagtagctgggattacaggcgcccgccaccacatttggctaatttttgtatttttagtagagacggggtttcaccatgttggccaagctggtctcgaactgctgacttcaggtgatccacccgcctcggcctcccaaagtgctgggattacagacatgagccaccgcacccagagatatctgtaattttggttagtgacaaagtcacaggtaactgctcataccactctggtgtattctctccatttggaatagaaagaaatgctgtgtttcagtaaggtgctgcagcgtggcttccttctgcaggatctgagggagactctgtcctgggcgtctgtcccagcttctggtactggctggcaattcttggcgttccttggcttgtagctgtaagatgcgctctaatatcagtctctgttgtcatttgccttttctctgtgtctgtgttcaaatgtcctttttttttttttttttagggagtcttgctctgttgcccactcaaactgctgggctcgagtaatctgcctgcctcagcctcccaaagtgctaggattacaggcgtgagccactgtgcccggtgcccatttcctcttatcaggacaccagttgttggattagggcacgctctactccagtatgccctcatcttaactcagtcacatctgaaaatactctatttccaaataaggtcacagccac

SEQ ID NO: 1244936 - DNA, 4001 bp, Homo sapiens
cccaggtgccacaggcccgtcccctggtttgtcccactggccactgtgacctctatatgtccaaggccaaactctgccctccacctacgcctctcaggacatagcaccccagccacctgcgtgctcaagacagaaacccaggtgtctcccttgccgccctctctgctgtcccccgtgtcccctctggcctgctttcgcctccacaaggtaccacttcccctcagcgtttctcatctcctcctccatcttggtctcccttccctgatccccagctggttctttgcctccctgcactcctacccgattcgggtcttacatcctgcccccttcagcccccagccaggtgatcagtctccatgaagcccaaatctgatcatgtgccaacctgcttccaagcctataatggcccccatgaccctacagtaagagccagactcccccaggaccctgcccgatcctgcccctgctgacccccagggcctggcccacagatctcagtggcacaaatctgccactagggaccccgcgtgcccagttctttcccatcccagagacgggaccaggctgattcctctgcctagaatgctcttccccaggtctttctcctggcttgcgcttcctcaatcctcacatgccagcctgaaggcggcctccccttcctcctcctggcccgtttagcagggtcaccccaacccctctatcacatgccatgtgctttcctcactgcattttgtaataatacattcacgccttactggaacactgacttcttaagtggattctaagtctcttaagggcagggagctcgtctgatccatttaccaacagcccccatagccccctcgccctccacaaccccgcacagcgaatgaaaggaggctctcggagcgcaggagacacacgacggttctctagcgcttgggcacggagcagggagctgctgcctcacgcccaggctttgttcatccagagggcaccgagcagcttctgagacccaccctgtgtcactggccgggctgcatatcccagtctgatgcacagacccacgattttttgtttgtttattttctgagacggagtctcgctctgtcgcccagactggagtgcagtggcacgatctcggcttactgcaagctccacttcccgggttcacgccattctcctgcctcagcctcccgagtagatgggactacaggcgcccgccaccacgcccggctaactttttgtatttttagtagagaccgggtttcaccgtgttagccaggatggtctcgatctcctgacctcgtgatccgcccgcctcggcctcccaaagtgctgggattacagtcgtgagccactgcgcctggcagacccacgacttttataatcagctcccaggttgggagaagccccttacagatgaggctccccgcccccgccgggtgcccgagagagcagggcgcggcccgcaggagtcacccggcggtggccaggctgcggcgggtccggacccctcccgctcccggcggatgcgtcacctcgcgcttgaggcgctcggcatccagcagcgcccgctcgtggaggcgacactcgcgcacggtgcacacgctgcacacacagcggccctcggtccggcagaagagctccagcggccgcccgtggcgggggcagcgcgcggcagggtcggggccggggccgggatcggggccgggatcccgggcgggcccggcgcgcaccacctccagcacgccgctgagggccacgttgcggcgcagctcggcgccgtcgggaaagggctcccggcactcggggcacgcctttccgcagcggtcccaccagtcccggatgcaggccccgcagaagttgtggccgcagggcagcgtcactgggtcctggtagagccccaggcagatggcgcaggtcagcttctcctccagcagctgcgcggccatggcccggcggcggcgagagccaggcgggccccgggcgtcttaaagggaccgcgggcctcgcgcgctgagggcgcctgggcgtggctaacgcggggcggggcgagatccgggcggggcggggcgagatccgcgcccgggaaggcggaggggggcggcaggcccttctctgacaccctcgacgagcgaccgccgcaggggcctaggccacccctgcccacctcggcctggcccgctcgaaggttccgcgttcccgccttgcgcccctccctccgttagggtccacgccaccccggctgagagctgagttcggctctctagggtcccagcctggcgggtccatcccacccccctgggccttcagcccaggtcctggagaccagaggctcgaaaaccccgccaggactccgggcttctgaccacgggccgcgcggaacctcttctggactcatctgccagtcgcctaacagcatagacccccacccccaacaatcccccggggcttggcgatgaaacgggctggcgggctccctgcagacccgagcactgctgcactttttcctggagctgggtttcggacacttgccagactggggtgtctcccttctctgggctacacgtaattttggttcttttaaagtaaacagcgagatggaaatgtctggtcaccaagagacagggaccagttaactggtatttttcaaatggccctgaatgaatacacaaaccagctttcatctgcaatcagcatcccctcttcctgctgccctccgctggggagagttccttgcctggggtccaagctgatctgcagcctcagtatttacaggcactccagcatttcccctgaagctgagcaggcaaggcgggtctggggcctagcgcccacctacctgacagtgtgtatcaggccagggggaaccccaggagagtacggcctttctaaccaagctgggctgatgttgaggcggcacgagctctcactgctgcagcaagcactgcgtcctctgtgcggccatagacgaagtttctttctggacaaagtgcacggatctaccctccacctactagttagccagacttctgcttttggtaagggagaaacaaaacacctaaccatccagccgcaagactccatgggttttctgaccctgagcaggtctcttgagacacgctgttgcctacctaatgtggcttctcctcccaagcatggggtgggggctggagcctgtgcagagggtcagtgctcgggcaggcactctctctccaggggccggtgggacccccctgaggcacagagccagtgctcaataaatgctccttcctgagcccagctgctctgctccactttttcggggagctgggtttcaggaacctgctggattgggatgtctcccttccctgggccacacctgtttttggcccactgcctgcttttgcttcggatcccagggcccctgacaccctcagaagacggaggtgaggacgcacttagtggggtgggaggcagcccgtttcccacccatgaagctccatcggggtcctctggccctggagcaccgacccaggccagctatggcagaaatccctttttttaaaaaatacaggcagggtctcattatattgccagctggtcttgaactcctgggctcaagcgaccctcccttctcagcctcccagtgttggaattacaggtgtgagccaccaagcccggcaagaaatcatgtttattcacattccccaccccaccacctgagagtcactttcactccaagccctgggcctgacgggagggggccaaagaggggggctgcctaaggcagggcccagaccccacagtgtgggcctctggagctgtgtctttactcttgctgccgatcaatcccatgctctgaaatgcgcacactctggctccttagtagatgccataggtgggctcatgactgtccctgtaccggtccaggtagcgcaggggctgccggtgggggaagcgcttctgcttggggtggtaagggggcggccgcacgaactcaaacaccggctcccgcatgtctgcaagaagagtgaggg

SEQ ID NO: 1244937 - DNA, 4001 bp, Homo sapiens
ccgggtgctagtcttccctttctgaagataacaccccgtcaaggaccgttcacagtgcggacagccctggcagcacttaaaaggcaccagaagcgaatgagaagcagaatcgttgatgcgtctgagcacgtgcacaaagcagacacggttctcaggactcgcattccttcacccacttcattcccacaacatccctaagagggaaatacttcaccgatgaggagaccgaggcacagagcagttatggcacgtccccgaggtcacacagtcagagatggaacccggacttgaccccaggcaggctggctccagagcatctccagtgctccaccacgatgctggaggtctggggctctttctcagcagttcaactcagacccagactccacagcagggcctgggggccaatcagaataggccctctcacccaaggggctaggcataagacctgaacctgaagcacctctcgctcaaacaagcagctcaggaaccccaaaatgcagtgtgaataagacccaggtcatacccatgcctggctgtcccagggatgtctatggtctccaagaataagctaagaataagaataggggctgctcgttaggcagcccagcaagagagcacctgttagccggagcctcccatgaacctttcggcaatgttctttgtcagcggcgttgccttttcctctgacgggtcccagtccaaccaaacccagccaacaggaagcagccgggattgtgctatcattcagtcagtcgacaaacgctgaatctatactgcacactctgcacctgattccctactggaaaccaagcttcttccagggaacggggtgggacaggaactgaggggtcatgtgccctgggctgggccggggaacagggtcaggacagccctccactgccaggcctggagtgtaccctgcacctaagcccgtggtgatgcacctgtcaccgcaaaacattctacagtgatcaggggaacttctaccgtgatttaggcaaacgagtgttggctgtgtgatggagatggtgattctggtttacacaagactcacaaactcatcaatctggactaaaggacaatcctaaaagaatcgattctgcccacagagacgtggtatgatctgagtctttctcaactccaaagccagaacagatactgcctaccctctgggggaaggatcccttctctccccaatgcaagtgagacaacatggggtgtggctcccctgctcctctctctgcccaaagcatccatccatccatccatccatccaagttcttgggagcacctcccgctcgccactggggactttctggaagctgggagaacgctggcccaggacccagccagattattctcagtagtcccttctgtcaaagggaggcagtaggctgcgggcttcccaacccaggggtgaagaacaaagagataggacagcagcacaaggacccagtgtgcctgcttcccagccctgcgctcgtccactccacagagagggcgacacgctgaaaacctccggccacacaccagcaatctcagcagcagctgcagcctcctcccccgaggacggctgatgcaggagcaacaagaacaaaccccagtaacaacaacctccactctcacctcccaggtgcttccaaggagccaggctgagggcaccacaagttcgcttcagcctcacgaccacctttgaggcagccactcttactaccccccgttttcagataaggtaactggggcacagagaggtgagtggacctgcccacagtcgcacagctgggaagtgacagggcccggcttttggccactcactatgccatcttaaaagctaatgtctgcattggccatcagacaaagaaagggactcaccagctagacgcaggcacaccccaggcccacgggtgcttgtgagcttgaaggcggttgctactcgaagggagagctgggctcgtgtgggagaagagtggtctccccgcctccgtggggtcccgggcccggccctggcagcagctgccctgcactagcaggagtcgctgtggacgcccttcggcactcaaggaaaaaacgcttccagcgatgcaagcagctgcctttgctgcggctctgattcccagaggatcccaaagcttttcccatcatttttgccctttttcagaaaccacttagctgctgcccctcctccagccatgccagggctgcagagcacttaccagagccagccagagctgcaacctcagctctcaggaaaggagggcgctgctcggcctctcaaacctgtggctcctgcccccggaggtctgggaaacggctccacaaatgacattcacaaccagcgacgtcaaaactagcgtcctgtaactgttccgttttcaaaataaagagggaatggagggtcgtgctgcccgccacacagtactggcctggcattagggacttgttttgagagtccgagcaaccttgaactagtccctaactctcttaggcctctcgttcctgggtccccaaacctggagtaggggttggcgtcgagggggtcttctgggtcagccaggtcccagcctttcttctcaactgggggttcctcagggaaccacaaaacacagataactatcagtgtcatttcctttttttttttttttttttgagacagagtcttactctgtcgtccaggctggagtgcaatggcgcgatctcagctcactgcaacctccacctcccaggtttaagcgattctcctgcctcagcctcccgaatagctgcaattgcaggcacctgccattgcgcccagctaattgttgtatttttagtagagtcagggtttcgccatgttggccaggccggtcttgaactcctgacctcgtcatccacctgcctcggcctcccaaagtgctgggattccaggcgtgagccactgcgcccggccacaagtgtctattttctctcttcacttcataccaccctaaatgcacaggagagaagacccacaagagagaaacgcacaggagagagtcacatacagcagataactagaacaataggtttcattctctcccagaccctggctgagaaaaacagtgaggtctaggtatgcatccaggctgcggcccaaatgccctgcaaaaaccatcctagcagctgcctgcgggacgccaacaagccgtagggcaggtccagcctggaataagcagccactgccagggaggccctcgtaaccctgcctggggtcgcttgaaagctctgacccctgagtcaaggcattgaagtgtggccaccccatcaattccgcacagcagttgacaaagagctttcccaaacccgctctcgcaggccgtacagcaaccccgggcagtgggagggcagagactgtcatacccattttacaggtgagaaatgtgtgacgctgggcaattagacaaccgataattagataattgcccaggccgcacgttggtctaggcataaaagccaggcccatcccaccacgccacaccccaccatacccctcgcttagtcactttttttttttttttttttttagatggtgtctcgctctgtctcccaggctggaatgcaatggcgcaatctcggctcactgcaacctctgcctcccaggttcaagcaattctccggccttagcctcccaagtagctgggattacaggcacgtgccaccacgcctggctaatttttgtgttttcagtagaggctgggtttcaccatgttggtcaggcctggtctcaaactcctgacctcaagtgatccacctgcctcggcctcccaaagtgctgggatcataggcgtgagccaccgcgcctggccgcttagacacctgtttatgctatgtgtgtcatgttagcttcaattaatatgaacgttagaattcattcttgtttataaattgtggcaaaaggccgggcgcggtggctcatgcctgtaaccccagcactttgggaggccgaggcaggtggatcacctgaggtcaggagtttgagacca

SEQ ID NO: 1244938 - DNA, 4001 bp, Homo sapiens
cctgaaaccaaggctagtattggatcctgcatatgccatgttttttctacacatacatatctgtaatataatttaatttacaaattaggcacagtaagagattaacaacaacaataaagtagaacaattttttttttttttttgaggcagagtctcgctctgtcacccaggctagagtgcagtggtgcgatctcagctcactgcaacctctgcttccagagctcaagcgattctcctgcctcagcctcctaagtagctgggattacaggcgcgtgccatcatgcccagctaacttttgtatttctagtagagacgagttttcaccacgttggccaggttggtttcaaactcctgatgtcaggtgatccacccgcctcggcctcccaaagtgctgggattacaggtgtgagcccccacacccagccaaagtagaacggttttaacaatacactctaataaaagttatcacacactgtgaccatacttttgcagtttgaggtgtgacagcaaaactggcatgaggctggggtcagtggctcccgcctgcaatcctagtactttgggaggccaaggtaagtggatcacctgaggtcaggagttcgagaccagcctggccaacatgatgaaactccatctctactaaaactaaattagccaggcgtggtggcaggagcctgtaatctcagctactcagaagggtgaggcaagagaatcgcttgaacccgggaggcagaggttgcagtgagccaagattgcaccactgtactccagcctgggtgacacagtgagactatgtctcaaaaaaaaaaaaaaaaaggcaaaaaaaactagcacgaatttctttttctttagaatttcacagatagaagattcagcatatgactgttttcttcccatcttttcacttaaaggaagcaccttacggtttctctttggcatatccgaacagccagcatcactaccagcatcactactctggtgctttggggccctaatgaagtaaaaaaagactgacctgaacagaagcactgtgataccaggacgggcgatctgacgactaagtgactgaccggcggggagcatctacggcctggacgtggggaacacagggacggtttgcatcccagatggcacggcagagactctccatcacactgctcagaacaatgcacaagggaaaacttgggaactgtttgaagaattttccatttaatattgtcagaccgtggttgaccgcagataactgaacccatggaaagtgacaccgtggataaggggggactactgtggacagctttcctgggtgattgggagacgtttttctggtagaacaccagggcaaggcttttctgaggatgatctacgaattctccccagagcacttcaacctcccaaaccaagctctgcggctgtgccattgcacagtcttcccacagcagagaggtgtgttttatttaaggcacaagactctggaagaatgggctttgtatttatttatgagacagagtcttgctctgtcacccaggctggagtgcaatggcgcgatctcagctcactgcaacctctgcctcccgagttcaagtgattttcctgcctcagcctcctgagtagctgggattacaggcatgcgccaccacgcccggcttgtatttttagtagagacggggtatccccatgttggtcaggctggtcttgaactcctgacctcaggtgattcacccacttgggcttcccaaagtgctgggattacaggcgggagccaacatgcccggccaagaatgggctttagtatctgacatttggccagagtgatcaggcatttgctctcatcttagagcttccagataatcacataatttgtaaaatgacatttataaagagacaatatgtttcatacctgtcatggatactgagagagagagagagagagagagagagaatacgactgcttcccaaactcgtggttgccagcgtgactctgggccaggcctgcctgagcctgggctcctttgggagtctagaagtagatgcggcaatggtggccccctcctggaagccaccccacagccatccctaccaatcacaagaaggcttacaacgctctgggatccctacagggatgccaactcaaatggatgtttctgctgagccaggagcacacactgggccagcaaagcccacgccaagcgaaaggagagcctgggcctatgggatacagagttctctttgaataaactacctgccccatctggcaggagtctgcctggctgcatcccttcccatgagggcttctggaatgtgcaggggcaaaaacactgctgcacagacatgctcctggcaaggggtcctgctggtgccttgtcaggttctggagtggtgtgagctgcacagcatcggtcccccttgctgctcatgccatccgcctctccttctcgcaacctgccttccaggcagttgtgctgtgaagacctgggcggcctgggtgcagcaagctctcctgaggctgagtacatgcagcaagaaggccggcacacagccccgcatcgtcttctgagcctgcctgctgcatcgcgcttgggtcaatccctggcccagctaagcatctgcagccaggggaggatgagactaggaaaggggcctccggtcacatggttcagtccaggagacaagaacttttccagaagtccatacgacccgagtgtgggcttcaggtctccaaaaacgataatcacaagctgggcatggggcagttctcttttcccacttgggaccaaagccaccagactttctggtgtctgaagtacacattgatctgctctctgtctacaggtgaaccacagatgagcctgctgaccagcaggctgggctactgtgctctcatgctctctctctcccacatggacatttgtaaatagctcccaggtgggtcaatttcggaaggcactcatttgggatctggctgacggctcctggctgcattattagagtatgttctgaaggtaagttcttggccgagatgggacctcacaacaagcactgcttgaaagctgtccactgaacggtccagggaaaggatgacccacagatggtgtcaggaatgttaatcaggtaaaattcacagcagtcgtttggcgaaagagtttgctgtctaagattccttctggttgaggtgtctccggagcatgaccagagctgccccgacagctgcatccacatcctgcccaaaggacatgggcaaagggaaagccctctgcacctcctgcttcagcacgtcattcctggacagcgcactcccactgcccatcaccctctccacgccccactcctggagctgctgaatcggaagcatggagtgcaggttctgaacaatgcctcggcacagagcccgggtcacgtgccccagggagaggtcggaggaggagattctggtcactgaggccagctggtccggcaggtgcctctcccccagcactgtcggggtgatggtcaggtgggtatctctctgctgcacagctgcctgaatcatgcgtgaatacacagtggattcttcaacctccaggcctgccagagacagagaagatctgtgtaagctcatgcgtccccctcagtgcaggctgacatggcagagaattcccacagggtgggaacagcgctacttgctgcttctcctcccgctgcagctggtggttctgggctcagggactgctatagccaggctagctacactctgccctggatccccgcccgctgtctcagtgcagaccccagccagacatcagggtgaggtctcattaagtgctgccatgagccctacccctaacacaggcttcttaaccaaggggaccaaatgcatatacagactaataactatcattggctgggcgtggtggctcacgcctgtaatcccagcactttgggaggccaaggcgggcagatcacctgaggtcaggagttcaagaccagcctggccaacgtggtgaaaccctgtctctactaaaagt

SEQ ID NO: 1244939 - DNA, 4001 bp, Homo sapiens
gaagctgtactggcctgggcgcgtggctcacgcctgtaatcccagcactttgggaggccaaggcaggtggatcacctgaggtcaggagttcgagaccagcctggccaacatggtgaaatcccatctctactaaaaaaaatacaaaaattagccgggcgtggtgtcgggcgcctgtaatcccagctactcgggaggctgaggcaggagaatcgcttgaacccaggatgtagaggttacagtgagctgagactgtgccactgcactccagcctgggcaacagagtgaaactctgtctcaaaaaaaaaaaaaaaaaaaaaaaaagaagcagcagcagcagcagcagcagcagctgcacacatggggaaataagagcaatcagacccttctaattgccatttccataggaagttagggagattactgttccagcagtggctacattccggaaaacagccgcagaagaaatgagaggcttctcaagtcctgcattttctttttttttttttttgaaatatataatcaggcaatctcccaagccagaatggctcagagagactcccaagtcctacattttcaagttaaaattcaggcagtgaaactccagagcacacaactgggccatggctgtaaaccagctacgttctgaatctcagatccatgaaaacacagaggcagcctcaccactccgcaggctgtgaacaggacggacggctggctactggccatctccctgcctgcctgttgatccactttcaacaggcctgagtctttctctgactcacccatcaggtggaccccctgcagcaggagtgttcccggccacagaaagccgattccctcatctcatcactcaatacctatctactgagtcctcctcctcagagtccagccctgcgctgggggcacagagaggagtcagctccccgctgagacagaaaccaggtactggctgggcggagggactgcaggagggggcagggtgctgaagaggggtccatggcagttggtgatggatgagctgagcctgggaagggaacagaggtgggctagggtctggagacagacagggaagcctagagcagctgaagaacgggaagtcagtgggacaggaagacaggaggccgggttagaaccagatggccgtcagccttaactccaaggaattgaaagccaacatggttgcatggatgatgctttggaagcctggggggccgggtgctagtcttccctttctgaagataacaccccgtcaaggaccgttcacagtgcggacagccctggcagcacttaaaaggcaccagaagcgaatgagaagcagaatcgttgatgcgtctgagcacgtgcacaaagcagacacggttctcaggactcgcattccttcacccacttcattcccacaacatccctaagagggaaatacttcaccgatgaggagaccgaggcacagagcagttatggcacgtccccgaggtcacacagtcagagatggaacccggacttgaccccaggcaggctggctccagagcatctccagtgctccaccacgatgctggaggtctggggctctttctcagcagttcaactcagacccagactccacagcagggcctgggggccaatcagaataggccctctcacccaaggggctaggcataagacctgaacctgaagcacctctcgctcaaacaagcagctcaggaaccccaaaatgcagtgtgaataagacccaggtcatacccatgcctggctgtcccagggatgtctatggtctccaagaataagctaagaataagaataggggctgctcgttaggcagcccagcaagagagcacctgttagccggagcctcccatgaacctttcggcaatgttctttgtcagcggcgttgccttttcctctgacgggtcccagtccaaccaaacccagccaacaggaagcagccgggattgtgctatcattcagtcagtcgacaaacgctgaatctatactgcacactctgcacctgattccctactggaaaccaagcttcttccagggaacggggtgggacaggaactgaggggtcatgtgccctgggctgggccggggaacagggtcaggacagccctccactgccaggcctggagtgtaccctgcacctaagcccgtggtgatgcacctgtcaccgcaaaacattctacagtgatcaggggaacttctaccgtgatttaggcaaacgagtgttggctgtgtgatggagatggtgattctggtttacacaagactcacaaactcatcaatctggactaaaggacaatcctaaaagaatcgattctgcccacagagacgtggtatgatctgagtctttctcaactccaaagccagaacagatactgcctaccctctgggggaaggatcccttctctccccaatgcaagtgagacaacatggggtgtggctcccctgctcctctctctgcccaaagcatccatccatccatccatccatccaagttcttgggagcacctcccgctcgccactggggactttctggaagctgggagaacgctggcccaggacccagccagattattctcagtagtcccttctgtcaaagggaggcagtaggctgcgggcttcccaacccaggggtgaagaacaaagagataggacagcagcacaaggacccagtgtgcctgcttcccagccctgcgctcgtccactccacagagagggcgacacgctgaaaacctccggccacacaccagcaatctcagcagcagctgcagcctcctcccccgaggacggctgatgcaggagcaacaagaacaaaccccagtaacaacaacctccactctcacctcccaggtgcttccaaggagccaggctgagggcaccacaagttcgcttcagcctcacgaccacctttgaggcagccactcttactaccccccgttttcagataaggtaactggggcacagagaggtgagtggacctgcccacagtcgcacagctgggaagtgacagggcccggcttttggccactcactatgccatcttaaaagctaatgtctgcattggccatcagacaaagaaagggactcaccagctagacgcaggcacaccccaggcccacgggtgcttgtgagcttgaaggcggttgctactcgaagggagagctgggctcgtgtgggagaagagtggtctccccgcctccgtggggtcccgggcccggccctggcagcagctgccctgcactagcaggagtcgctgtggacgcccttcggcactcaaggaaaaaacgcttccagcgatgcaagcagctgcctttgctgcggctctgattcccagaggatcccaaagcttttcccatcatttttgccctttttcagaaaccacttagctgctgcccctcctccagccatgccagggctgcagagcacttaccagagccagccagagctgcaacctcagctctcaggaaaggagggcgctgctcggcctctcaaacctgtggctcctgcccccggaggtctgggaaacggctccacaaatgacattcacaaccagcgacgtcaaaactagcgtcctgtaactgttccgttttcaaaataaagagggaatggagggtcgtgctgcccgccacacagtactggcctggcattagggacttgttttgagagtccgagcaaccttgaactagtccctaactctcttaggcctctcgttcctgggtccccaaacctggagtaggggttggcgtcgagggggtcttctgggtcagccaggtcccagcctttcttctcaactgggggttcctcagggaaccacaaaacacagataactatcagtgtcatttcctttttttttttttttttttgagacagagtcttactctgtcgtccaggctggagtgcaatggcgcgatctcagctcactgcaacctccacctcccaggtttaagcgattctcctgcctcagcctcccgaatagctgcaattgcaggcacctgccattgcgc

SEQ ID NO: 1244940 - DNA, 4001 bp, Homo sapiens
gaagcaaggaggcccagggacaaccatgcccccctgcttcccggtgctgcgggctgagccatgcccggccccgccgccctcctcacccttgtagtagctgtccgtgtagctggcgttgacaagctccttcaggctgtccgtttgccgcgcgatctccaggagcagggggatggtggtgttctgtccgtcgtgcaggttgagcatggctttcagcagacaggtcttccctgtctcagggtctgaaagacataagggagggtcagggcaggccagggctggggccctccccgagcccagcgctggggccacctttgaactcgttgtctgtgaggtgcttcttgctcttctgcaggaagagcagcaggctctccagatcctggcagttattctgagcaacggcttcaaagatactcctgcgatcatagagcctgagggtcttctcggtgctggcggcgacagagtcctgggacagcagcctgtgggccagaaaacacgctcgtctcataccctggcctcccctcggccctgaggccttcggagcttgtcaagggaacacgactaaatcccaaggcaaaccaaaaaggggaaaaatgatataaaagctgcccctcagtctaggtgactgtccagaaaagcaatgtaacagggacagtggagggcatgtgtccccattctgtccccaccctgtctatagacaccatctagaaagtcaccctcctactcccagaccactggcttctctgcctgctcgggagctcgggaggcaggagcctggtggggacggagggaggtggaggcaggggtgtagacagcccctctaagggaaaaggtggcctcacactccccagaagtcagccagcctgtggccctccctgccctgccttgcagctcactggagctgtgctgtgctctccaaaagcctcctgcccttgagcttttagacttcaagtccaagtgtctgtggctggtaggcattgcgggcgtggacacctagacccagcacagacaccagcccccgtgactgcacatcccacgaggtcacatgaggaaggacgctggaccagaccacccctaaggctctccagccccctggctttgtgacatttagcccagaagccagaccaccctgtggcatctccatggccagctgggctcccagcagggaggggggctccagacgcggacttacctggcaccggtggggccgtctcctggcctctggatggtgataacagggctgactgtgatggtcgggcaggagtccagctcaccttcctcgtgagggcaatccaccgggaaagcctcctccgagtcacccttcccaaagagccgggtgcggctcttggccgtggagagctggggcttggctggaggtggcctggagttagggtctccatccagggggtctgggcaggtgtccttttggagtgggtccgcagctgcccccaagtctgtgctgctccatttcttcatccttgctggatcctctgtggcccagtgtgcaacctgcagcagccaccacgccggggttgactcccaaagtaaggactgcttgtccttagaccccacctgccctccttgccaagggccctgtgaagcagggtaccccaaaactccaacttgctgctgcccccagccccctagaactgaagtgtttccaggactgaacctctcaccccagaggcctcagaggtgagcaggcctagcagggcccaggcagtcctgcggccactgacgtcggcctgggagggtggacaggcccccggctcagagccatctgtggttctgggttagacccatccctcctcgtctctgggcctcaggtgcctcctctgcagggtgaggttgataaccaccgcgctgcctccctccccacacagaacaaggaaaacggccggggtggctgtcgtgggctgaattcagggaggatctcggtgatgaggatggctcagtccagaagagccaagcagactgtgtccctggaatagggtgagcggcagagactggcccacccacacccacaccgcactgcggggccctgctgtgcaacgggtccacacatcatcagccaggtgcccggcctgcctttgctcttcaacctcgctgccacagccactgagcttatacgagattttggattttgtgctttttgtcatttttatgaatcaacatctgtcaagcatcctggccttgaatgtttaggcgtgtgtgtgtgtgtgtgtgtgtgtgtgtgtgtgtgtgtgtgtgtgtgtgtgtgtgtctgtgtgtctcactctgtcgcccagactagagtgcaatggggcaatctctgctcactgcaacctccacctcccaggttcaagcgattctcctccctcagcctcccaagtagctgggattacaggcgcccgccaccatgcgtggctaatgtttgtatttttagtagagacagggaacgtttaggctttaagtgatttggagctggttggtcttctaggcctaaacacctagagatcagctggccgctggcagcagcatgtgtagttggacacatgagctgatgctattttccactcccatcctgccccatccccatgcttcccctccctctggctgggcatccccactccctggcacccaggggtggcccatacatccctcccatagcctctattcccatcgggtctccacctaagggctttttcctctgtctacccttgcacaagtcctatcaccactcagatgctacttcccctcaggatccagcactgatgccgcctcctccatgaagcccccagatccctgccctgctcatgctccccgctgtcctccacacagtggcccagcccactgaccgcctgtcccacacagcctaccatgtggtccagcaattgctatctgtcactgatttatctctcccgcaccctgtgacctcctcctgggcagggacctttcctggtccatctccttatgaagaagctgtactggcctgggcgcgtggctcacgcctgtaatcccagcactttgggaggccaaggcaggtggatcacctgaggtcaggagttcgagaccagcctggccaacatggtgaaatcccatctctactaaaaaaaatacaaaaattagccgggcgtggtgtcgggcgcctgtaatcccagctactcgggaggctgaggcaggagaatcgcttgaacccaggatgtagaggttacagtgagctgagactgtgccactgcactccagcctgggcaacagagtgaaactctgtctcaaaaaaaaaaaaaaaaaaaaaaaaagaagcagcagcagcagcagcagcagcagctgcacacatggggaaataagagcaatcagacccttctaattgccatttccataggaagttagggagattactgttccagcagtggctacattccggaaaacagccgcagaagaaatgagaggcttctcaagtcctgcattttctttttttttttttttgaaatatataatcaggcaatctcccaagccagaatggctcagagagactcccaagtcctacattttcaagttaaaattcaggcagtgaaactccagagcacacaactgggccatggctgtaaaccagctacgttctgaatctcagatccatgaaaacacagaggcagcctcaccactccgcaggctgtgaacaggacggacggctggctactggccatctccctgcctgcctgttgatccactttcaacaggcctgagtctttctctgactcacccatcaggtggaccccctgcagcaggagtgttcccggccacagaaagccgattccctcatctcatcactcaatacctatctactgagtcctcctcctcagagtccagccctgcgctgggggcacagagaggagtcagctccccgctgagacagaaaccaggtactggctgggcggagggactgcaggagggggcagggtgctgaagaggggtccatggcagttggtgatggatgagctgagcctgggaagggaacagaggtgggc

SEQ ID NO: 1244941 - DNA, 4001 bp, Homo sapiens
gttagtgcaaaaggctgggcgtggtggctgggtgtaatcccagcactttgggaggctgaggctggctggtcagctgttagagaccagcctgaccaacatggtgaaaccccatctccactaaaaaaaatacaaaaattagctgggcatggtggcttgtgcctgtaatcccagctactagggagggtgaggcaggagaattgcttaaacccggaagctaagatggcaccactgcactccagcctgggcaacagagcaagactctgtctcaaaaaaaaaaaaaaaaaaaattgcggtttttgccattacttctcattacttctaatggcaaaaatgccaagtgcaagtaggtccacccactgtgtgggagcccagccccaatgcaggggaagtgggccaggagggatgagcagcaggggtgaggagagggagggaggcctgtggggtgaggaacagggaaccaatagggccacccttttgatgttgtcccccaggaagagccatgactgtccccgacttttcctctgggacttcctggaatctgaggggtcacaacccctgttaccatttacattaacagcacaaccctttctttacacaacgtcttgcctggcagccaatattccaacagataaaagtgcgatgactgggatggggccagtcactcaacccctcgccaaagaaggggagctctaagaagaaataactgggaaaaccactagactatcaaacccttcattttgctgccaagactactaaggcttagaaagggggagtggctttcccaaggtcgccagttgttggcagagccggatctgacaccatgcgtctaccatgacgttcctcttccgttttcaaagcctttcagggtctgtctatattttcagtctgattcagctctgaaggcatcgaatactacctttgtgtgcctcagggcctctgggggcttcacgaagggagggaggcccctagcctgtggcccaggctctctccaccacgctgcctcaggccctaggctggcctaggaagctcagcaaacagcacaatctcaccctcacaggaaaactgaaaccacagcctccatcacttggcaagggtggggcctcggtcagggttggggaaccctcatgggcccagtgagcaggatcagaaagaagaaggagtcaaagagtggtaaggagacagaagggtggagaagggggcagggggcagggggcagagagcagagaggagcggcaccagcagagggaagtggagagggtaggctgggaccaggccctggggacccgggtggggtattttcccatggaaacatgggaggtggggagctgcctggctgcctcagtttgcagatgtgacccaccaccctttctacacacactggggcagaagggtgctctttccgtttcataccgtttagcccatctgtgtccccaaccaaaccctggcccattcctccagccctagactcccaagccccagcagcaacagttgtctgtccagcccccaccccacctcctgggaccctcacccaccctggcagcagaggaaggggtgtggaggtccagggagagggtgctggagccccacacagaccctggctccaggctgtagaagccaggagcccactaggccttccccaccccatcattcactgtcaggcttggagacccggccccctccaacgtccccagcattgcccaccgacttaccccgcaggctgaggccagggcgtggcggctgctgggatcccggagcttctcagtagcaggggctgcgggaggaagtgaagccgggaggggctgccggcgctgacagcagaggagcggcggaacctccctccccagctctgagcactaagctccagcaagcaggttctggtctctcggtcaccctcagcccacctggccagccggcacggtggagaacgggagcttaactctcccctgtcaggacaggctagccaccagagactgaccatctggacacaccctgctgcgaatcaggctccacccccacccctcccccttctagccactaaggtctcaggtgggggtgggtgacactcagaggcagcccttggatgctggggacttgccacccatggaagctgccatggatgggggattcttccccaagtccactgacagctatctcctccccttctccaccacatgccttccaagcagccgtgtggcccataaatgggcctgagttgacccatggcaggggagaaagctgatgtggacagcccccagggagaggctcagcccagcagatgcccctgggaacacagtcccacccacccatccacccagcagttgggggactttcccacctcccaggaccttctcccagcctcctgaccccaggactctgatggctaaagttcccctaaaggtgctccaagcaccagccagcaggtggagacaaggaggtgggcacgcactgctaaaatcagacctcaccaccaacggggccctggtctggactcagtcttggagcttggggacccaaccaccaccgaagtagccctaggaatctctctccctcactcccaaaacctggcatcagctcttcctccaaaatttgtctttctgagtggtccaagccactatcactgctcccctgggcaactgcagccacctccaaactggtctccctgcttcattcttgccccacactcataatccatttctccttatagcaactgaagtgaccttttaaaaatgggaaccagggccgggcgcagtggctcacacctgtaatcccagcactttgggaggccgaggtgcatggatcacttgaggtcaggagttcaagaccagcctggctaacatggcaaaaccccatctctactaaaaatacaaatattagctggatatggtggtgggcacctgtaatctcagctacttgggaggctgacgcaggagaatcgcttgaacctgggaggcggaagttgcagtgagctgagattgtgccactgcacaccagcctggacaacagagcgagactctgtgtcaaaaaagaaaaaaaaagaaaaccaggtcacctaacgccttgacttaatcacaaaacctcacccatggtgcttggaataaaatgcaaactccataccatgagccctcaaagtccagatgcccttctccatcgctatccgtcactcatggcaaccctgtcatgcacattacactctaggcctgcgccatccaataagatagtcactagccacaatgactgtttagatttaaatcaattataataggcctcacgcttgtaatcccagcactttgggaagctgaggtgggtggatcacctgaggtcaggagttccagacctgcctgaccaacatagtgaaaccccatctctactaaaaatacaaaattagtccaggcgcggtggctcatacctgtaatcccagcactttgggaagccaaggtaggtggatcacttgaggtgaggaattcgagaccagcctggccaatatggcaaaaccccatttctcctaaaaataaaaaaaaatagccaggcgtagtggcacgtgcctgtaatcccagctacttgggaggctgaggcaggagaatcgcttaaacctgggaggcagagcttgcagtgagccaagattgtgccattgcactccagcctggacaacaagagggaaactctgtctcaaaaataaatacataataaaataacagtaaacattcagttctgctgtcccattagccacattttaaatgctcagttggcacatgtggctagtggctaccatatcggatagcacacagatgacaaatttttctttttttctttcttttttttttttttttctgagacggagtttcattcttgttgcccaggctggagtgtaatggcacgatctcagctcgccgcaacctccgcctcctaggttcaagtgattctcctgcctcagcctcctgagtagctgtgattacaggcatgcaccaccatgtctggctaattttgtatttttagtagagacg

SEQ ID NO: 1244942 - DNA, 4001 bp, Homo sapiens
gtgaaaccccgtctctactaaaatacaaaaaattagccgggcatggtggtacatgcctgtagtcccagctagtcgggaggctgaggcaggagaatcacttgaatccaggaggcagaggttggattgagccgagattgtgccactgcactccagcctgggcgacagagcgagactccgtctcaaaaaaaatgaaaaaaaaaaaaaataaagtttttattaaacataaaaaaggagctatggctgacccctgggggcagctgggagttgggtgcagaggctctgggttacataggagagcgcgggctgcgttggggggtgggggagaccagaagccaggggccaggaggaggctgctgcaggggccatagggacggggaagggggccagctggccacagagggatgacatgggcggggaaagggctgtgtggacaggtggtgactgtgtggtcagggggtgccactctcagcttgaatcatcctcaggggactcacctggcgacacataggtgggggcaggaagacggatttctgtaagaagaacccagctgggtggggtggagctggggccactggtgatcctaccccaataggaaagcttcctggaggaagtttccggagccaggtgtcatcaggctggagagagtcccccgccctccaactcaaagggagcaggctcaggatggaggaggcatcggcgagggagagctttggccctggagcgtaggcaaccttgaggccaggcaggtggagtagcccacagagagggactcctgggcacccggccctcccgtgtccagtcacggcctgatgaggatgggcagcctctatggctttccccatccccacgtggcctttggtggactaaaaggctgggatgcaccgagcgtgaaggagacagaagaagggcacgtctcttgcccctcccagggcctctggtttcctttctgagaagtgggctgaatggtccccaaggactctgtggccctgagagctggttgctctctctcttctctgggcccgagaatgtggcctgccctgggcctctggggcaggagaggctcagggaactctggactagggccgcagcagctatcattagctccctgagtcaccccgtaaaccccacgttctcacctgctggactctcttgttgccctggccctccctctctctcccaatccctgacactgattgaaatggcctttcccgggcgacagaccaggccgcggagccacagctgctgactcagcacctgtgagatgcctgggccccgtctgtctcccacggtggggccacctcctcccatcctgaactcccatcacaatcctgccccagaaagccacctccctgggtcagcctcgggaggcaggagcctctcctctgcccccagcagtggtgagattgagatgtccctccccaggattcccaaacctcaggggaatgttcctgagtctgtaaggacctatattctcacacatccctacagccaagagtgcagccaagagtgcctccctacagccaagagtgggcccctggctggggcccaagctccttccaaccctcctcccaaggcctattggccaagggcagacatggcccagaggacctctgagggccacgctctgggctccccaggggccttggagatcaccagctgccttgtgcacagaagactcacctggtgaggttctgggtggtcgtggcaacccttgccctgagatcaccgcatgtctggggcccaaggcccccgggtgggactgtggctgaggcggcgggaagctctcattgcaggcagagggatggctggaatgaggcgtcagaggcagaactggctgagccacctgccctcggcgccaggcaggccacgcccaccagccacagctgcagcacccgcccacccacgtggcccgtgtgagtcacccccacacccacacagcagcctcatccccaccggagaaaaggcaggggaggccgcaggtgccaagatcgaagttgtgggtccaactcctccctctctggcattccatgctgggcagggactgcccatctcaggcctatttttccaactaggaaatgggaatgataacatctactttccaagggagccgtgaagagccaaagagatcacagaggtgggagggcctagtgaagagtcaagcgctctgctctgtcccctgggagggaagaccgcagcccaggcctagcctggttgacctcagggtggccagccccaagactcggcacttgttctcaaaagtcggttcctgggatcaggtctctcggggacggaagtccccatttaatgctgtccaccagcagtcacgcatcatggcccttagtgtcagcctcaccccttcctggctgaatgaccttagcaggtcatttctccgagcctcagtctcctcatctgtgaaacgtgcttcataaacccactttgcaaggttatcgtggggcttcaacaagtacaagtagaaagggccagaacaaggcccagggcacggcaagaactcaataaacaatgtcagctcttagctatgattgcttttgtcatctcaatgtattctcccagcaactgcccaggttgcccttctccaaggccagggcgtcatagaaggaatcggtgccctctctcctggcccaggctgcagctgtgaagtgggtggagtgagtcaggatggccgtgtgtgtctcgcgtcactcaggaactgcacacctgctccccggggcgagatgtggacaagacacagctgggacagagcaggaagtctctgctgacgcggccgcagctggcgcctgatgggcagggaaatccccagctgtgagcctctcaatccctcatcatcacaacctgcctggcctggggaggaggcaggaggcaggtgaggcttctaggccacgggagagcaggacctatggccggtaaggggcagaccagacttgagggtgtgggtgaagcaggagaccgcttctgccgttgaagtcagggggtcctgaagttcccactcacaatctgaaatctcatgactgtgcctgaaactcgaccggaaaagcccgatctggggttgagcacggcctccggccactagcttactcaccctctcccgacccagccccgcgccctccctgtttgcctctggcggctcagacgcctggggaggaagctgctgccaaatgtcagtgcttccattttgctcgtgttcataacttttctcagagggcaggtgggagctggtgaaaaaggcccctgtctcccacccagaggtgtgccctgtgcccagcaaggaagaaggggacccccgctctgctatgagaggcagcaggagccaggtcacccagtggagtcacagtcactacttaggaagcccgagcccatcctaatcccaccccaaacacacagaagcagcagcttcagccccttagatggtctatattcaaccccatttaacccagcacatggtgagagcccacgggagaggccgtggcaagggcgcaggtggacaacgagggattcagaactggagaaggccgtgtccaccctcgtgggccacaggggacacaggctcaggcaggaaccatgacccaccatgtgggtcatcaggacaaaatgggctgagacccccaaggcgggaggaagtccctgtgatggggtgtaggggatgagttcgggaaagagggagcatctgcctggacttggaaggagggaagaggccacaacatggtgaaaccccgtctctactaaaaatacaaaattagcggggtgaggtgctgcacactgtagtcccagctattcgggaggctgaggcaggagaattgcttgaacctaggaggcagaggttgcagtgagccgagactgcaccactgtacagcctgggcaacagagcgagactccgtttccaaaaaaaaaaaaaaaaaagaaagaaagaaaaaagaaaaagaatggaaaagtgaaaaggaatatgatcagaacaaaaatataacatgctatagtgtaaatgcata

SEQ ID NO: 1244943 - DNA, 4001 bp, Homo sapiens
gataagaatgtcccccatcctgcttgatctcagcaggctttagcacagctaaccacttcctccttgaaagaccttcttttggcttctgtgatgcgactttggtttttctcctgcatcaccagacactcctcggtctgtttctgcttcttatctgccccctaacctacacagagagccccagggctcagacccagccctctactctgatggcactcccatacagcccagtagtttaaataccatccatgtgctcatggcacccatatttacatctagccttgacctctcctcacactccagacttggattccaattgtctgtctgctttacactcacttggatgtccaagaagctcctcaaaattaacttatctgacacagttctttcgactggtcttgtcctcccaaatctgctcctcttcattcttcccactcagaaaatgacagcaccttcatccactggtgcatgcccaaatcatgggcggtaatcctgggttcttctctctccttaatcctgacatccaatccattggcagtcctatccattctttctccaaaatatttctgagattcatctatttttcactcactgcaactctacccacccccaacctgcgacaagcccctagcttctctcacctgaatgaacagcccagtctctttggattctcttcccccaccttatcttctgacagcactggggtctatgtgaagccaacaggccaccaccacaatgtaagcctcgtgacagcatagccctcgtctgccctgcagccccagcatgtgacactgtgcctggcaccttatgggtacttgtcaatactcattgattcagtggatgggtggctcccggaggcggggtggtggcagatacctggtactgcaggaaggtcacagtgtggtcggtcagcagcagctggtaagcttcctggatagacagtggcaggtcttggtggaagaggtggatggagccctggaagtggggccaacagctcagcttatgagccctcactacagtgccacagaggaatggggcaacttcccagctctgatacctccccctccccctctcagcagcgcatcaagaatgtggccaaccaggaaagtggggcagcatcactaatgtggactggaatccctgctccctgcaacgtaccacctcctgctttagaagtttggttatcagttctctaaagaccgggttgtgtgtgctttttctccgataaaacgtgtccttcccgttctttggtcccaactccttccccacctcccgggccccacttacacactccagaagatacaaggcctcttccgggtgaaggcgctgccggccctgctctgagaagcccatggtctgccagaatttgccctgtgtggggcccagagcaagtgtcacaagggagggagggcagggagggcagggagggcggtccccggtccccgagcccgccgctcaccgcgggagacttcaactccacgaagccctcttctggcctccactcggcagccaccaagctgcccctggcgaggagtggggaggggtctgcgtcagtccattccggagaccccgcggcccgcctcgcccccgcttcccttacccctgggcccgcccctctcacaggcgctccacgcgctgctctgccagcagctgccagagctcttcccggcaccggcgcagccgctcggcctgagctgccgagccgtcgggcagaaagtccttggggccatgcgagcgctggggcagcttctgcgaccgcgagcgggcggcgaagagctcccgggcgctgggggagaaggggacgcggggtcagcgccgcgcatcgggggccgcctggccgggtcccgggcgccggtttccctacccgcgctggccccgcgcccccgacacccactccggccgggccgcgccgcacctgagcacgcgccccgcgggaacctccacggccgcgggctcgggctcgggctccatcccgccgccgcctgccgctgcgcgcgccgccacgccccgcccaccgccggagctccgcgctgccctagtgcccgccgatccgcaatgccgcggcagccccgccccctgcaccgccccagcccgctctgcgccctcctgattgtccccggtcctagcgcccgcccggaagcgcaccccgacgccgggtctgggagctcagcccgcaggttgctggagatgcagaaggcccctcttttgcccctagccctcctcggggcttctctccagtaaagcctgaggagccggcgtctggagtgcagtgcgaatggtcacacttgtgaccgcccctctgcagcctcgcgctgcttagtccccaccgcccgggctgggcaaggagggcagaagggctcagggaaggacgagcggagggtgtgcaaattccgactttgcaggccgaaggccacccgggaactgtcaggagcggtccggggaggttcgccattccttcggtgtcttccgtccggtccctacggctgggctccgaagccaggtttcgagggccgggggcgggaggcgctgtccggcccacgacggtgctgaagcgccacctccgcccggcacgagcgcctcctcgaggctggggtccccgcactggtgccgtccgctaggtggtgccattgcccggccggcggctgcgggtgggcgacgccggccgcagacggggggtactgcaagtggggtcccgcgtcttggttgccaacccccttcacattacgtcttctctcccaccagtcagacccggggtgtctagcccttgggtctaagtccagagccccaggtcacctctgcccccgcgccccccgcccctccgtttcacctgggcgcatgcgctgatccggtcagcgcccccggtccgggcgggcacgagttggggcgggatctggcgcggatgggggcggagccgccggtgctgactgacagcctgactgcgcggccgggacggtccctccgttcccgatccggcgggagggaggggggaggggcgggatttcctgcgggaggcgccgagccggccttggaaaaggagaaggagaaaggggggcaggggggagtgggagccaccgtcctgagtgccagggaccgagcagggccagccggaccccggcgggcggccgggagaggtgaggctgcggggcccgcgctgggggtcagcgcccctgggggcgggcgcaaactaacttttcttgcggggtcggcgggcacctccatctccccgctccttccgtcctcctcgcgcccctttttccatcctccgcgtttatacctcgggcgcttggcccgcccggcttctcccgccgctttgttccccggtgggcctgggctgggctgggctgggctggggggttgcgaggcgctggagggacattccggggggcgggggagccagcccgaccccaggcactgccaagggcgccctccgcccgtgtcggccgcgggctccgcgtgggagtgcccctgggttgggcttgggacgtttggggagtgaggggttcccggccagggccccaggcctgcgcggatctcatgccacaagactctggcagtaaattcgctgccaccgagaaactgacgtaagcttctctgcggtggagtccagggtctgggcttcaggttcaggcttggggggcttgggagccccgtttgtcagcagtgccccagctctctctgttctctgcccagctgctcctccacccgacacaaggggcgagggcgggtcagcaacaggtgctgtgcagcttccctctctagcaggcagagcccccagaaatggggggccagaagcacttcatgctctccgttcacaaagagtcctaggactagggcatccagccattaaagcgaagccttgaagcctccgtagggaggaatctgggggctggtgcctttgacagggagtgacccctgcccgcctgcctgtgcctgaccctcccggccccacctcctggcccgccagttgtctgtgggtgtcggagcctcgggctgtggagaacagg

SEQ ID NO: 1244944 - DNA, 4001 bp, Homo sapiens
gagattttgttatgttatattttcttataactgagataattattacagttaaagagatcggacttaactgaacccatcttgcttctaacctccaagctgtccttgttcattcctgggtgtaggctgaaataacttcgggaggcgcttagtttatagtttagctttgaaacaaagatggtaacagccctttgcaaaacaaactcccttcctacctggggacaagactgccttttcaggactaacaaattagccataagattagaaattatggtttaggagtcatgtagctggaggctacaagattctaaacctcccaaattgcttctcaggataacatcactattaaaaaacagatcagcgcttgagatattttgcagactctgcactccatggatcagctggcaccacccagattgataaactggctcatatcttgtggcccccacccaggaaccgactcagcacaagaggacagttttgactccctatcatttcacctctgacccaaccaatcaacactccctactttctgaccccatacccaccaaattatccttaaaaccgcggatccccagccgggcacggtggctcacgtctatagtcccagcactttggggaggcccaggtgggcggatcacctgaggtcaggagttcaagaccagcctgaccaacatggagaaactccgtctctacgaaaaatacaaaattagccaggcatggtagtgtgcgcctgtagtcccagctacccgggaggctgaggcaggagaatcactggaacccaggaggtgaaggttgcagtgagccgagatcgcgccactgcactccagtgtgggtgacagagtgagattcggactcaaaaacaaaaaaaaacaaaaaacaaaaaactctgatccctgaattctcaaggacactaattttttttgagtagtaataaaacctcagtaacctgtacaagctggctctgtgtgaattaaactctttattgcaattcccctgtcttgataaagtctaggcagtgggcagggacaatatgttgggtagttacagtggcaccctgagcaaactaatacaattactaacataatttaatcaattaatgtaatttaacatagtttaaaaaaactgtcacagtaattgtgatgttgtgaaatatgtatacatttagtcttccggtttcctggtatccaactccaaaaatccttagaatctgtgaagtgacgtcttttttttttttttttgagatgaagtctcactctgtcgcccagactggagtgcagtggcaccaactcagttcattctaacctccgcctcttcgcttcaagagattctccggcctcagactcccgagtagctgggattacaggtgcccgccaccacgcccagttaatttttgtatttttagtagagacggggtttcaccacgttggtcaggctggtcttgaactcctgacctcaggtgatccacctgcctcggcctcccaaagtgctgggattacaggcgtgagccaccgcgtatggcctaattttgtattttgagtagagacggggtttcaccattttggccaggctggtctcgaacttttgacctcaggtgatccgtccaccttggcttcccaaaatgctgggattacaggtatgagccaccgcgcccggcctgaaatgcagtttaaactcgtttgtttttcttatgttaaatttaaaaaatacttaaaaaaaaaaacatgaaggtgtgatcctgccttcctgaaattgtttctctacttacctgtgcatggagagaagtttggaatgctgtttccccaattataatacgctataatacgcagcagtagttatttttgggtgagacttcggatgctcgtctttgcttcctttttggactttcctgtgccgcttgggtttccgaggacgagcagaagtaatctcagacgcaactttccaaaatcccctcctccagttgcagggatggcgggggcgggtcagcggcgccgccctgcgcatgcgtcgagccgttggtggggccggaacctggtttcccggcctcgcgcccgaggggagcgtattgagcgaggcaccgggacgtcggcggctggcggagccgggcgggcgaagctggagcggcggtggcggcggcgtagggaggccggggccggggctgaggccgcggccgggtctgcgaggcccttggggcggcaggcggcggcggcccggggctcgagcccggaggcaggagcagccgccatggccgagagcatcgtgagtgcggcggccgggcgggagcggggacgccgggatgaggcagcagatttgccggcctcggcctgtgggggaggcgggcctgccggcgccgcgactcggcccctttctcttctctcgccagggctttctctgtagtggctgggcccctctcggggactttcacccccctcggctgcttcccgtccgtgtccctccccaggggacttacgaccccggttccccgccctgggcagggaaaggccgagcctttctaagcagggagaatggactgtggcgaagagaaaccgccctccttccccacccgtttcccggctccaggagacttcctggtctaattccagggactcccagccagtcctgcccctctcagagccagggacacctcttatcctaatctccctctgattctctcctcctgctctcccgcttcccagcaagtgccttgtcatgagtcactaaggagagcagctctgcagacggggacgttacagagctccctccccaccagaagacctgggaaaatgaaaacacagtaacttgccggctttgctccttacttggaaggacaacttgacaattcctctttaaaaggaatgttgtaaatgatgttgatttcactttttacctgaaattgaaattgtcggcccggcgcagtggctcacgcctgtgatgtcagcactttgggaggccgaggcgggtggatcacctggggtcaggagttcgagaccatcctggccaacatggcaaaatcttgtctctactaaaaatacaaaaaattagccgggcgtcatggcgcactgtaatcccagatacttgggaggctgaggcaggagaattgcttgaacgcgggaggtggaggttacagtgagctgagatccctccatggcactccagcctgggctatagagcgagactgcgtctcaaaaaaaaaaaaaaaattgtcacacactcctccttaacgtaaaaaatatcagtgacaaatcagaaaaccagtccctcgttaagttgtgagaagtttcttcccaaaagtaaatgtgatgggaaaaaaactaactgaccattggacaggagcattttggttaatattaaggaagatttgggatttctgggggaagcttagcagtattgggtgaagagtaatgttcatactgtagcattgtgacagtctctgcagttttgccaggtgttgtctagaataggtctccaggcccggcgcggtgactcacacctgtaatcccagcactttgggaagcccaggtgggtggatcacctgaggtcaggagttcaagaccagcctggacaacatagtgagcctaggtggcgtcactggactccaccctgggcgacagaatgagactgtctcacacacacaaacaaatgggtctccaggagaacctagcacttatttgcaaggctgttctctggtggttccatcatctctccagtcaggggccctcttggtgcctccatgtttcccaacctggagatgagtggaatgaatatatggcccaggagaaacttaggaaacgtcgactccttttttttttttttttttaaccttattttatttttttgagatggagtctcactctgtcgcccaggctggagttcagtggtgcgatctctgcttactgcaacctccgcctctcgggttcaagaaattctcctgcctcagccgagtagctggggttgcaggtgctcgccaacacgcatggctgatgtcttttttatttttagtggtg

SEQ ID NO: 1244945 - DNA, 4001 bp, Homo sapiens
gaccgcctggaggctgcagggccttcagaggggaccccctggcccactggcaggaaaggcttgctggtctctctctgtgggggaagaggcagccccgcaggtgcccagttctgccgggaagagtttttttaaaaaggagaataagaagctatggccgggctggacgttgtggctcacgcctgtcatcccagcactttgggaggctgaggtgggtggatcacctgaggtcgggaattcgagaccagcctgagcaacgtggagaaacctcatctctactaaaaaaaaaaaaaaaaaaaaaattagccgggcgtggtggcacacacctgtaatcccagctacttgggaggctgaggcaggagaatcgcttgaacccaggaggtggaggttgcatgagcaggaggcagaggttgcatgagcagagatcgcgtgactgcactccagcctgggtgacagagcgagactccatctcaaaaactaaataaataataaaaagcagccatggctgtgtgctgggcaaggatcccattccaatccagtttcaccaggaagaagctgatcacagcatcaggctctcagctcactgcagcctcaaactcctgggctcaagccatccttcctcctcagcctcctgagtagctgggactacaggcactgcaaccatgtcctggtaattttttttttttttttttttttttgagacggagtctcgctctgtcgcccaggctggagtgcagtggcgggatctcggctcactgcaagctccgcctcccgggttcacgccattctcctgcctcagcctcccaagtagctgggactacaggcgcccgccactacgcccggctaattttttgtatttttagtagagacagggtttcaccgttttagccgggatggtctcgatctcctaacctcgtgatccgcccgcctcggcctcccaaagtgctgggattacaggcgtgagccaccgcgcccggccgtcccggtaattttttaaaattattttttgtaggccgggcacggtggctcatgcctgtaatcccagcactttgggaggccgaggcgggtggatcacgaggtcaggagatcgagaccatcctagccaacatggtaaaaccctgtctcgactaaaaaaaattagctgggtgtggtggcatgtgcctgtaatcccagctactcagcaggctgaggcatgtgaattgcttgaaccgaggaggcggaggttgcagtgagccgaggttgtgccactgcactccagcctggtgacagagcgagactctatctaaatatatatatatatatatatatatataatattttgtagagacagggtctcgctacattgcccaggctggtcttgaactcctgggctcacgcaatcttccctcctcagcctcccaaagtgctgggattacaggagtgagccactgtgcccggccccagaggagggttatttatcacccccaagacctcaacaagtcactagaagcaaaaggacaggctgtcagtgcctggttggccagactggggccactgggggccagaggccgttggaggctggctgcaagggacatttgccttcaccccctcctgcaccctgagccaaagattgcccccaaggccctcagggagatctggcagatcccttgaccagaggccagcatggggctgagagaactgcgcagtggggaagggggagggggctgcctagaaccacccccctcaacccaatctcagcattgaggtgtggggtggcaccaggggcaggggtgggtgtgaacccagcccagggacttcccttaggacttcagggctggggacatctccaacctcagggcaaggccacttggcatggctcacctgggacagtaaggggctcctctccccctcctccatccttgacgctggaacagaaagcccccagcacaggcgccgggagaggttcgctggctcctctgtggctgggctgctgggctggtcctgactgcggccctgggctagtctgtgaacagtgcagccctgggcatgggaatgggggaggtgcgagccctacccagatgccggagtcacagttgagtcatgtgaagaatcacattttagagcttaaggaggcctctgcttgtggagatatatttctccccagccctggctctgtgggtcccctaagctcagcgcaggtgtgactcaggcaggcatgtttgggtgccagccttgtggctctcactgcagccccccatgcggacttcagctctgcagggtcagcagccgctccatcagctcccaaccagggaatcagaccctggtaaattggttcacaaccccaatcccaagagacccatgggcagccccagcgccaatctatcccccggcttgttcactgcacgaatgaaacagcgtccccccaccagatcacctccttgtttttgtttttgagactgagtttcgctcttgttgcccaggctggagtgcaatggcgcaatctcggctcactgcaacctcgcctcccgggactacagatgtacgccaccttgcctcactcatttttgaattttttttgtagagacagggttctgctgtgctgcccaggctggtcttgaacccctggactcaagtgattctcctgccttggccttccaaagtgctgggattacaggctggagccactgtgcccggactcagccaccaacactcagcagtccaaagaggtggtctgggtggtgcagcacagcaggcaatgtactgatggagcaggcagagggtttcaggcgcgcgtgagacgcctgggtgggagcacaccgggcaagttttaggaggaaaggtcacctggctgtgtggggcaagcggagatgggggtgggagggaggtccatgaggtgacagggctggatcaggtgaggccttgaaggccactctgagtcttcagatcttcctcggagaagtgggatatgctgcaggtgggaagtcggggcgaggaccagagctgcaggctgagcttctgggctccagcttcccttcacctccccaaaggtgacaaacccaacctcatgggccctgcagcagctccacagccagggtcacggtcacagggactgtccacggcctccaactcagtctgttctaaggatgggtaacctttttttttttgagacaagagtctcgctctgttgctgaggctggaatgcagtggcacgattttgactcaccgcaacctctgcctcctgggttcaagcgatgctcctgccttggcctcctgagtaactaggattgcaggcgccacacctgactgattttgtatttttagtagagatggggtttcaccatgttggccagtctggtctcgacctcctgacctcaagtgatctgcccgcctcctcctcccaaagtgctgggattacaggcgtgagccaccacgcccggccaaagtctgggtaatcttttaatgaaacgatcatcatctaccactgttatggctgaattgtgccccttacattcttatgataaagttctagccccccggacctcagaatgggacttggagacagggcctttaaaggccattaggggctgggcgcggtagctcacacctgtaattccagcacttagggaggccgaggcaggtggatcatgaggtcaggagattgagaccagcctggccaacatggtgtgaccctgtctctactaaaagtacaaaaaattagctgggcatcgtggcgcatgcctgtaatcccagctacatgggaggctgaggcaggggaattgctgggacccaggaggcagaggttgcagtgagccgagatggtgccgctgcactccagcctggtgacagagcaagactccatccctaaataaataaataagtgccattagcgtgggccctaatccaacatccttacaagaaaattgggacacacggtgggacacatggagagacacgaggaatgtgtgcacagaagaaaaaacatgtgaggtctcggggagaaggtgccatcttcgagctaaggagag
